United States Patent Application Publication US 2010/0291551 A1 - sequence listing, part 4

SEQ ID NO: 5004 - DNA, 7871 bp, Homo sapiens
gggtcttgttctgtctcccaagctggagtgcagtggtgtggtcataggtcactgcagcgtcgaactcctaggctcaagtgatcctcttgcctcaggctcctgagtagctgggacaacaggcgtgtaccacacctggatactttttaaatttttggtagagaagggatctcactctattgccaagctggtgtcgaactcttggtcttaagcagccctcccacgtcagcatcccaaagtgttgggatttcagagggatcatggcccaagttgcaatgtccaccctccccgttgaagatgaggagtcctcggagagcaggatggtggtgacattcctcatgtcagctctcgagtccatgtgtaaagaactggccaagtccaaagccgaagtggcctgcattgcagtgtatgaaacagacgtgtttgtcgtcggaactgaaagaggacgtgcttttgtcaataccagaaaggattttcaaaaagattttgtaaaatattgtgttgaagaagaagaaaaagctgcagagatgcataaaatgaaatctacaacccaggcaaatcggatgagtgtagatgctgtagaaattgaaacactcagaaaaacagttgaggactatttctgcttttgctatgggaaagctttaggcaaatccacagtggtacctgtaccatatgagaagatgctgcgagaccagtcggctgtggtagtgcaggggcttccggaaggtgttgcctttaaacaccccgagaactatgatcttgcaaccctgaaatggattttggagaacaaagcagggatttcattcatcattaagagaccttttttagagccaaagaagcatgtaggtggtcgtgtgatggtaacagatgctgacaggtcaatactatctccaggtggaagttgtggccccatcaaagtgaaaactgaacccacagaagattctggcatttccctggaaatggcagctgtgacagtaaaggaagaatcagaagatcctgattattatcaatataacattcaagcaggcccttctgaaactgatgatgttgatgaaaaacagcccctatcgaagcctttgcaaggaagccaccattcttcagagggcaatgaaggcacagaaatggaagtaccagcagaagattctactcaacatgtcccttcagaaacaagtgaggaccctgaagttgaggtgactattgaagatgatgattattctccaccgtctaagagaccaaaggccaatgagctaccgcagccaccagtcccggaacccgccaatgctgggaagcggaaagtgagggagttcaacttcgagaaatggaatgctcgcatcactgatctacgtaaacaagttgaagaattgtttgaaaggaaatatgctcaagccataaaagccaaaggtccggtgacgatcccgtaccctcttttccagtctcatgttgaagatctttatgtagaaggacttcctgaaggaattccttttagaaggccatctacttacggaattcctcgcctggagaggatattacttgcaaaggaaaggattcgttttgtgattaagaaacatgagcttctgaattcaacacgtgaagatttacagcttgataagccagcttcaggagtaaaggaagaatggtatgccagaatcactaaattaagaaagatggtggatcagcttttctgcaaaaaatttgcggaagccttggggagcactgaagccaaggctgtaccgtaccaaaaatttgaggcacacccgaatgatctgtacgtggaaggactgccagaaaacattcctttccgaagtccctcatggtatggaatcccaaggctggaaaaaatcattcaagtgggcaatcgaattaaatttgttattaaaagaccagaacttctgactcacagtaccactgaagttactcagccaagaacgaatacaccagtcaaagaagattggaatgtcagaattaccaagctacggaagcaagtggaagagatttttaatttgaaatttgctcaagctcttggactcaccgaggcagtaaaagtaccatatcctgtgtttgaatcaaacccggagttcttgtatgtggaaggcttgccagaggggattcccttccgaagccctacctggtttggaattccacgacttgaaaggatcgtccgcgggagtaataaaatcaagttcgttgttaaaaaacctgaactagttatttcctacttgcctcctgggatggctagtaaaataaacactaaagctttgcagtcccccaaaagaccacgaagtcctgggagtaattcaaaggttcctgaaattgaggtcaccgtggaaggccctaataacaacaatcctcaaacctcagctgttcgaaccccgacccagactaacggttctaacgttcccttcaagccacgagggagagagttttcctttgaggcctggaatgccaaaatcacggacctaaaacagaaagttgaaaatctcttcaatgagaaatgtggggaagctcttggccttaaacaagctgtgaaggtgccgttcgcgttatttgagtctttcccggaagacttttatgtggaaggcttacctgagggtgtgccattccgaagaccatcgacttttggcattccgaggctggagaagatactcagaaacaaagccaaaattaagttcatcattaaaaagcccgaaatgtttgagacggcgattaaggagagcacctcctctaagagccctcccagaaaaataaattcatcacccaatgttaatactactgcatcaggtgttgaagaccttaacatcattcaggtgacaattccagatgatgataatgaaagactctcgaaagttgaaaaagctagacagctaagagaacaagtgaatgacctctttagtcggaaatttggtgaagctattggtatgggttttcctgtgaaagttccctacaggaaaatcacaattaaccctggctgtgtggtggttgatggcatgcccccgggggtgtccttcaaagcccccagctacctggaaatcagctccatgagaaggatcttagactctgccgagtttatcaaattcacggtcattaggtaagtgagagtttcctgcttagtcacaggagcgaatctggagctcatgaggctgactcttctaaaatgcagccacaggtagtcatcgaatccggcttcctatgctgtgcaatcaacaaatcaaaataacttgtgtcatcattagaatgtcagatgtgcttctacgaactaagctgactcttttaattctttggcaaagggttggcaaactaggactgtttgccaaattcaggctgcctcctatttttagagtcttcctgaaacacagctacacccgtattatccatggctgctttcctgtcacagtgagtaagtagctgggactgagaaggcatggcctccaaagtctaaaatatttactctctagcactttgtagaaaaaccttagctaggcacagtggctaacgcctgtaatcccagcattttgggaggccaaggcaggcagatcacctgaggtcaggagttccagaccagcctggccaacatggtgaaatcccatctctacaaaaataaaacagttagctgggcatgatggcgggtgcctgtaatcccagctactcgggaggctgaggcaggatagtcgcttgaacccaggaggtggaggttgcaatgagccaagatcatgccactgcactccagcctggacgacagagtgagactccatcacaagaaaaaaagaactttgtcaacctctgtcttagggcgccttgtcacaggcttcgggtcagacggattcaaccttgcatcagccatttgttagccaggtcactctgttctttgtctgtaaatgagattgatcgttgttcccactgagagtgtcagctccttcccgtagagcaggcatgatgattgtactcacctctgacaccattgtgagtgccacattccttcccacgtccttgtcactgtaagagatgcccacctgagcaccaaccccaggttatcttcccctttgtcttccagccccccagaaacagctacgactcaacctacccaatcatttcatcatcagattgccactgtctctagttcaggtctcttgggactggcactcagaaatctcataataaatcctcttgaggcttctcatacactcgtcttcttccaatcttctttccctcaaaatctcatattttggttccacttcacccaccgtcattctccatatcactcccaggagttaggcaaaaagccccttccgttcttccgtatgttaaacttagaatcactctgttccctgctctgcgtttctattttttgtttttcctccatttactagtagcttaacactttctaacagtgttcttattattgatacgtatctatctcttccataagcttataaggtcacggataatacttctcattgtagtacgtaaatgacgtgggctagatatgagttgaataaacagttatacctgtaaattcttacagagtgaaaataaattgttatactttacaatttgtttctctctttagaccatttccaggacttgtgattaataaccgtgagtattttgtgaagtgttttgtttttgttttttcctggggtctgacgtgtgtgcgtgtgagtgtgtatacatgcttaacgtatatcacgttacttcacctatgtcagtaaccaggccaaatacttgttttagccctcagtaaaaacaccaggcacttcctagttgtaaaattattcaagcttcttaacttcctatcctcgatgcacttaatcataaaatggtaataatagcaccgattttgggggagtcgttccagtagatggaaagcatctggaacaggtgtcagcaagctcctgccgacgtgtatgcataaagttttattgaaaccaccatcgtgtccatttgtttatggcagaactgagagatggcagcagcaagtgtgtgcctgcaaaacctaaaatatttactaattggctctgcaagaaaagagtttgcatccccctaacctagaacagtgtctagcctctagtatgtgtttagcctacagtatgtgctcagcgaatacaatctatatttattactgcttttatgactgttataattactgtgcttggatttcgttacaaagtaagtcacaatgtgcctgcttctgttagtatttcagcacagtgcctggcacacatggggctctcaaatattgctgagcgagtgaacaaatgtcctttcaattccttaacgttgatgtcattttcaatagtattttgagccaaacttaattttgcgagtgtgttttgttttcttaactttattattaaaaatgtataaaagtgaggccaggcgtggtggctcacgcctgtaatcccagcagtttgggaggctgaggcaggcggatcagttgaggttgggagttggagaccagcccgtccaacatggtgaaagcctgtctctactaaaaatacaaaaatcagctgggtgtggtggcgcgtgcctgtaatcccagctactcaggaggctgaggcaggagagttgcttgaatcctagaggtggaggttgcagtgagctgagatcgtgccattgcactccagcctgggcaacaagagcaaaactctgtcccaataaataaataaataaaatgttctcttttgttcctgttcttgtgcggtagtgtggtatagagttttatggtaattactgtgaattagtgattctgagggacatatcagaactctgaggtttgtttccttctcatcttgagggaaacagcaaatgtatgttaaaatgcttttccaagggaacaacacatccttacattatttaaaccaatctgcttcattttcagagctggttgatcagagtgagtcagaaggccccgtgatacaagaatcagctgaaccaagccagttggaagttccagccacagaagaaataaaagagactgatggaagctctcagatcaagcaagaaccagaccccacgtggtagacctcttccctcctagggtaaatcagcttctgtgtcagggatgctgtgtggtgtccatctgaaccccctgcatacgcgtagctaatgtgatctccccactttcacataagatggtggccctgccttcagggaatgtgggagccaggtgggagccttcccggatatttaagctagaagattctacagggagattctccttggatcaatatatgtctctcagtcaaagatgtaaaagcacttttgccttaaaaagaatgttctgtttctaaatagagtcaacgttgtcctcctcattggaattcactatgagtcagaatcattagactgacttttttttttccatagtaatagtattttgcagagtctcacagagctgcagatcttttgttcatcttgcagagttaacaagtctgatcctgttagtccagatttcttaaatttggccaagttataataggagcagtagcttgagacccgaagtcaggaaactttgacaatggatttttttttttaatccagagacttgtactggaatttgccttaccctgtcagctcatggacttaaggtttcatcccgctttatgagtgcttctgaatccaagtcattgttacctgaatttgcaaattaagttgtgatattcgtgactgttaaattcctgtaattagattaacctctttgcttgcttgtttgttttctctcctattttagcttaaagtatcagtggttgagaagagcttttcggacctgttactaccccaagctgtgtaatatacttgtataacagaaataccttctatacaaacctttttttctacttttagatagaaatgtctactttttcagcagttctgtgaattaaagagcagagtgactgtgggtctggaatggctggtgtacttgggaatgtactatcaggattttacagcaatgctgggaaatgacagggaaaatgacaggaatgaatctcaccagattttttatgtactcagcagagccttgagttacggtgtttattttccaatcaagtgaagatatctcctacttctcctactggaacatctcagcttctgcagtgaagaaaaattcctgtgatagttcagttctttagtttttctatttgaaaaaaaaaaatcatttaaatgatcctttgttcacggctctccttaatgactgagtgaacagttcctatctgtatatttgactaaaccttttcctaagctatctctcatggttcctatgtttttttatcataattaaaagcaaaaccatctggatcacctaacagtcagaggtcagtatctcagcgtgtgaattatagaggaaatacagagagaacctcttccacttttacttttcgtccaaataaaatgcatggtgtaccagaagttgaagatcgggttgaggattggggctagctcgatgacactaaggccccaacatcgcgggacctgctgtggcgcggattcttaggaacgctgttctagccggccccctctccaggggtcgccgtggccggcattatttcctagttcttcttgtaaccctgaggtgccagcgcggggagtgaggaggggtcagggggctaaggatgcaacctctgacgttctgcgccttcctaggagagtcttacatgtgttgagatttcacaagcaatgcgagttgtaaaataccagctctacaagaagctaggctctgtgacggcatagttttcagtagctttatcacaatattcacaatggagaattatatgacatggtagcagaaataggcccttttatgtgttgcttctattttacctcaaattgtagatatagggtaatcaataaaatccatccatgcctttcacacactaagt

SEQ ID NO: 5005 - protein, 942 aa, Homo sapiens; identical to SEQ ID NO: 4619

SEQ ID NO: 5006 - DNA, 7056 bp, Homo sapiens
gggtcttgttctgtctcccaagctggagtgcagtggtgtggtcataggtcactgcagcgtcgaactcctaggctcaagtgatcctcttgcctcaggctcctgagtagctgggacaacaggcgtgtaccacacctggatactttttaaatttttggtagagaagggatctcactctattgccaagctggtgtcgaactcttggtcttaagcagccctcccacgtcagcatcccaaagtgttgggatttcagagggatcatggcccaagttgcaatgtccaccctccccgttgaagatgaggagtcctcggagagcaggatggtggtgacattcctcatgtcagctctcgagtccatgtgtaaagaactggccaagtccaaagccgaagtggcctgcattgcagtgtatgaaacagacgtgtttgtcgtcggaactgaaagaggacgtgcttttgtcaataccagaaaggattttcaaaaagattttgtaaaatattgtgttgaagaagaagaaaaagctgcagagatgcataaaatgaaatctacaacccaggcaaatcggatgagtgtagatgctgtagaaattgaaacactcagaaaaacagttgaggactatttctgcttttgctatgggaaagctttaggcaaatccacagtggtacctgtaccatatgagaagatgctgcgagaccagtcggctgtggtagtgcaggggcttccggaaggtgttgcctttaaacaccccgagaactatgatcttgcaaccctgaaatggattttggagaacaaagcagggatttcattcatcattaagagaccttttttagagccaaagaagcatgtaggtggtcgtgtgatggtaacagatgctgacaggtcaatactatctccaggtggaagttgtggccccatcaaagtgaaaactgaacccacagaagattctggcatttccctggaaatggcagctgtgacagtaaaggaagaatcagaagatcctgattattatcaatataacattcaaggaagccaccattcttcagagggcaatgaaggcacagaaatggaagtaccagcagaagatgatgattattctccaccgtctaagagaccaaaggccaatgagctaccgcagccaccagtcccggaacccgccaatgctgggaagcggaaagtgagggagttcaacttcgagaaatggaatgctcgcatcactgatctacgtaaacaagttgaagaattgtttgaaaggaaatatgctcaagccataaaagccaaaggtccggtgacgatcccgtaccctcttttccagtctcatgttgaagatctttatgtagaaggacttcctgaaggaattccttttagaaggccatctacttacggaattcctcgcctggagaggatattacttgcaaaggaaaggattcgttttgtgattaagaaacatgagcttctgaattcaacacgtgaagatttacagcttgataagccagcttcaggagtaaaggaagaatggtatgccagaatcactaaattaagaaagatggtggatcagcttttctgcaaaaaatttgcggaagccttggggagcactgaagccaaggctgtaccgtaccaaaaatttgaggcacacccgaatgatctgtacgtggaaggactgccagaaaacattcctttccgaagtccctcatggtatggaatcccaaggctggaaaaaatcattcaagtgggcaatcgaattaaatttgttattaaaagaccagaacttctgactcacagtaccactgaagttactcagccaagaacgaatacaccagtcaaagaagattggaatgtcagaattaccaagctacggaagcaagtggaagagatttttaatttgaaatttgctcaagctcttggactcaccgaggcagtaaaagtaccatatcctgtgtttgaatcaaacccggagttcttgtatgtggaaggcttgccagaggggattcccttccgaagccctacctggtttggaattccacgacttgaaaggatcgtccgcgggagtaataaaatcaagttcgttgttaaaaaacctgaactagttatttcctacttgcctcctgggatggctagtaaaataaacactaaagctttgcagtcccccaaaagaccacgaagtcctgggagtaattcaaaggttcctgaaattgaggtcaccgtggaaggccctaataacaacaatcctcaaacctcagctgttcgaaccccgacccagactaacggttctaacgttcccttcaagccacgagggagagagttttcctttgaggcctggaatgccaaaatcacggacctaaaacagaaagttgaaaatctcttcaatgagaaatgtggggaagctcttggccttaaacaagctgtgaaggtgccgttcgcgttatttgagtctttcccggaagacttttatgtggaaggcttacctgagggtgtgccattccgaagaccatcgacttttggcattccgaggctggagaagatactcagaaacaaagccaaaattaagttcatcattaaaaagcccgaaatgtttgagacggcgattaaggagagcacctcctctaagagccctcccagaaaaataaattcatcacccaatgttaatactactgcatcaggtgttgaagaccttaacatcattcaggtgacaattccagatgatgataatgaaagactctcgaaagttgaaaaagctagacagctaagagaacaagtgaatgacctctttagtcggaaatttggtgaagctattggtatgggttttcctgtgaaagttccctacaggaaaatcacaattaaccctggctgtgtggtggttgatggcatgcccccgggggtgtccttcaaagcccccagctacctggaaatcagctccatgagaaggatcttagactctgccgagtttatcaaattcacggtcattaggtaagtgagagtttcctgcttagtcacaggagcgaatctggagctcatgaggctgactcttctaaaatgcagccacaggtagtcatcgaatccggcttcctatgctgtgcaatcaacaaatcaaaataacttgtgtcatcattagaatgtcagatgtgcttctacgaactaagctgactcttttaattctttggcaaagggttggcaaactaggactgtttgccaaattcaggctgcctcctatttttagagtcttcctgaaacacagctacacccgtattatccatggctgctttcctgtcacagtgagtaagtagctgggactgagaaggcatggcctccaaagtctaaaatatttactctctagcactttgtagaaaaaccttagctaggcacagtggctaacgcctgtaatcccagcattttgggaggccaaggcaggcagatcacctgaggtcaggagttccagaccagcctggccaacatggtgaaatcccatctctacaaaaataaaacagttagctgggcatgatggcgggtgcctgtaatcccagctactcgggaggctgaggcaggatagtcgcttgaacccaggaggtggaggttgcaatgagccaagatcatgccactgcactccagcctggacgacagagtgagactccatcacaagaaaaaaagaactttgtcaacctctgtcttagggcgccttgtcacaggcttcgggtcagacggattcaaccttgcatcagccatttgttagccaggtcactctgttctttgtctgtaaatgagattgatcgttgttcccactgagagtgtcagctccttcccgtagagcaggcatgatgattgtactcacctctgacaccattgtgagtgccacattccttcccacgtccttgtcactgtaagagatgcccacctgagcaccaaccccaggttatcttcccctttgtcttccagccccccagaaacagctacgactcaacctacccaatcatttcatcatcagattgccactgtctctagttcaggtctcttgggactggcactcagaaatctcataataaatcctcttgaggcttctcatacactcgtcttcttccaatcttctttccctcaaaatctcatattttggttccacttcacccaccgtcattctccatatcactcccaggagttaggcaaaaagccccttccgttcttccgtatgttaaacttagaatcactctgttccctgctctgcgtttctattttttgtttttcctccatttactagtagcttaacactttctaacagtgttcttattattgatacgtatctatctcttccataagcttataaggtcacggataatacttctcattgtagtacgtaaatgacgtgggctagatatgagttgaataaacagttatacctgtaaattcttacagagtgaaaataaattgttatactttacaatttgtttctctctttagaccatttccaggacttgtgattaataaccgtgagtattttgtgaagtgttttgtttttgttttttcctggggtctgacgtgtgtgcgtgtgagtgtgtatacatgcttaacgtatatcacgttacttcacctatgtcagtaaccaggccaaatacttgttttagccctcagtaaaaacaccaggcacttcctagttgtaaaattattcaagcttcttaacttcctatcctcgatgcacttaatcataaaatggtaataatagcaccgattttgggggagtcgttccagtagatggaaagcatctggaacaggtgtcagcaagctcctgccgacgtgtatgcataaagttttattgaaaccaccatcgtgtccatttgtttatggcagaactgagagatggcagcagcaagtgtgtgcctgcaaaacctaaaatatttactaattggctctgcaagaaaagagtttgcatccccctaacctagaacagtgtctagcctctagtatgtgtttagcctacagtatgtgctcagcgaatacaatctatatttattactgcttttatgactgttataattactgtgcttggatttcgttacaaagtaagtcacaatgtgcctgcttctgttagtatttcagcacagtgcctggcacacatggggctctcaaatattgctgagcgagtgaacaaatgtcctttcaattccttaacgttgatgtcattttcaatagtattttgagccaaacttaattttgcgagtgtgttttgttttcttaactttattattaaaaatgtataaaagtgaggccaggcgtggtggctcacgcctgtaatcccagcagtttgggaggctgaggcaggcggatcagttgaggttgggagttggagaccagcccgtccaacatggtgaaagcctgtctctactaaaaatacaaaaatcagctgggtgtggtggcgcgtgcctgtaatcccagctactcaggaggctgaggcaggagagttgcttgaatcctagaggtggaggttgcagtgagctgagatcgtgccattgcactccagcctgggcaacaagagcaaaactctgtcccaataaataaataaataaaatgttctcttttgttcctgttcttgtgcggtagtgtggtatagagttttatggtaattactgtgaattagtgattctgagggacatatcagaactctgaggtttgtttccttctcatcttgagggaaacagcaaatgtatgttaaaatgcttttccaagggaacaacacatccttacattatttaaaccaatctgcttcattttcagagctggttgatcagagtgagtcagaaggccccgtgatacaagaatcagctgaaccaagccagttggaagttccagccacagaagaaataaaagagactgatggaagctctcagatcaagcaagaaccagaccccacgtggtagacctcttccctcctaggcttaaagtatcagtggttgagaagagcttttcggacctgttactaccccaagctgtgtaatatacttgtataacagaaataccttctatacaaacctttttttctacttttagatagaaatgtctactttttcagcagttctgtgaattaaagagcagagtgactgtgggtctggaatggctggtgtacttgggaatgtactatcaggattttacagcaatgctgggaaatgacagggaaaatgacaggaatgaatctcaccagattttttatgtactcagcagagccttgagttacggtgtttattttccaatcaagtgaagatatctcctacttctcctactggaacatctcagcttctgcagtgaagaaaaattcctgtgatagttcagttctttagtttttctatttgaaaaaaaaaaatcatttaaatgatcctttgttcacggctctccttaatgactgagtgaacagttcctatctgtatatttgactaaaccttttcctaagctatctctcatggttcctatgtttttttatcataattaaaagcaaaaccatctggatcacctaacagtcagaggtcagtatctcagcgtgtgaattatagaggaaatacagagagaacctcttccacttttacttttcgtccaaataaaatgcatggtgtaccagaagttgaagatcgggttgaggattggggctagctcgatgacactaaggccccaacatcgcgggacctgctgtggcgcggattcttaggaacgctgttctagccggccccctctccaggggtcgccgtggccggcattatttcctagttcttcttgtaaccctgaggtgccagcgcggggagtgaggaggggtcagggggctaaggatgcaacctctgacgttctgcgccttcctaggagagtcttacatgtgttgagatttcacaagcaatgcgagttgtaaaataccagctctacaagaagctaggctctgtgacggcatagttttcagtagctttatcacaatattcacaatggagaattatatgacatggtagcagaaataggcccttttatgtgttgcttctattttacctcaaattgtagatatagggtaatcaataaaatccatccatgcctttcacacactaagt

SEQ ID NO: 5007 - protein, 901 aa, Homo sapiens [sequence omitted]

SEQ ID NO: 5008 - DNA, 3915 bp, Homo sapiens
gggtcttgttctgtctcccaagctggagtgcagtggtgtggtcataggtcactgcagcgtcgaactcctaggctcaagtgatcctcttgcctcaggctcctgagtagctgggacaacaggcgtgtaccacacctggatactttttaaatttttggtagagaagggatctcactctattgccaagctggtgtcgaactcttggtcttaagcagccctcccacgtcagcatcccaaagtgttgggatttcagagggatcatggcccaagttgcaatgtccaccctccccgttgaagatgaggagtcctcggagagcaggatggtggtgacattcctcatgtcagctctcgagtccatgtgtaaagaactggccaagtccaaagccgaagtggcctgcattgcagtgtatgaaacagacgtgtttgtcgtcggaactgaaagaggacgtgcttttgtcaataccagaaaggattttcaaaaagattttgtaaaatattgtgttgaagaagaagaaaaagctgcagagatgcataaaatgaaatctacaacccaggcaaatcggatgagtgtagatgctgtagaaattgaaacactcagaaaaacagttgaggactatttctgcttttgctatgggaaagctttaggcaaatccacagtggtacctgtaccatatgagaagatgctgcgagaccagtcggctgtggtagtgcaggggcttccggaaggtgttgcctttaaacaccccgagaactatgatcttgcaaccctgaaatggattttggagaacaaagcagggatttcattcatcattaagagaccttttttagagccaaagaagcatgtaggtggtcgtgtgatggtaacagatgctgacaggtcaatactatctccaggtggaagttgtggccccatcaaagtgaaaactgaacccacagaagattctggcatttccctggaaatggcagctgtgacagtaaaggaagaatcagaagatcctgattattatcaatataacattcaagcaggcccttctgaaactgatgatgttgatgaaaaacagcccctatcgaagcctttgcaaggaagccaccattcttcagagggcaatgaaggcacagaaatggaagtaccagcagaagatgatgattattctccaccgtctaagagaccaaaggccaatgagctaccgcagccaccagtcccggaacccgccaatgctgggaagcggaaagtgagggagttcaacttcgagaaatggaatgctcgcatcactgatctacgtaaacaagttgaagaattgtttgaaaggaaatatgctcaagccataaaagccaaaggtccggtgacgatcccgtaccctcttttccagtctcatgttgaagatctttatgtagaaggacttcctgaaggaattccttttagaaggccatctacttacggaattcctcgcctggagaggatattacttgcaaaggaaaggattcgttttgtgattaagaaacatgagcttctgaattcaacacgtgaagatttacagcttgataagccagcttcaggagtaaaggaagaatggtatgccagaatcactaaattaagaaagatggtggatcagcttttctgcaaaaaatttgcggaagccttggggagcactgaagccaaggctgtaccgtaccaaaaatttgaggcacacccgaatgatctgtacgtggaaggactgccagaaaacattcctttccgaagtccctcatggtatggaatcccaaggctggaaaaaatcattcaagtgggcaatcgaattaaatttgttattaaaagaccagaacttctgactcacagtaccactgaagttactcagccaagaacgaatacaccagtcaaagaagattggaatgtcagaattaccaagctacggaagcaagtggaagagatttttaatttgaaatttgcttagatttgttgacagcggtttcctggagtgctgtcttgagaacgattctgaggaggctcagcaagaaagagtgtttcagttgattgggtgtgtctgtcatggagaaggaactcaagctcttggactcaccgaggcagtaaaagtaccatatcctgtgtttgaatcaaacccggagttcttgtatgtggaaggcttgccagaggggattcccttccgaagccctacctggtttggaattccacgacttgaaaggatcgtccgcgggagtaataaaatcaagttcgttgttaaaaaacctgaactagttatttcctacttgcctcctgggatggctagtaaaataaacactaaagctttgcagtcccccaaaagaccacgaagtcctgggagtaattcaaaggttcctgaaattgaggtcaccgtggaaggccctaataacaacaatcctcaaacctcagctgttcgaaccccgacccagactaacggttctaacgttcccttcaagccacgagggagagagttttcctttgaggcctggaatgccaaaatcacggacctaaaacagaaagttgaaaatctcttcaatgagaaatgtggggaagctcttggccttaaacaagctgtgaaggtgccgttcgcgttatttgagtctttcccggaagacttttatgtggaaggcttacctgagggtgtgccattccgaagaccatcgacttttggcattccgaggctggagaagatactcagaaacaaagccaaaattaagttcatcattaaaaagcccgaaatgtttgagacggcgattaaggagagcacctcctctaagagccctcccagaaaaataaattcatcacccaatgttaatactactgcatcaggtgttgaagaccttaacatcattcaggtgacaattccagatgatgataatgaaagactctcgaaagttgaaaaagctagacagctaagagaacaagtgaatgacctctttagtcggaaatttggtgaagctattggtatgggttttcctgtgaaagttccctacaggaaaatcacaattaaccctggctgtgtggtggttgatggcatgcccccgggggtgtccttcaaagcccccagctacctggaaatcagctccatgagaaggatcttagactctgccgagtttatcaaattcacggtcattagaccatttccaggacttgtgattaataaccagctggttgatcagagtgagtcagaaggccccgtgatacaagaatcagctgaaccaagccagttggaagttccagccacagaagaaataaaagagactgatggaagctctcagatcaagcaagaaccagaccccacgtggtagacctcttccctcctaggcaaaaccatctggatcacctaacagtcagaggtcagtatctcagcgtgtgaattatagaggaaatacagagagaacctcttccacttttacttttcgtccaaataaaatgcatggtgtaccagaagttgaagatcgggttgaggattggggctagctcgatgacactaaggccccaacatcgcgggacctgctgtggcgcggattcttaggaacgctgttctagccggccccctctccaggggtcgccgtggccggcattatttcctagttcttcttgtaaccctgaggtgccagcgcggggagtgaggaggggtcagggggctaaggatgcaacctctgacgttctgcgccttcctaggagagtcttacatgtgttgagatttcacaagcaatgcgagttgtaaaataccagctctacaagaagctaggctctgtgacggcatagttttcagtagctttatcacaatattcacaatggagaattatatgacatggtagcagaaataggcccttttatgtgttgcttctattttacctcaaattgtagatatagggtaatcaataaaatccatccatgcctttcacacactaagt

SEQ ID NO: 5009 - protein, 563 aa, Homo sapiens; identical to SEQ ID NO: 4097

SEQ ID NO: 5010 - DNA, 6984 bp, Homo sapiens
gggtcttgttctgtctcccaagctggagtgcagtggtgtggtcataggtcactgcagcgtcgaactcctaggctcaagtgatcctcttgcctcaggctcctgagtagctgggacaacaggcgtgtaccacacctggatactttttaaatttttggtagagaagggatctcactctattgccaagctggtgtcgaactcttggtcttaagcagccctcccacgtcagcatcccaaagtgttgggatttcagagggatcatggcccaagttgcaatgtccaccctccccgttgaagatgaggagtcctcggagagcaggatggtggtgacattcctcatgtcagctctcgagtccatgtgtaaagaactggccaagtccaaagccgaagtggcctgcattgcagtgtatgaaacagacgtgtttgtcgtcggaactgaaagaggacgtgcttttgtcaataccagaaaggattttcaaaaagattttgtaaaatattgtgttgaagaagaagaaaaagctgcagagatgcataaaatgaaatctacaacccaggcaaatcggatgagtgtagatgctgtagaaattgaaacactcagaaaaacagttgaggactatttctgcttttgctatgggaaagctttaggcaaatccacagtggtacctgtaccatatgagaagatgctgcgagaccagtcggctgtggtagtgcaggggcttccggaaggtgttgcctttaaacaccccgagaactatgatcttgcaaccctgaaatggattttggagaacaaagcagggatttcattcatcattaagagaccttttttagagccaaagaagcatgtaggtggtcgtgtgatggtaacagatgctgacaggtcaatactatctccaggtggaagttgtggccccatcaaagtgaaaactgaacccacagaagattctggcatttccctggaaatggcagctgtgacagtaaaggaagaatcagaagatcctgattattatcaatataacattcaaggaagccaccattcttcagagggcaatgaaggcacagaaatggaagtaccagcagaagatgatgattattctccaccgtctaagagaccaaaggccaatgagctaccgcagccaccagtcccggaacccgccaatgctgggaagcggaaagtgagggagttcaacttcgagaaatggaatgctcgcatcactgatctacgtaaacaagttgaagaattgtttgaaaggaaatatgctcaagccataaaagccaaaggtccggtgacgatcccgtaccctcttttccagtctcatgttgaagatctttatgtagaaggacttcctgaaggaattccttttagaaggccatctacttacggaattcctcgcctggagaggatattacttgcaaaggaaaggattcgttttgtgattaagaaacatgagcttctgaattcaacacgtgaagatttacagcttgataagccagcttcaggagtaaaggaagaatggtatgccagaatcactaaattaagaaagatggtggatcagcttttctgcaaaaaatttgcggaagccttggggagcactgaagccaaggctgtaccgtaccaaaaatttgaggcacacccgaatgatctgtacgtggaaggactgccagaaaacattcctttccgaagtccctcatggtatggaatcccaaggctggaaaaaatcattcaagtgggcaatcgaattaaatttgttattaaaagaccagaacttctgactcacagtaccactgaagttactcagccaagaacgaatacaccagctcaagctcttggactcaccgaggcagtaaaagtaccatatcctgtgtttgaatcaaacccggagttcttgtatgtggaaggcttgccagaggggattcccttccgaagccctacctggtttggaattccacgacttgaaaggatcgtccgcgggagtaataaaatcaagttcgttgttaaaaaacctgaactagttatttcctacttgcctcctgggatggctagtaaaataaacactaaagctttgcagtcccccaaaagaccacgaagtcctgggagtaattcaaaggttcctgaaattgaggtcaccgtggaaggccctaataacaacaatcctcaaacctcagctgttcgaaccccgacccagactaacggttctaacgttcccttcaagccacgagggagagagttttcctttgaggcctggaatgccaaaatcacggacctaaaacagaaagttgaaaatctcttcaatgagaaatgtggggaagctcttggccttaaacaagctgtgaaggtgccgttcgcgttatttgagtctttcccggaagacttttatgtggaaggcttacctgagggtgtgccattccgaagaccatcgacttttggcattccgaggctggagaagatactcagaaacaaagccaaaattaagttcatcattaaaaagcccgaaatgtttgagacggcgattaaggagagcacctcctctaagagccctcccagaaaaataaattcatcacccaatgttaatactactgcatcaggtgttgaagaccttaacatcattcaggtgacaattccagatgatgataatgaaagactctcgaaagttgaaaaagctagacagctaagagaacaagtgaatgacctctttagtcggaaatttggtgaagctattggtatgggttttcctgtgaaagttccctacaggaaaatcacaattaaccctggctgtgtggtggttgatggcatgcccccgggggtgtccttcaaagcccccagctacctggaaatcagctccatgagaaggatcttagactctgccgagtttatcaaattcacggtcattaggtaagtgagagtttcctgcttagtcacaggagcgaatctggagctcatgaggctgactcttctaaaatgcagccacaggtagtcatcgaatccggcttcctatgctgtgcaatcaacaaatcaaaataacttgtgtcatcattagaatgtcagatgtgcttctacgaactaagctgactcttttaattctttggcaaagggttggcaaactaggactgtttgccaaattcaggctgcctcctatttttagagtcttcctgaaacacagctacacccgtattatccatggctgctttcctgtcacagtgagtaagtagctgggactgagaaggcatggcctccaaagtctaaaatatttactctctagcactttgtagaaaaaccttagctaggcacagtggctaacgcctgtaatcccagcattttgggaggccaaggcaggcagatcacctgaggtcaggagttccagaccagcctggccaacatggtgaaatcccatctctacaaaaataaaacagttagctgggcatgatggcgggtgcctgtaatcccagctactcgggaggctgaggcaggatagtcgcttgaacccaggaggtggaggttgcaatgagccaagatcatgccactgcactccagcctggacgacagagtgagactccatcacaagaaaaaaagaactttgtcaacctctgtcttagggcgccttgtcacaggcttcgggtcagacggattcaaccttgcatcagccatttgttagccaggtcactctgttctttgtctgtaaatgagattgatcgttgttcccactgagagtgtcagctccttcccgtagagcaggcatgatgattgtactcacctctgacaccattgtgagtgccacattccttcccacgtccttgtcactgtaagagatgcccacctgagcaccaaccccaggttatcttcccctttgtcttccagccccccagaaacagctacgactcaacctacccaatcatttcatcatcagattgccactgtctctagttcaggtctcttgggactggcactcagaaatctcataataaatcctcttgaggcttctcatacactcgtcttcttccaatcttctttccctcaaaatctcatattttggttccacttcacccaccgtcattctccatatcactcccaggagttaggcaaaaagccccttccgttcttccgtatgttaaacttagaatcactctgttccctgctctgcgtttctattttttgtttttcctccatttactagtagcttaacactttctaacagtgttcttattattgatacgtatctatctcttccataagcttataaggtcacggataatacttctcattgtagtacgtaaatgacgtgggctagatatgagttgaataaacagttatacctgtaaattcttacagagtgaaaataaattgttatactttacaatttgtttctctctttagaccatttccaggacttgtgattaataaccgtgagtattttgtgaagtgttttgtttttgttttttcctggggtctgacgtgtgtgcgtgtgagtgtgtatacatgcttaacgtatatcacgttacttcacctatgtcagtaaccaggccaaatacttgttttagccctcagtaaaaacaccaggcacttcctagttgtaaaattattcaagcttcttaacttcctatcctcgatgcacttaatcataaaatggtaataatagcaccgattttgggggagtcgttccagtagatggaaagcatctggaacaggtgtcagcaagctcctgccgacgtgtatgcataaagttttattgaaaccaccatcgtgtccatttgtttatggcagaactgagagatggcagcagcaagtgtgtgcctgcaaaacctaaaatatttactaattggctctgcaagaaaagagtttgcatccccctaacctagaacagtgtctagcctctagtatgtgtttagcctacagtatgtgctcagcgaatacaatctatatttattactgcttttatgactgttataattactgtgcttggatttcgttacaaagtaagtcacaatgtgcctgcttctgttagtatttcagcacagtgcctggcacacatggggctctcaaatattgctgagcgagtgaacaaatgtcctttcaattccttaacgttgatgtcattttcaatagtattttgagccaaacttaattttgcgagtgtgttttgttttcttaactttattattaaaaatgtataaaagtgaggccaggcgtggtggctcacgcctgtaatcccagcagtttgggaggctgaggcaggcggatcagttgaggttgggagttggagaccagcccgtccaacatggtgaaagcctgtctctactaaaaatacaaaaatcagctgggtgtggtggcgcgtgcctgtaatcccagctactcaggaggctgaggcaggagagttgcttgaatcctagaggtggaggttgcagtgagctgagatcgtgccattgcactccagcctgggcaacaagagcaaaactctgtcccaataaataaataaataaaatgttctcttttgttcctgttcttgtgcggtagtgtggtatagagttttatggtaattactgtgaattagtgattctgagggacatatcagaactctgaggtttgtttccttctcatcttgagggaaacagcaaatgtatgttaaaatgcttttccaagggaacaacacatccttacattatttaaaccaatctgcttcattttcagagctggttgatcagagtgagtcagaaggccccgtgatacaagaatcagctgaaccaagccagttggaagttccagccacagaagaaataaaagagactgatggaagctctcagatcaagcaagaaccagaccccacgtggtagacctcttccctcctaggcttaaagtatcagtggttgagaagagcttttcggacctgttactaccccaagctgtgtaatatacttgtataacagaaataccttctatacaaacctttttttctacttttagatagaaatgtctactttttcagcagttctgtgaattaaagagcagagtgactgtgggtctggaatggctggtgtacttgggaatgtactatcaggattttacagcaatgctgggaaatgacagggaaaatgacaggaatgaatctcaccagattttttatgtactcagcagagccttgagttacggtgtttattttccaatcaagtgaagatatctcctacttctcctactggaacatctcagcttctgcagtgaagaaaaattcctgtgatagttcagttctttagtttttctatttgaaaaaaaaaaatcatttaaatgatcctttgttcacggctctccttaatgactgagtgaacagttcctatctgtatatttgactaaaccttttcctaagctatctctcatggttcctatgtttttttatcataattaaaagcaaaaccatctggatcacctaacagtcagaggtcagtatctcagcgtgtgaattatagaggaaatacagagagaacctcttccacttttacttttcgtccaaataaaatgcatggtgtaccagaagttgaagatcgggttgaggattggggctagctcgatgacactaaggccccaacatcgcgggacctgctgtggcgcggattcttaggaacgctgttctagccggccccctctccaggggtcgccgtggccggcattatttcctagttcttcttgtaaccctgaggtgccagcgcggggagtgaggaggggtcagggggctaaggatgcaacctctgacgttctgcgccttcctaggagagtcttacatgtgttgagatttcacaagcaatgcgagttgtaaaataccagctctacaagaagctaggctctgtgacggcatagttttcagtagctttatcacaatattcacaatggagaattatatgacatggtagcagaaataggcccttttatgtgttgcttctattttacctcaaattgtagatatagggtaatcaataaaatccatccatgcctttcacacactaagt

SEQ ID NO: 5011 - protein, 877 aa, Homo sapiens; identical to SEQ ID NO: 4525

SEQ ID NO: 5012 - DNA, 3743 bp, Homo sapiens
gggtcttgttctgtctcccaagctggagtgcagtggtgtggtcataggtcactgcagcgtcgaactcctaggctcaagtgatcctcttgcctcaggctcctgagtagctgggacaacaggcgtgtaccacacctggatactttttaaatttttggtagagaagggatctcactctattgccaagctggtgtcgaactcttggtcttaagcagccctcccacgtcagcatcccaaagtgttgggatttcagagggatcatggcccaagttgcaatgtccaccctccccgttgaagatgaggagtcctcggagagcaggatggtggtgacattcctcatgtcagctctcgagtccatgtgtaaagaactggccaagtccaaagccgaagtggcctgcattgcagtgtatgaaacagacgtgtttgtcgtcggaactgaaagaggacgtgcttttgtcaataccagaaaggattttcaaaaagattttgtaaaatattgtgttgaagaagaagaaaaagctgcagagatgcataaaatgaaatctacaacccaggcaaatcggatgagtgtagatgctgtagaaattgaaacactcagaaaaacagttgaggactatttctgcttttgctatgggaaagctttaggcaaatccacagtggtacctgtaccatatgagaagatgctgcgagaccagtcggctgtggtagtgcaggggcttccggaaggtgttgcctttaaacaccccgagaactatgatcttgcaaccctgaaatggattttggagaacaaagcagggatttcattcatcattaagagaccttttttagagccaaagaagcatgtaggtggtcgtgtgatggtaacagatgctgacaggtcaatactatctccaggtggaagttgtggccccatcaaagtgaaaactgaacccacagaagattctggcatttccctggaaatggcagctgtgacagtaaaggaagaatcagaagatcctgattattatcaatataacattcaaggaagccaccattcttcagagggcaatgaaggcacagaaatggaagtaccagcagaagatgatgattattctccaccgtctaagagaccaaaggccaatgagctaccgcagccaccagtcccggaacccgccaatgctgggaagcggaaagtgagggagttcaacttcgagaaatggaatgctcgcatcactgatctacgtaaacaagttgaagaattgtttgaaaggaaatatgctcaagccataaaagccaaaggtccggtgacgatcccgtaccctcttttccagtctcatgttgaagatctttatgtagaaggacttcctgaaggaattccttttagaaggccatctacttacggaattcctcgcctggagaggatattacttgcaaaggaaaggattcgttttgtgattaagaaacatgagcttctgaattcaacacgtgaagatttacagcttgataagccagcttcaggagtaaaggaagaatggtatgccagaatcactaaattaagaaagatggtggatcagcttttctgcaaaaaatttgcggaagccttggggagcactgaagccaaggctgtaccgtaccaaaaatttgaggcacacccgaatgatctgtacgtggaaggactgccagaaaacattcctttccgaagtccctcatggtatggaatcccaaggctggaaaaaatcattcaagtgggcaatcgaattaaatttgttattaaaagaccagaacttctgactcacagtaccactgaagttactcagccaagaacgaatacaccagtcaaagaagattggaatgtcagaattaccaagctacggaagcaagtggaagagatttttaatttgaaatttgctcaagctcttggactcaccgaggcagtaaaagtaccatatcctgtgtttgaatcaaacccggagttcttgtatgtggaaggcttgccagaggggattcccttccgaagccctacctggtttggaattccacgacttgaaaggatcgtccgcgggagtaataaaatcaagttcgttgttaaaaaacctgaactagttatttcctacttgcctcctgggatggctagtaaaataaacactaaagctttgcagtcccccaaaagaccacgaagtcctgggagtaattcaaaggttcctgaaattgaggtcaccgtggaaggccctaataacaacaatcctcaaacctcagctgttcgaaccccgacccagactaacggttctaacgttcccttcaagccacgagggagagagttttcctttgaggcctggaatgccaaaatcacggacctaaaacagaaagttgaaaatctcttcaatgagaaatgtggggaagctcttggccttaaacaagctgtgaaggtgccgttcgcgttatttgagtctttcccggaagacttttatgtggaaggcttacctgagggtgtgccattccgaagaccatcgacttttggcattccgaggctggagaagatactcagaaacaaagccaaaattaagttcatcattaaaaagcccgaaatgtttgagacggcgattaaggagagcacctcctctaagagccctcccagaaaaataaattcatcacccaatgttaatactactgcatcaggtgttgaagaccttaacatcattcaggtgacaattccagatgatgataatgaaagactctcgaaagttgaaaaagctagacagctaagagaacaagtgaatgacctctttagtcggaaatttggtgaagctattggtatgggttttcctgtgaaagttccctacaggaaaatcacaattaaccctggctgtgtggtggttgatggcatgcccccgggggtgtccttcaaagcccccagctacctggaaatcagctccatgagaaggatcttagactctgccgagtttatcaaattcacggtcattagaccatttccaggacttgtgattaataaccagctggttgatcagagtgagtcagaaggccccgtgatacaagaatcagctgaaccaagccagttggaagttccagccacagaagaaataaaagagactgatggaagctctcagatcaagcaagaaccagaccccacgtggtagacctcttccctcctaggcaaaaccatctggatcacctaacagtcagaggtcagtatctcagcgtgtgaattatagaggaaatacagagagaacctcttccacttttacttttcgtccaaataaaatgcatggtgtaccagaagttgaagatcgggttgaggattggggctagctcgatgacactaaggccccaacatcgcgggacctgctgtggcgcggattcttaggaacgctgttctagccggccccctctccaggggtcgccgtggccggcattatttcctagttcttcttgtaaccctgaggtgccagcgcggggagtgaggaggggtcagggggctaaggatgcaacctctgacgttctgcgccttcctaggagagtcttacatgtgttgagatttcacaagcaatgcgagttgtaaaataccagctctacaagaagctaggctctgtgacggcatagttttcagtagctttatcacaatattcacaatggagaattatatgacatggtagcagaaataggcccttttatgtgttgcttctattttacctcaaattgtagatatagggtaatcaataaaatccatccatgcctttcacacactaagt

SEQ ID NO: 5013 - protein, 957 aa, Homo sapiens; identical to SEQ ID NO: 4303

SEQ ID NO: 5014 - DNA, 7808 bp, Homo sapiens
gggtcttgttctgtctcccaagctggagtgcagtggtgtggtcataggtcactgcagcgtcgaactcctaggctcaagtgatcctcttgcctcaggctcctgagtagctgggacaacaggcgtgtaccacacctggatactttttaaatttttggtagagaagggatctcactctattgccaagctggtgtcgaactcttggtcttaagcagccctcccacgtcagcatcccaaagtgttgggatttcagagggatcatggcccaagttgcaatgtccaccctccccgttgaagatgaggagtcctcggagagcaggatggtggtgacattcctcatgtcagctctcgagtccatgtgtaaagaactggccaagtccaaagccgaagtggcctgcattgcagtgtatgaaacagacgtgtttgtcgtcggaactgaaagaggacgtgcttttgtcaataccagaaaggattttcaaaaagattttgtaaaatattgtgttgaagaagaagaaaaagctgcagagatgcataaaatgaaatctacaacccaggcaaatcggatgagtgtagatgctgtagaaattgaaacactcagaaaaacagttgaggactatttctgcttttgctatgggaaagctttaggcaaatccacagtggtacctgtaccatatgagaagatgctgcgagaccagtcggctgtggtagtgcaggggcttccggaaggtgttgcctttaaacaccccgagaactatgatcttgcaaccctgaaatggattttggagaacaaagcagggatttcattcatcattaagagaccttttttagagccaaagaagcatgtaggtggtcgtgtgatggtaacagatgctgacaggtcaatactatctccaggtggaagttgtggccccatcaaagtgaaaactgaacccacagaagattctggcatttccctggaaatggcagctgtgacagtaaaggaagaatcagaagatcctgattattatcaatataacattcaagcaggcccttctgaaactgatgatgttgatgaaaaacagcccctatcgaagcctttgcaaggaagccaccattcttcagagggcaatgaaggcacagaaatggaagtaccagcagaagatgatgattattctccaccgtctaagagaccaaaggccaatgagctaccgcagccaccagtcccggaacccgccaatgctgggaagcggaaagtgagggagttcaacttcgagaaatggaatgctcgcatcactgatctacgtaaacaagttgaagaattgtttgaaaggaaatatgctcaagccataaaagccaaaggtccggtgacgatcccgtaccctcttttccagtctcatgttgaagatctttatgtagaaggacttcctgaaggaattccttttagaaggccatctacttacggaattcctcgcctggagaggatattacttgcaaaggaaaggattcgttttgtgattaagaaacatgagcttctgaattcaacacgtgaagatttacagcttgataagccagcttcaggagtaaaggaagaatggtatgccagaatcactaaattaagaaagatggtggatcagcttttctgcaaaaaatttgcggaagccttggggagcactgaagccaaggctgtaccgtaccaaaaatttgaggcacacccgaatgatctgtacgtggaaggactgccagaaaacattcctttccgaagtccctcatggtatggaatcccaaggctggaaaaaatcattcaagtgggcaatcgaattaaatttgttattaaaagaccagaacttctgactcacagtaccactgaagttactcagccaagaacgaatacaccagtcaaagaagattggaatgtcagaattaccaagctacggaagcaagtggaagagatttttaatttgaaatttgctcaagctcttggactcaccgaggcagtaaaagtaccatatcctgtgtttgaatcaaacccggagttcttgtatgtggaaggcttgccagaggggattcccttccgaagccctacctggtttggaattccacgacttgaaaggatcgtccgcgggagtaataaaatcaagttcgttgttaaaaaacctgaactagttatttcctacttgcctcctgggatggctagtaaaataaacactaaagctttgcagtcccccaaaagaccacgaagtcctgggagtaattcaaaggttcctgaaattgaggtcaccgtggaaggccctaataacaacaatcctcaaacctcagctgttcgaaccccgacccagactaacggttctaacgttcccttcaagccacgagggagagagttttcctttgaggcctggaatgccaaaatcacggacctaaaacagaaagttgaaaatctcttcaatgagaaatgtggggaagctcttggccttaaacaagctgtgaaggtgccgttcgcgttatttgagtctttcccggaagacttttatgtggaaggcttacctgagggtgtgccattccgaagaccatcgacttttggcattccgaggctggagaagatactcagaaacaaagccaaaattaagttcatcattaaaaagcccgaaatgtttgagacggcgattaaggagagcacctcctctaagagccctcccagaaaaataaattcatcacccaatgttaatactactgcatcaggtgttgaagaccttaacatcattcaggtgacaattccagatgatgataatgaaagactctcgaaagttgaaaaagctagacagctaagagaacaagtgaatgacctctttagtcggaaatttggtgaagctattggtatgggttttcctgtgaaagttccctacaggaaaatcacaattaaccctggctgtgtggtggttgatggcatgcccccgggggtgtccttcaaagcccccagctacctggaaatcagctccatgagaaggatcttagactctgccgagtttatcaaattcacggtcattaggtaagtgagagtttcctgcttagtcacaggagcgaatctggagctcatgaggctgactcttctaaaatgcagccacaggtagtcatcgaatccggcttcctatgctgtgcaatcaacaaatcaaaataacttgtgtcatcattagaatgtcagatgtgcttctacgaactaagctgactcttttaattctttggcaaagggttggcaaactaggactgtttgccaaattcaggctgcctcctatttttagagtcttcctgaaacacagctacacccgtattatccatggctgctttcctgtcacagtgagtaagtagctgggactgagaaggcatggcctccaaagtctaaaatatttactctctagcactttgtagaaaaaccttagctaggcacagtggctaacgcctgtaatcccagcattttgggaggccaaggcaggcagatcacctgaggtcaggagttccagaccagcctggccaacatggtgaaatcccatctctacaaaaataaaacagttagctgggcatgatggcgggtgcctgtaatcccagctactcgggaggctgaggcaggatagtcgcttgaacccaggaggtggaggttgcaatgagccaagatcatgccactgcactccagcctggacgacagagtgagactccatcacaagaaaaaaagaactttgtcaacctctgtcttagggcgccttgtcacaggcttcgggtcagacggattcaaccttgcatcagccatttgttagccaggtcactctgttctttgtctgtaaatgagattgatcgttgttcccactgagagtgtcagctccttcccgtagagcaggcatgatgattgtactcacctctgacaccattgtgagtgccacattccttcccacgtccttgtcactgtaagagatgcccacctgagcaccaaccccaggttatcttcccctttgtcttccagccccccagaaacagctacgactcaacctacccaatcatttcatcatcagattgccactgtctctagttcaggtctcttgggactggcactcagaaatctcataataaatcctcttgaggcttctcatacactcgtcttcttccaatcttctttccctcaaaatctcatattttggttccacttcacccaccgtcattctccatatcactcccaggagttaggcaaaaagccccttccgttcttccgtatgttaaacttagaatcactctgttccctgctctgcgtttctattttttgtttttcctccatttactagtagcttaacactttctaacagtgttcttattattgatacgtatctatctcttccataagcttataaggtcacggataatacttctcattgtagtacgtaaatgacgtgggctagatatgagttgaataaacagttatacctgtaaattcttacagagtgaaaataaattgttatactttacaatttgtttctctctttagaccatttccaggacttgtgattaataaccgtgagtattttgtgaagtgttttgtttttgttttttcctggggtctgacgtgtgtgcgtgtgagtgtgtatacatgcttaacgtatatcacgttacttcacctatgtcagtaaccaggccaaatacttgttttagccctcagtaaaaacaccaggcacttcctagttgtaaaattattcaagcttcttaacttcctatcctcgatgcacttaatcataaaatggtaataatagcaccgattttgggggagtcgttccagtagatggaaagcatctggaacaggtgtcagcaagctcctgccgacgtgtatgcataaagttttattgaaaccaccatcgtgtccatttgtttatggcagaactgagagatggcagcagcaagtgtgtgcctgcaaaacctaaaatatttactaattggctctgcaagaaaagagtttgcatccccctaacctagaacagtgtctagcctctagtatgtgtttagcctacagtatgtgctcagcgaatacaatctatatttattactgcttttatgactgttataattactgtgcttggatttcgttacaaagtaagtcacaatgtgcctgcttctgttagtatttcagcacagtgcctggcacacatggggctctcaaatattgctgagcgagtgaacaaatgtcctttcaattccttaacgttgatgtcattttcaatagtattttgagccaaacttaattttgcgagtgtgttttgttttcttaactttattattaaaaatgtataaaagtgaggccaggcgtggtggctcacgcctgtaatcccagcagtttgggaggctgaggcaggcggatcagttgaggttgggagttggagaccagcccgtccaacatggtgaaagcctgtctctactaaaaatacaaaaatcagctgggtgtggtggcgcgtgcctgtaatcccagctactcaggaggctgaggcaggagagttgcttgaatcctagaggtggaggttgcagtgagctgagatcgtgccattgcactccagcctgggcaacaagagcaaaactctgtcccaataaataaataaataaaatgttctcttttgttcctgttcttgtgcggtagtgtggtatagagttttatggtaattactgtgaattagtgattctgagggacatatcagaactctgaggtttgtttccttctcatcttgagggaaacagcaaatgtatgttaaaatgcttttccaagggaacaacacatccttacattatttaaaccaatctgcttcattttcagagctggttgatcagagtgagtcagaaggccccgtgatacaagaatcagctgaaccaagccagttggaagttccagccacagaagaaataaaagagactgatggaagctctcagatcaagcaagaaccagaccccacgtggtagacctcttccctcctagggtaaatcagcttctgtgtcagggatgctgtgtggtgtccatctgaaccccctgcatacgcgtagctaatgtgatctccccactttcacataagatggtggccctgccttcagggaatgtgggagccaggtgggagccttcccggatatttaagctagaagattctacagggagattctccttggatcaatatatgtctctcagtcaaagatgtaaaagcacttttgccttaaaaagaatgttctgtttctaaatagagtcaacgttgtcctcctcattggaattcactatgagtcagaatcattagactgacttttttttttccatagtaatagtattttgcagagtctcacagagctgcagatcttttgttcatcttgcagagttaacaagtctgatcctgttagtccagatttcttaaatttggccaagttataataggagcagtagcttgagacccgaagtcaggaaactttgacaatggatttttttttttaatccagagacttgtactggaatttgccttaccctgtcagctcatggacttaaggtttcatcccgctttatgagtgcttctgaatccaagtcattgttacctgaatttgcaaattaagttgtgatattcgtgactgttaaattcctgtaattagattaacctctttgcttgcttgtttgttttctctcctattttagcttaaagtatcagtggttgagaagagcttttcggacctgttactaccccaagctgtgtaatatacttgtataacagaaataccttctatacaaacctttttttctacttttagatagaaatgtctactttttcagcagttctgtgaattaaagagcagagtgactgtgggtctggaatggctggtgtacttgggaatgtactatcaggattttacagcaatgctgggaaatgacagggaaaatgacaggaatgaatctcaccagattttttatgtactcagcagagccttgagttacggtgtttattttccaatcaagtgaagatatctcctacttctcctactggaacatctcagcttctgcagtgaagaaaaattcctgtgatagttcagttctttagtttttctatttgaaaaaaaaaaatcatttaaatgatcctttgttcacggctctccttaatgactgagtgaacagttcctatctgtatatttgactaaaccttttcctaagctatctctcatggttcctatgtttttttatcataattaaaagcaaaaccatctggatcacctaacagtcagaggtcagtatctcagcgtgtgaattatagaggaaatacagagagaacctcttccacttttacttttcgtccaaataaaatgcatggtgtaccagaagttgaagatcgggttgaggattggggctagctcgatgacactaaggccccaacatcgcgggacctgctgtggcgcggattcttaggaacgctgttctagccggccccctctccaggggtcgccgtggccggcattatttcctagttcttcttgtaaccctgaggtgccagcgcggggagtgaggaggggtcagggggctaaggatgcaacctctgacgttctgcgccttcctaggagagtcttacatgtgttgagatttcacaagcaatgcgagttgtaaaataccagctctacaagaagctaggctctgtgacggcatagttttcagtagctttatcacaatattcacaatggagaattatatgacatggtagcagaaataggcccttttatgtgttgcttctattttacctcaaattgtagatatagggtaatcaataaaatccatccatgcctttcacacactaagt

SEQ ID NO: 5015 - protein, 921 aa, Homo sapiens; identical to SEQ ID NO: 4723

SEQ ID NO: 5016 - DNA, 4921 bp, Homo sapiens
gggtcttgttctgtctcccaagctggagtgcagtggtgtggtcataggtcactgcagcgtcgaactcctaggctcaagtgatcctcttgcctcaggctcctgagtagctgggacaacaggcgtgtaccacacctggatactttttaaatttttggtagagaagggatctcactctattgccaagctggtgtcgaactcttggtcttaagcagccctcccacgtcagcatcccaaagtgttgggatttcagagggatcatggcccaagttgcaatgtccaccctccccgttgaagatgaggagtcctcggagagcaggatggtggtgacattcctcatgtcagctctcgagtccatgtgtaaagaactggccaagtccaaagccgaagtggcctgcattgcagtgtatgaaacagacgtgtttgtcgtcggaactgaaagaggacgtgcttttgtcaataccagaaaggattttcaaaaagattttgtaaaatattgtgttgaagaagaagaaaaagctgcagagatgcataaaatgaaatctacaacccaggcaaatcggatgagtgtagatgctgtagaaattgaaacactcagaaaaacagttgaggactatttctgcttttgctatgggaaagctttaggcaaatccacagtggtacctgtaccatatgagaagatgctgcgagaccagtcggctgtggtagtgcaggggcttccggaaggtgttgcctttaaacaccccgagaactatgatcttgcaaccctgaaatggattttggagaacaaagcagggatttcattcatcattaagagaccttttttagagccaaagaagcatgtaggtggtcgtgtgatggtaacagatgctgacaggtcaatactatctccaggtggaagttgtggccccatcaaagtgaaaactgaacccacagaagattctggaagccaccattcttcagagggcaatgaaggcacagaaatggaagtaccagcagaagattctactcaacatgtcccttcagaaacaagtgaggaccctgaagttgaggtgactattgaagatgatgattattctccaccgtctaagagaccaaaggccaatgagctaccgcagccaccagtcccggaacccgccaatgctgggaagcggaaagtgagggagttcaacttcgagaaatggaatgctcgcatcactgatctacgtaaacaagttgaagaattgtttgaaaggaaatatgctcaagccataaaagccaaaggtccggtgacgatcccgtaccctcttttccagtctcatgttgaagatctttatgtagaaggacttcctgaaggaattccttttagaaggccatctacttacggaattcctcgcctggagaggatattacttgcaaaggaaaggattcgttttgtgattaagaaacatgagcttctgaattcaacacgtgaagatttacagcttgataagccagcttcaggagtaaaggaagaatggtatgccagaatcactaaattaagaaagatggtggatcagcttttctgcaaaaaatttgcggaagccttggggagcactgaagccaaggctgtaccgtaccaaaaatttgaggcacacccgaatgatctgtacgtggaaggactgccagaaaacattcctttccgaagtccctcatggtatggaatcccaaggctggaaaaaatcattcaagtgggcaatcgaattaaatttgttattaaaagaccagaacttctgactcacagtaccactgaagttactcagccaagaacgaatacaccagtcaaagaagattggaatgtcagaattaccaagctacggaagcaagtggaagagatttttaatttgaaatttgctcaagctcttggactcaccgaggcagtaaaagtaccatatcctgtgtttgaatcaaacccggagttcttgtatgtggaaggcttgccagaggggattcccttccgaagccctacctggtttggaattccacgacttgaaaggatcgtccgcgggagtaataaaatcaagttcgttgttaaaaaacctgaactagttatttcctacttgcctcctgggatggctagtaaaataaacactaaagctttgcagtcccccaaaagaccacgaagtcctgggagtaattcaaaggttcctgaaattgaggtcaccgtggaaggccctaataacaacaatcctcaaacctcagctgttcgaaccccgacccagactaacggttctaacgttcccttcaagccacgagggagagagttttcctttgaggcctggaatgccaaaatcacggacctaaaacagaaagttgaaaatctcttcaatgagaaatgtggggaagctcttggccttaaacaagctgtgaaggtgccgttcgcgttatttgagtctttcccggaagacttttatgtggaaggcttacctgagggtgtgccattccgaagaccatcgacttttggcattccgaggctggagaagatactcagaaacaaagccaaaattaagttcatcattaaaaagcccgaaatgtttgagacggcgattaaggagagcacctcctctaagagccctcccagaaaaataaattcatcacccaatgttaatactactgcatcaggtgttgaagaccttaacatcattcaggtgacaattccagatgatgataatgaaagactctcgaaagttgaaaaagctagacagctaagagaacaagtgaatgacctctttagtcggaaatttggtgaagctattggtatgggttttcctgtgaaagttccctacaggaaaatcacaattaaccctggctgtgtggtggttgatggcatgcccccgggggtgtccttcaaagcccccagctacctggaaatcagctccatgagaaggatcttagactctgccgagtttatcaaattcacggtcattagaccatttccaggacttgtgattaataaccagctggttgatcagagtgagtcagaaggccccgtgatacaagaatcagctgaaccaagccagttggaagttccagccacagaaggtaaaaggacctcttccctcctagggtaaatcagcttctgtgtcagggatgctgtgtggtgtccatctgaaccccctgcatacgcgtagctaatgtgatctccccactttcacataagatggtggccctgccttcagggaatgtgggagccaggtgggagccttcccggatatttaagctagaagattctacagggagattctccttggatcaatatatgtctctcagtcaaagatgtaaaagcacttttgccttaaaaagaatgttctgtttctaaatagagtcaacgttgtcctcctcattggaattcactatgagtcagaatcattagactgacttttttttttccatagtaatagtattttgcagagtctcacagagctgcagatcttttgttcatcttgcagagttaacaagtctgatcctgttagtccagatttcttaaatttggccaagttataataggagcagtagcttgagacccgaagtcaggaaactttgacaatggatttttttttttaatccagagacttgtactggaatttgccttaccctgtcagctcatggacttaaggtttcatcccgctttatgagtgcttctgaatccaagtcattgttacctgaatttgcaaattaagttgtgatattcgtgactgttaaattcctgtaattagattaacctctttgcttgcttgtttgttttctctcctattttagcttaaagtatcagtggttgagaagagcttttcggacctgttactaccccaagctgtgtaatatacttgtataacagaaataccttctatacaaacctttttttctacttttagatagaaatgtctactttttcagcagttctgtgaattaaagagcagagtgactgtgggtctggaatggctggtgtacttgggaatgtactatcaggattttacagcaatgctgggaaatgacagggaaaatgacaggaatgaatctcaccagattttttatgtactcagcagagccttgagttacggtgtttattttccaatcaagtgaagatatctcctacttctcctactggaacatctcagcttctgcagtgaagaaaaattcctgtgatagttcagttctttagtttttctatttgaaaaaaaaaaatcatttaaatgatcctttgttcacggctctccttaatgactgagtgaacagttcctatctgtatatttgactaaaccttttcctaagctatctctcatggttcctatgtttttttatcataattaaaagcaaaaccatctggatcacctaacagtcagaggtcagtatctcagcgtgtgaattatagaggaaatacagagagaacctcttccacttttacttttcgtccaaataaaatgcatggtgtaccagaagttgaagatcgggttgaggattggggctagctcgatgacactaaggccccaacatcgcgggacctgctgtggcgcggattcttaggaacgctgttctagccggccccctctccaggggtcgccgtggccggcattatttcctagttcttcttgtaaccctgaggtgccagcgcggggagtgaggaggggtcagggggctaaggatgcaacctctgacgttctgcgccttcctaggagagtcttacatgtgttgagatttcacaagcaatgcgagttgtaaaataccagctctacaagaagctaggctctgtgacggcatagttttcagtagctttatcacaatattcacaatggagaattatatgacatggtagcagaaataggcccttttatgtgttgcttctattttacctcaaattgtagatatagggtaatcaataaaatccatccatgcctttcacacactaagt

SEQ ID NO: 5017 - protein, 942 aa, Homo sapiens; identical to SEQ ID NO: 4171

SEQ ID NO: 5018 - DNA, 7047 bp, Homo sapiens
gggtcttgttctgtctcccaagctggagtgcagtggtgtggtcataggtcactgcagcgtcgaactcctaggctcaagtgatcctcttgcctcaggctcctgagtagctgggacaacaggcgtgtaccacacctggatactttttaaatttttggtagagaagggatctcactctattgccaagctggtgtcgaactcttggtcttaagcagccctcccacgtcagcatcccaaagtgttgggatttcagagggatcatggcccaagttgcaatgtccaccctccccgttgaagatgaggagtcctcggagagcaggatggtggtgacattcctcatgtcagctctcgagtccatgtgtaaagaactggccaagtccaaagccgaagtggcctgcattgcagtgtatgaaacagacgtgtttgtcgtcggaactgaaagaggacgtgcttttgtcaataccagaaaggattttcaaaaagattttgtaaaatattgtgttgaagaagaagaaaaagctgcagagatgcataaaatgaaatctacaacccaggcaaatcggatgagtgtagatgctgtagaaattgaaacactcagaaaaacagttgaggactatttctgcttttgctatgggaaagctttaggcaaatccacagtggtacctgtaccatatgagaagatgctgcgagaccagtcggctgtggtagtgcaggggcttccggaaggtgttgcctttaaacaccccgagaactatgatcttgcaaccctgaaatggattttggagaacaaagcagggatttcattcatcattaagagaccttttttagagccaaagaagcatgtaggtggtcgtgtgatggtaacagatgctgacaggtcaatactatctccaggtggaagttgtggccccatcaaagtgaaaactgaacccacagaagattctggcatttccctggaaatggcagctgtgacagtaaaggaagaatcagaagatcctgattattatcaatataacattcaaggaagccaccattcttcagagggcaatgaaggcacagaaatggaagtaccagcagaagattctactcaacatgtcccttcagaaacaagtgaggaccctgaagttgaggtgactattgaagatgatgattattctccaccgtctaagagaccaaaggccaatgagctaccgcagccaccagtcccggaacccgccaatgctgggaagcggaaagtgagggagttcaacttcgagaaatggaatgctcgcatcactgatctacgtaaacaagttgaagaattgtttgaaaggaaatatgctcaagccataaaagccaaaggtccggtgacgatcccgtaccctcttttccagtctcatgttgaagatctttatgtagaaggacttcctgaaggaattccttttagaaggccatctacttacggaattcctcgcctggagaggatattacttgcaaaggaaaggattcgttttgtgattaagaaacatgagcttctgaattcaacacgtgaagatttacagcttgataagccagcttcaggagtaaaggaagaatggtatgccagaatcactaaattaagaaagatggtggatcagcttttctgcaaaaaatttgcggaagccttggggagcactgaagccaaggctgtaccgtaccaaaaatttgaggcacacccgaatgatctgtacgtggaaggactgccagaaaacattcctttccgaagtccctcatggtatggaatcccaaggctggaaaaaatcattcaagtgggcaatcgaattaaatttgttattaaaagaccagaacttctgactcacagtaccactgaagttactcagccaagaacgaatacaccagctcaagctcttggactcaccgaggcagtaaaagtaccatatcctgtgtttgaatcaaacccggagttcttgtatgtggaaggcttgccagaggggattcccttccgaagccctacctggtttggaattccacgacttgaaaggatcgtccgcgggagtaataaaatcaagttcgttgttaaaaaacctgaactagttatttcctacttgcctcctgggatggctagtaaaataaacactaaagctttgcagtcccccaaaagaccacgaagtcctgggagtaattcaaaggttcctgaaattgaggtcaccgtggaaggccctaataacaacaatcctcaaacctcagctgttcgaaccccgacccagactaacggttctaacgttcccttcaagccacgagggagagagttttcctttgaggcctggaatgccaaaatcacggacctaaaacagaaagttgaaaatctcttcaatgagaaatgtggggaagctcttggccttaaacaagctgtgaaggtgccgttcgcgttatttgagtctttcccggaagacttttatgtggaaggcttacctgagggtgtgccattccgaagaccatcgacttttggcattccgaggctggagaagatactcagaaacaaagccaaaattaagttcatcattaaaaagcccgaaatgtttgagacggcgattaaggagagcacctcctctaagagccctcccagaaaaataaattcatcacccaatgttaatactactgcatcaggtgttgaagaccttaacatcattcaggtgacaattccagatgatgataatgaaagactctcgaaagttgaaaaagctagacagctaagagaacaagtgaatgacctctttagtcggaaatttggtgaagctattggtatgggttttcctgtgaaagttccctacaggaaaatcacaattaaccctggctgtgtggtggttgatggcatgcccccgggggtgtccttcaaagcccccagctacctggaaatcagctccatgagaaggatcttagactctgccgagtttatcaaattcacggtcattaggtaagtgagagtttcctgcttagtcacaggagcgaatctggagctcatgaggctgactcttctaaaatgcagccacaggtagtcatcgaatccggcttcctatgctgtgcaatcaacaaatcaaaataacttgtgtcatcattagaatgtcagatgtgcttctacgaactaagctgactcttttaattctttggcaaagggttggcaaactaggactgtttgccaaattcaggctgcctcctatttttagagtcttcctgaaacacagctacacccgtattatccatggctgctttcctgtcacagtgagtaagtagctgggactgagaaggcatggcctccaaagtctaaaatatttactctctagcactttgtagaaaaaccttagctaggcacagtggctaacgcctgtaatcccagcattttgggaggccaaggcaggcagatcacctgaggtcaggagttccagaccagcctggccaacatggtgaaatcccatctctacaaaaataaaacagttagctgggcatgatggcgggtgcctgtaatcccagctactcgggaggctgaggcaggatagtcgcttgaacccaggaggtggaggttgcaatgagccaagatcatgccactgcactccagcctggacgacagagtgagactccatcacaagaaaaaaagaactttgtcaacctctgtcttagggcgccttgtcacaggcttcgggtcagacggattcaaccttgcatcagccatttgttagccaggtcactctgttctttgtctgtaaatgagattgatcgttgttcccactgagagtgtcagctccttcccgtagagcaggcatgatgattgtactcacctctgacaccattgtgagtgccacattccttcccacgtccttgtcactgtaagagatgcccacctgagcaccaaccccaggttatcttcccctttgtcttccagccccccagaaacagctacgactcaacctacccaatcatttcatcatcagattgccactgtctctagttcaggtctcttgggactggcactcagaaatctcataataaatcctcttgaggcttctcatacactcgtcttcttccaatcttctttccctcaaaatctcatattttggttccacttcacccaccgtcattctccatatcactcccaggagttaggcaaaaagccccttccgttcttccgtatgttaaacttagaatcactctgttccctgctctgcgtttctattttttgtttttcctccatttactagtagcttaacactttctaacagtgttcttattattgatacgtatctatctcttccataagcttataaggtcacggataatacttctcattgtagtacgtaaatgacgtgggctagatatgagttgaataaacagttatacctgtaaattcttacagagtgaaaataaattgttatactttacaatttgtttctctctttagaccatttccaggacttgtgattaataaccgtgagtattttgtgaagtgttttgtttttgttttttcctggggtctgacgtgtgtgcgtgtgagtgtgtatacatgcttaacgtatatcacgttacttcacctatgtcagtaaccaggccaaatacttgttttagccctcagtaaaaacaccaggcacttcctagttgtaaaattattcaagcttcttaacttcctatcctcgatgcacttaatcataaaatggtaataatagcaccgattttgggggagtcgttccagtagatggaaagcatctggaacaggtgtcagcaagctcctgccgacgtgtatgcataaagttttattgaaaccaccatcgtgtccatttgtttatggcagaactgagagatggcagcagcaagtgtgtgcctgcaaaacctaaaatatttactaattggctctgcaagaaaagagtttgcatccccctaacctagaacagtgtctagcctctagtatgtgtttagcctacagtatgtgctcagcgaatacaatctatatttattactgcttttatgactgttataattactgtgcttggatttcgttacaaagtaagtcacaatgtgcctgcttctgttagtatttcagcacagtgcctggcacacatggggctctcaaatattgctgagcgagtgaacaaatgtcctttcaattccttaacgttgatgtcattttcaatagtattttgagccaaacttaattttgcgagtgtgttttgttttcttaactttattattaaaaatgtataaaagtgaggccaggcgtggtggctcacgcctgtaatcccagcagtttgggaggctgaggcaggcggatcagttgaggttgggagttggagaccagcccgtccaacatggtgaaagcctgtctctactaaaaatacaaaaatcagctgggtgtggtggcgcgtgcctgtaatcccagctactcaggaggctgaggcaggagagttgcttgaatcctagaggtggaggttgcagtgagctgagatcgtgccattgcactccagcctgggcaacaagagcaaaactctgtcccaataaataaataaataaaatgttctcttttgttcctgttcttgtgcggtagtgtggtatagagttttatggtaattactgtgaattagtgattctgagggacatatcagaactctgaggtttgtttccttctcatcttgagggaaacagcaaatgtatgttaaaatgcttttccaagggaacaacacatccttacattatttaaaccaatctgcttcattttcagagctggttgatcagagtgagtcagaaggccccgtgatacaagaatcagctgaaccaagccagttggaagttccagccacagaagaaataaaagagactgatggaagctctcagatcaagcaagaaccagaccccacgtggtagacctcttccctcctaggcttaaagtatcagtggttgagaagagcttttcggacctgttactaccccaagctgtgtaatatacttgtataacagaaataccttctatacaaacctttttttctacttttagatagaaatgtctactttttcagcagttctgtgaattaaagagcagagtgactgtgggtctggaatggctggtgtacttgggaatgtactatcaggattttacagcaatgctgggaaatgacagggaaaatgacaggaatgaatctcaccagattttttatgtactcagcagagccttgagttacggtgtttattttccaatcaagtgaagatatctcctacttctcctactggaacatctcagcttctgcagtgaagaaaaattcctgtgatagttcagttctttagtttttctatttgaaaaaaaaaaatcatttaaatgatcctttgttcacggctctccttaatgactgagtgaacagttcctatctgtatatttgactaaaccttttcctaagctatctctcatggttcctatgtttttttatcataattaaaagcaaaaccatctggatcacctaacagtcagaggtcagtatctcagcgtgtgaattatagaggaaatacagagagaacctcttccacttttacttttcgtccaaataaaatgcatggtgtaccagaagttgaagatcgggttgaggattggggctagctcgatgacactaaggccccaacatcgcgggacctgctgtggcgcggattcttaggaacgctgttctagccggccccctctccaggggtcgccgtggccggcattatttcctagttcttcttgtaaccctgaggtgccagcgcggggagtgaggaggggtcagggggctaaggatgcaacctctgacgttctgcgccttcctaggagagtcttacatgtgttgagatttcacaagcaatgcgagttgtaaaataccagctctacaagaagctaggctctgtgacggcatagttttcagtagctttatcacaatattcacaatggagaattatatgacatggtagcagaaataggcccttttatgtgttgcttctattttacctcaaattgtagatatagggtaatcaataaaatccatccatgcctttcacacactaagt

SEQ ID NO: 5019 - protein, 898 aa, Homo sapiens; identical to SEQ ID NO: 4367

SEQ ID NO: 5020 - DNA, 4186 bp, Homo sapiens
gggtcttgttctgtctcccaagctggagtgcagtggtgtggtcataggtcactgcagcgtcgaactcctaggctcaagtgatcctcttgcctcaggctcctgagtagctgggacaacaggcgtgtaccacacctggatactttttaaatttttggtagagaagggatctcactctattgccaagctggtgtcgaactcttggtcttaagcagccctcccacgtcagcatcccaaagtgttgggatttcagagggatcatggcccaagttgcaatgtccaccctccccgttgaagatgaggagtcctcggagagcaggatggtggtgacattcctcatgtcagctctcgagtccatgtgtaaagaactggccaagtccaaagccgaagtggcctgcattgcagtgtatgaaacagacgtgtttgtcgtcggaactgaaagaggacgtgcttttgtcaataccagaaaggattttcaaaaagattttgtaaaatattgtgttgaagaagaagaaaaagctgcagagatgcataaaatgaaatctacaacccaggcaaatcggatgagtgtagatgctgtagaaattgaaacactcagaaaaacagttgaggactatttctgcttttgctatgggaaagctttaggcaaatccacagtggtacctgtaccatatgagaagatgctgcgagaccagtcggctgtggtagtgcaggggcttccggaaggtgttgcctttaaacaccccgagaactatgatcttgcaaccctgaaatggattttggagaacaaagcagggatttcattcatcattaagagaccttttttagagccaaagaagcatgtaggtggtcgtgtgatggtaacagatgctgacaggtcaatactatctccaggtggaagttgtggccccatcaaagtgaaaactgaacccacagaagattctggcatttccctggaaatggcagctgtgacagtaaaggaagaatcagaagatcctgattattatcaatataacattcaaggaagccaccattcttcagagggcaatgaaggcacagaaatggaagtaccagcagaagattctactcaacatgtcccttcagaaacaagtgaggaccctgaagttgaggtgactattgaagatgatgattattctccaccgtctaagagaccaaaggccaatgagctaccgcagccaccagtcccggaacccgccaatgctgggaagcggaaagtgagggagttcaacttcgagaaatggaatgctcgcatcactgatctacgtaaacaagttgaagaattgtttgaaaggaaatatgctcaagccataaaagccaaaggtccggtgacgatcccgtaccctcttttccagtctcatgttgaagatctttatgtagaaggacttcctgaaggaattccttttagaaggccatctacttacggaattcctcgcctggagaggatattacttgcaaaggaaaggattcgttttgtgattaagaaacatgagcttctgaattcaacacgtgaagatttacagcttgataagccagcttcaggagtaaaggaagaatggtatgccagaatcactaaattaagaaagatggtggatcagcttttctgcaaaaaatttgcggaagccttggggagcactgaagccaaggctgtaccgtaccaaaaatttgaggcacacccgaatgatctgtacgtggaaggactgccagaaaacattcctttccgaagtccctcatggtatggaatcccaaggctggaaaaaatcattcaagtgggcaatcgaattaaatttgttattaaaagaccagaacttctgactcacagtaccactgaagttactcagccaagaacgaatacaccagtcaaagaagattggaatgtcagaattaccaagctacggaagcaagtggaagagatttttaatttgaaatttgcttagatttgttgacagcggtttcctggagtgctgtcttgagaacgattctgaggaggctcagcaagaaagagtgtttcagttgattgggtgtgtctgtcatggagaaggaactcaagctcttggactcaccgaggcagtaaaagtaccatatcctgtgtttgaatcaaacccggagttcttgtatgtggaaggcttgccagaggggattcccttccgaagccctacctggtttggaattccacgacttgaaaggatcgtccgcgggagtaataaaatcaagttcgttgttaaaaaacctgaactagttatttcctacttgcctcctgggatggctagtaaaataaacactaaagctttgcagtcccccaaaagaccacgaagtcctgggagtaattcaaaggttcctgaaattgaggtcaccgtggaaggccctaataacaacaatcctcaaacctcagctgttcgaaccccgacccagactaacggttctaacgttcccttcaagccacgagggagagagttttcctttgaggcctggaatgccaaaatcacggacctaaaacagaaagttgaaaatctcttcaatgagaaatgtggggaagctcttggccttaaacaagctgtgaaggtgccgttcgcgttatttgagtctttcccggaagacttttatgtggaaggcttacctgagggtgtgccattccgaagaccatcgacttttggcattccgaggctggagaagatactcagaaacaaagccaaaattaagttcatcattaaaaagcccgaaatgtttgagacggcgattaaggagagcacctcctctaagagccctcccagaaaaataaattcatcacccaatgttaatactactgcatcaggtgttgaagaccttaacatcattcaggtgacaattccagatgatgataatgaaagactctcgaaagttgaaaaagctagacagctaagagaacaagtgaatgacctctttagtcggaaatttggtgaagctattggtatgggttttcctgtgaaagttccctacaggaaaatcacaattaaccctggctgtgtggtggttgatggcatgcccccgggggtgtccttcaaagcccccagctacctggaaatcagctccatgagaaggatcttagactctgccgagtttatcaaattcacggtcattagaccatttccaggacttgtgattaataaccagctggttgatcagagtgagtcagaaggccccgtgatacaagaatcagctgaaccaagccagttggaagttccagccacagaagaaataaaagagactgatggaagctctcagatcaagcaagaaccagaccccacgtggtagacctcttccctcctaggagccttgagttacggtgtttattttccaatcaagtgaagatatctcctacttctcctactggaacatctcagcttctgcagtgaagaaaaattcctgtgatagttcagttctttagtttttctatttgaaaaaaaaaaatcatttaaatgatcctttgttcacggctctccttaatgactgagtgaacagttcctatctgtatatttgactaaaccttttcctaagctatctctcatggttcctatgtttttttatcataattaaaagcaaaaccatctggatcacctaacagtcagaggtcagtatctcagcgtgtgaattatagaggaaatacagagagaacctcttccacttttacttttcgtccaaataaaatgcatggtgtaccagaagttgaagatcgggttgaggattggggctagctcgatgacactaaggccccaacatcgcgggacctgctgtggcgcggattcttaggaacgctgttctagccggccccctctccaggggtcgccgtggccggcattatttcctagttcttcttgtaaccctgaggtgccagcgcggggagtgaggaggggtcagggggctaaggatgcaacctctgacgttctgcgccttcctaggagagtcttacatgtgttgagatttcacaagcaatgcgagttgtaaaataccagctctacaagaagctaggctctgtgacggcatagttttcagtagctttatcacaatattcacaatggagaattatatgacatggtagcagaaataggcccttttatgtgttgcttctattttacctcaaattgtagatatagggtaatcaataaaatccatccatgcctttcacacactaagt

SEQ ID NO: 5021 - protein, 564 aa, Homo sapiens; identical to SEQ ID NO: 4061

SEQ ID NO: 5022 - DNA, 4418 bp, Homo sapiens
gggtcttgttctgtctcccaagctggagtgcagtggtgtggtcataggtcactgcagcgtcgaactcctaggctcaagtgatcctcttgcctcaggctcctgagtagctgggacaacaggcgtgtaccacacctggatactttttaaatttttggtagagaagggatctcactctattgccaagctggtgtcgaactcttggtcttaagcagccctcccacgtcagcatcccaaagtgttgggatttcagagggatcatggcccaagttgcaatgtccaccctccccgttgaagatgaggagtcctcggagagcaggatggtggtgacattcctcatgtcagctctcgagtccatgtgtaaagaactggccaagtccaaagccgaagtggcctgcattgcagtgtatgaaacagacgtgtttgtcgtcggaactgaaagaggacgtgcttttgtcaataccagaaaggattttcaaaaagattttgtaaaatattgtgttgaagaagaagaaaaagctgcagagatgcataaaatgaaatctacaacccaggcaaatcggatgagtgtagatgctgtagaaattgaaacactcagaaaaacagttgaggactatttctgcttttgctatgggaaagctttaggcaaatccacagtggtacctgtaccatatgagaagatgctgcgagaccagtcggctgtggtagtgcaggggcttccggaaggtgttgcctttaaacaccccgagaactatgatcttgcaaccctgaaatggattttggagaacaaagcagggatttcattcatcattaagagaccttttttagagccaaagaagcatgtaggtggtcgtgtgatggtaacagatgctgacaggtcaatactatctccaggtggaagttgtggccccatcaaagtgaaaactgaacccacagaagattctggcatttccctggaaatggcagctgtgacagtaaaggaagaatcagaagatcctgattattatcaatataacattcaagcaggcccttctgaaactgatgatgttgatgaaaaacagcccctatcgaagcctttgcaaggaagccaccattcttcagagggcaatgaaggcacagaaatggaagtaccagcagaagattctactcaacatgtcccttcagaaacaagtgaggaccctgaagttgaggtgactattgaagatgatgattattctccaccgtctaagagaccaaaggccaatgagctaccgcagccaccagtcccggaacccgccaatgctgggaagcggaaagtgagggagttcaacttcgagaaatggaatgctcgcatcactgatctacgtaaacaagttgaagaattgtttgaaaggaaatatgctcaagccataaaagccaaaggtccggtgacgatcccgtaccctcttttccagtctcatgttgaagatctttatgtagaaggacttcctgaaggaattccttttagaaggccatctacttacggaattcctcgcctggagaggatattacttgcaaaggaaaggattcgttttgtgattaagaaacatgagcttctgaattcaacacgtgaagatttacagcttgataagccagcttcaggagtaaaggaagaatggtatgccagaatcactaaattaagaaagatggtggatcagcttttctgcaaaaaatttgcggaagccttggggagcactgaagccaaggctgtaccgtaccaaaaatttgaggcacacccgaatgatctgtacgtggaaggactgccagaaaacattcctttccgaagtccctcatggtatggaatcccaaggctggaaaaaatcattcaagtgggcaatcgaattaaatttgttattaaaagaccagaacttctgactcacagtaccactgaagttactcagccaagaacgaatacaccagtcaaagaagattggaatgtcagaattaccaagctacggaagcaagtggaagagatttttaatttgaaatttgctcaagctcttggactcaccgaggcagtaaaagtaccatatcctgtgtttgaatcaaacccggagttcttgtatgtggaaggcttgccagaggggattcccttccgaagccctacctggtttggaattccacgacttgaaaggatcgtccgcgggagtaataaaatcaagttcgttgttaaaaaacctgaactagttatttcctacttgcctcctgggatggctagtaaaataaacactaaagctttgcagtcccccaaaagaccacgaagtcctgggagtaattcaaaggttcctgaaattgaggtcaccgtggaaggccctaataacaacaatcctcaaacctcagctgttcgaaccccgacccagactaacggttctaacgttcccttcaagccacgagggagagagttttcctttgaggcctggaatgccaaaatcacggacctaaaacagaaagttgaaaatctcttcaatgagaaatgtggggaagctcttggccttaaacaagctgtgaaggtgccgttcgcgttatttgagtctttcccggaagacttttatgtggaaggcttacctgagggtgtgccattccgaagaccatcgacttttggcattccgaggctggagaagatactcagaaacaaagccaaaattaagttcatcattaaaaagcccgaaatgtttgagacggcgattaaggagagcacctcctctaagagccctcccagaaaaataaattcatcacccaatgttaatactactgcatcaggtgttgaagaccttaacatcattcaggtgacaattccagatgatgataatgaaagactctcgaaagttgaaaaagctagacagctaagagaacaagtgaatgacctctttagtcggaaatttggtgaagctattggtatgggttttcctgtgaaagttccctacaggaaaatcacaattaaccctggctgtgtggtggttgatggcatgcccccgggggtgtccttcaaagcccccagctacctggaaatcagctccatgagaaggatcttagactctgccgagtttatcaaattcacggtcattagaccatttccaggacttgtgattaataaccagctggttgatcagagtgagtcagaaggccccgtgatacaagaatcagctgaaccaagccagttggaagttccagccacagaagaaataaaagagactgatggaagctctcagatcaagcaagaaccagaccccacgtggtagacctcttccctcctaggcttaaagtatcagtggttgagaagagcttttcggacctgttactaccccaagctgtgtaatatacttgtataacagaaataccttctatacaaacctttttttctacttttagatagaaatgtctactttttcagcagttctgtgaattaaagagcagagtgactgtgggtctggaatggctggtgtacttgggaatgtactatcaggattttacagcaatgctgggaaatgacagggaaaatgacaggaatgaatctcaccagattttttatgtactcagcagagccttgagttacggtgtttattttccaatcaagtgaagatatctcctacttctcctactggaacatctcagcttctgcagtgaagaaaaattcctgtgatagttcagttctttagtttttctatttgaaaaaaaaaaatcatttaaatgatcctttgttcacggctctccttaatgactgagtgaacagttcctatctgtatatttgactaaaccttttcctaagctatctctcatggttcctatgtttttttatcataattaaaagcaaaaccatctggatcacctaacagtcagaggtcagtatctcagcgtgtgaattatagaggaaatacagagagaacctcttccacttttacttttcgtccaaataaaatgcatggtgtaccagaagttgaagatcgggttgaggattggggctagctcgatgacactaaggccccaacatcgcgggacctgctgtggcgcggattcttaggaacgctgttctagccggccccctctccaggggtcgccgtggccggcattatttcctagttcttcttgtaaccctgaggtgccagcgcggggagtgaggaggggtcagggggctaaggatgcaacctctgacgttctgcgccttcctaggagagtcttacatgtgttgagatttcacaagcaatgcgagttgtaaaataccagctctacaagaagctaggctctgtgacggcatagttttcagtagctttatcacaatattcacaatggagaattatatgacatggtagcagaaataggcccttttatgtgttgcttctattttacctcaaattgtagatatagggtaatcaataaaatccatccatgcctttcacacactaagt

SEQ ID NO: 5023 - protein, 998 aa, Homo sapiens; identical to SEQ ID NO: 468

SEQ ID NO: 5024 - DNA, 3803 bp, Homo sapiens
gggtcttgttctgtctcccaagctggagtgcagtggtgtggtcataggtcactgcagcgtcgaactcctaggctcaagtgatcctcttgcctcaggctcctgagtagctgggacaacaggcgtgtaccacacctggatactttttaaatttttggtagagaagggatctcactctattgccaagctggtgtcgaactcttggtcttaagcagccctcccacgtcagcatcccaaagtgttgggatttcagagggatcatggcccaagttgcaatgtccaccctccccgttgaagatgaggagtcctcggagagcaggatggtggtgacattcctcatgtcagctctcgagtccatgtgtaaagaactggccaagtccaaagccgaagtggcctgcattgcagtgtatgaaacagacgtgtttgtcgtcggaactgaaagaggacgtgcttttgtcaataccagaaaggattttcaaaaagattttgtaaaatattgtgttgaagaagaagaaaaagctgcagagatgcataaaatgaaatctacaacccaggcaaatcggatgagtgtagatgctgtagaaattgaaacactcagaaaaacagttgaggactatttctgcttttgctatgggaaagctttaggcaaatccacagtggtacctgtaccatatgagaagatgctgcgagaccagtcggctgtggtagtgcaggggcttccggaaggtgttgcctttaaacaccccgagaactatgatcttgcaaccctgaaatggattttggagaacaaagcagggatttcattcatcattaagagaccttttttagagccaaagaagcatgtaggtggtcgtgtgatggtaacagatgctgacaggtcaatactatctccaggtggaagttgtggccccatcaaagtgaaaactgaacccacagaagattctggcatttccctggaaatggcagctgtgacagtaaaggaagaatcagaagatcctgattattatcaatataacattcaagcaggcccttctgaaactgatgatgttgatgaaaaacagcccctatcgaagcctttgcaaggaagccaccattcttcagagggcaatgaaggcacagaaatggaagtaccagcagaagatgatgattattctccaccgtctaagagaccaaaggccaatgagctaccgcagccaccagtcccggaacccgccaatgctgggaagcggaaagtgagggagttcaacttcgagaaatggaatgctcgcatcactgatctacgtaaacaagttgaagaattgtttgaaaggaaatatgctcaagccataaaagccaaaggtccggtgacgatcccgtaccctcttttccagtctcatgttgaagatctttatgtagaaggacttcctgaaggaattccttttagaaggccatctacttacggaattcctcgcctggagaggatattacttgcaaaggaaaggattcgttttgtgattaagaaacatgagcttctgaattcaacacgtgaagatttacagcttgataagccagcttcaggagtaaaggaagaatggtatgccagaatcactaaattaagaaagatggtggatcagcttttctgcaaaaaatttgcggaagccttggggagcactgaagccaaggctgtaccgtaccaaaaatttgaggcacacccgaatgatctgtacgtggaaggactgccagaaaacattcctttccgaagtccctcatggtatggaatcccaaggctggaaaaaatcattcaagtgggcaatcgaattaaatttgttattaaaagaccagaacttctgactcacagtaccactgaagttactcagccaagaacgaatacaccagtcaaagaagattggaatgtcagaattaccaagctacggaagcaagtggaagagatttttaatttgaaatttgctcaagctcttggactcaccgaggcagtaaaagtaccatatcctgtgtttgaatcaaacccggagttcttgtatgtggaaggcttgccagaggggattcccttccgaagccctacctggtttggaattccacgacttgaaaggatcgtccgcgggagtaataaaatcaagttcgttgttaaaaaacctgaactagttatttcctacttgcctcctgggatggctagtaaaataaacactaaagctttgcagtcccccaaaagaccacgaagtcctgggagtaattcaaaggttcctgaaattgaggtcaccgtggaaggccctaataacaacaatcctcaaacctcagctgttcgaaccccgacccagactaacggttctaacgttcccttcaagccacgagggagagagttttcctttgaggcctggaatgccaaaatcacggacctaaaacagaaagttgaaaatctcttcaatgagaaatgtggggaagctcttggccttaaacaagctgtgaaggtgccgttcgcgttatttgagtctttcccggaagacttttatgtggaaggcttacctgagggtgtgccattccgaagaccatcgacttttggcattccgaggctggagaagatactcagaaacaaagccaaaattaagttcatcattaaaaagcccgaaatgtttgagacggcgattaaggagagcacctcctctaagagccctcccagaaaaataaattcatcacccaatgttaatactactgcatcaggtgttgaagaccttaacatcattcaggtgacaattccagatgatgataatgaaagactctcgaaagttgaaaaagctagacagctaagagaacaagtgaatgacctctttagtcggaaatttggtgaagctattggtatgggttttcctgtgaaagttccctacaggaaaatcacaattaaccctggctgtgtggtggttgatggcatgcccccgggggtgtccttcaaagcccccagctacctggaaatcagctccatgagaaggatcttagactctgccgagtttatcaaattcacggtcattagaccatttccaggacttgtgattaataaccagctggttgatcagagtgagtcagaaggccccgtgatacaagaatcagctgaaccaagccagttggaagttccagccacagaagaaataaaagagactgatggaagctctcagatcaagcaagaaccagaccccacgtggtagacctcttccctcctaggcaaaaccatctggatcacctaacagtcagaggtcagtatctcagcgtgtgaattatagaggaaatacagagagaacctcttccacttttacttttcgtccaaataaaatgcatggtgtaccagaagttgaagatcgggttgaggattggggctagctcgatgacactaaggccccaacatcgcgggacctgctgtggcgcggattcttaggaacgctgttctagccggccccctctccaggggtcgccgtggccggcattatttcctagttcttcttgtaaccctgaggtgccagcgcggggagtgaggaggggtcagggggctaaggatgcaacctctgacgttctgcgccttcctaggagagtcttacatgtgttgagatttcacaagcaatgcgagttgtaaaataccagctctacaagaagctaggctctgtgacggcatagttttcagtagctttatcacaatattcacaatggagaattatatgacatggtagcagaaataggcccttttatgtgttgcttctattttacctcaaattgtagatatagggtaatcaataaaatccatccatgcctttcacacactaagt

SEQ ID NO: 5025 - protein, 977 aa, Homo sapiens; identical to SEQ ID NO: 472

SEQ ID NO: 5026 - DNA, 4164 bp, Homo sapiens
gggtcttgttctgtctcccaagctggagtgcagtggtgtggtcataggtcactgcagcgtcgaactcctaggctcaagtgatcctcttgcctcaggctcctgagtagctgggacaacaggcgtgtaccacacctggatactttttaaatttttggtagagaagggatctcactctattgccaagctggtgtcgaactcttggtcttaagcagccctcccacgtcagcatcccaaagtgttgggatttcagagggatcatggcccaagttgcaatgtccaccctccccgttgaagatgaggagtcctcggagagcaggatggtggtgacattcctcatgtcagctctcgagtccatgtgtaaagaactggccaagtccaaagccgaagtggcctgcattgcagtgtatgaaacagacgtgtttgtcgtcggaactgaaagaggacgtgcttttgtcaataccagaaaggattttcaaaaagattttgtaaaatattgtgttgaagaagaagaaaaagctgcagagatgcataaaatgaaatctacaacccaggcaaatcggatgagtgtagatgctgtagaaattgaaacactcagaaaaacagttgaggactatttctgcttttgctatgggaaagctttaggcaaatccacagtggtacctgtaccatatgagaagatgctgcgagaccagtcggctgtggtagtgcaggggcttccggaaggtgttgcctttaaacaccccgagaactatgatcttgcaaccctgaaatggattttggagaacaaagcagggatttcattcatcattaagagaccttttttagagccaaagaagcatgtaggtggtcgtgtgatggtaacagatgctgacaggtcaatactatctccaggtggaagttgtggccccatcaaagtgaaaactgaacccacagaagattctggaagccaccattcttcagagggcaatgaaggcacagaaatggaagtaccagcagaagattctactcaacatgtcccttcagaaacaagtgaggaccctgaagttgaggtgactattgaagatgatgattattctccaccgtctaagagaccaaaggccaatgagctaccgcagccaccagtcccggaacccgccaatgctgggaagcggaaagtgagggagttcaacttcgagaaatggaatgctcgcatcactgatctacgtaaacaagttgaagaattgtttgaaaggaaatatgctcaagccataaaagccaaaggtccggtgacgatcccgtaccctcttttccagtctcatgttgaagatctttatgtagaaggacttcctgaaggaattccttttagaaggccatctacttacggaattcctcgcctggagaggatattacttgcaaaggaaaggattcgttttgtgattaagaaacatgagcttctgaattcaacacgtgaagatttacagcttgataagccagcttcaggagtaaaggaagaatggtatgccagaatcactaaattaagaaagatggtggatcagcttttctgcaaaaaatttgcggaagccttggggagcactgaagccaaggctgtaccgtaccaaaaatttgaggcacacccgaatgatctgtacgtggaaggactgccagaaaacattcctttccgaagtccctcatggtatggaatcccaaggctggaaaaaatcattcaagtgggcaatcgaattaaatttgttattaaaagaccagaacttctgactcacagtaccactgaagttactcagccaagaacgaatacaccagtcaaagaagattggaatgtcagaattaccaagctacggaagcaagtggaagagatttttaatttgaaatttgcttagatttgttgacagcggtttcctggagtgctgtcttgagaacgattctgaggaggctcagcaagaaagagtgtttcagttgattgggtgtgtctgtcatggagaaggaactcaagctcttggactcaccgaggcagtaaaagtaccatatcctgtgtttgaatcaaacccggagttcttgtatgtggaaggcttgccagaggggattcccttccgaagccctacctggtttggaattccacgacttgaaaggatcgtccgcgggagtaataaaatcaagttcgttgttaaaaaacctgaactagttatttcctacttgcctcctgggatggctagtaaaataaacactaaagctttgcagtcccccaaaagaccacgaagtcctgggagtaattcaaaggttcctgaaattgaggtcaccgtggaaggccctaataacaacaatcctcaaacctcagctgttcgaaccccgacccagactaacggttctaacgttcccttcaagccacgagggagagagttttcctttgaggcctggaatgccaaaatcacggacctaaaacagaaagttgaaaatctcttcaatgagaaatgtggggaagctcttggccttaaacaagctgtgaaggtgccgttcgcgttatttgagtctttcccggaagacttttatgtggaaggcttacctgagggtgtgccattccgaagaccatcgacttttggcattccgaggctggagaagatactcagaaacaaagccaaaattaagttcatcattaaaaagcccgaaatgtttgagacggcgattaaggagagcacctcctctaagagccctcccagaaaaataaattcatcacccaatgttaatactactgcatcaggtgttgaagaccttaacatcattcaggtgacaattccagatgatgataatgaaagactctcgaaagttgaaaaagctagacagctaagagaacaagtgaatgacctctttagtcggaaatttggtgaagctattggtatgggttttcctgtgaaagttccctacaggaaaatcacaattaaccctggctgtgtggtggttgatggcatgcccccgggggtgtccttcaaagcccccagctacctggaaatcagctccatgagaaggatcttagactctgccgagtttatcaaattcacggtcattagaccatttccaggacttgtgattaataaccagctggttgatcagagtgagtcagaaggccccgtgatacaagaatcagctgaaccaagccagttggaagttccagccacagaagaaataaaagagactgatggaagctctcagatcaagcaagaaccagaccccacgtggtagacctcttccctcctaggcttaaagtatcagtggttgagaagagcttttcggacctgttactaccccaagctgtagccttgagttacggtgtttattttccaatcaagtgaagatatctcctacttctcctactggaacatctcagcttctgcagtgaagaaaaattcctgtgatagttcagttctttagtttttctatttgaaaaaaaaaaatcatttaaatgatcctttgttcacggctctccttaatgactgagtgaacagttcctatctgtatatttgactaaaccttttcctaagctatctctcatggttcctatgtttttttatcataattaaaagcaaaaccatctggatcacctaacagtcagaggtcagtatctcagcgtgtgaattatagaggaaatacagagagaacctcttccacttttacttttcgtccaaataaaatgcatggtgtaccagaagttgaagatcgggttgaggattggggctagctcgatgacactaaggccccaacatcgcgggacctgctgtggcgcggattcttaggaacgctgttctagccggccccctctccaggggtcgccgtggccggcattatttcctagttcttcttgtaaccctgaggtgccagcgcggggagtgaggaggggtcagggggctaaggatgcaacctctgacgttctgcgccttcctaggagagtcttacatgtgttgagatttcacaagcaatgcgagttgtaaaataccagctctacaagaagctaggctctgtgacggcatagttttcagtagctttatcacaatattcacaatggagaattatatgacatggtagcagaaataggcccttttatgtgttgcttctattttacctcaaattgtagatatagggtaatcaataaaatccatccatgcctttcacacactaagt

SEQ ID NO: 5027 - protein, 538 aa, Homo sapiens; identical to SEQ ID NO: 4183

SEQ ID NO: 5028 - DNA, 4123 bp, Homo sapiens
gggtcttgttctgtctcccaagctggagtgcagtggtgtggtcataggtcactgcagcgtcgaactcctaggctcaagtgatcctcttgcctcaggctcctgagtagctgggacaacaggcgtgtaccacacctggatactttttaaatttttggtagagaagggatctcactctattgccaagctggtgtcgaactcttggtcttaagcagccctcccacgtcagcatcccaaagtgttgggatttcagagggatcatggcccaagttgcaatgtccaccctccccgttgaagatgaggagtcctcggagagcaggatggtggtgacattcctcatgtcagctctcgagtccatgtgtaaagaactggccaagtccaaagccgaagtggcctgcattgcagtgtatgaaacagacgtgtttgtcgtcggaactgaaagaggacgtgcttttgtcaataccagaaaggattttcaaaaagattttgtaaaatattgtgttgaagaagaagaaaaagctgcagagatgcataaaatgaaatctacaacccaggcaaatcggatgagtgtagatgctgtagaaattgaaacactcagaaaaacagttgaggactatttctgcttttgctatgggaaagctttaggcaaatccacagtggtacctgtaccatatgagaagatgctgcgagaccagtcggctgtggtagtgcaggggcttccggaaggtgttgcctttaaacaccccgagaactatgatcttgcaaccctgaaatggattttggagaacaaagcagggatttcattcatcattaagagaccttttttagagccaaagaagcatgtaggtggtcgtgtgatggtaacagatgctgacaggtcaatactatctccaggtggaagttgtggccccatcaaagtgaaaactgaacccacagaagattctggcatttccctggaaatggcagctgtgacagtaaaggaagaatcagaagatcctgattattatcaatataacattcaaggaagccaccattcttcagagggcaatgaaggcacagaaatggaagtaccagcagaagatgatgattattctccaccgtctaagagaccaaaggccaatgagctaccgcagccaccagtcccggaacccgccaatgctgggaagcggaaagtgagggagttcaacttcgagaaatggaatgctcgcatcactgatctacgtaaacaagttgaagaattgtttgaaaggaaatatgctcaagccataaaagccaaaggtccggtgacgatcccgtaccctcttttccagtctcatgttgaagatctttatgtagaaggacttcctgaaggaattccttttagaaggccatctacttacggaattcctcgcctggagaggatattacttgcaaaggaaaggattcgttttgtgattaagaaacatgagcttctgaattcaacacgtgaagatttacagcttgataagccagcttcaggagtaaaggaagaatggtatgccagaatcactaaattaagaaagatggtggatcagcttttctgcaaaaaatttgcggaagccttggggagcactgaagccaaggctgtaccgtaccaaaaatttgaggcacacccgaatgatctgtacgtggaaggactgccagaaaacattcctttccgaagtccctcatggtatggaatcccaaggctggaaaaaatcattcaagtgggcaatcgaattaaatttgttattaaaagaccagaacttctgactcacagtaccactgaagttactcagccaagaacgaatacaccagtcaaagaagattggaatgtcagaattaccaagctacggaagcaagtggaagagatttttaatttgaaatttgcttagatttgttgacagcggtttcctggagtgctgtcttgagaacgattctgaggaggctcagcaagaaagagtgtttcagttgattgggtgtgtctgtcatggagaaggaactcaagctcttggactcaccgaggcagtaaaagtaccatatcctgtgtttgaatcaaacccggagttcttgtatgtggaaggcttgccagaggggattcccttccgaagccctacctggtttggaattccacgacttgaaaggatcgtccgcgggagtaataaaatcaagttcgttgttaaaaaacctgaactagttatttcctacttgcctcctgggatggctagtaaaataaacactaaagctttgcagtcccccaaaagaccacgaagtcctgggagtaattcaaaggttcctgaaattgaggtcaccgtggaaggccctaataacaacaatcctcaaacctcagctgttcgaaccccgacccagactaacggttctaacgttcccttcaagccacgagggagagagttttcctttgaggcctggaatgccaaaatcacggacctaaaacagaaagttgaaaatctcttcaatgagaaatgtggggaagctcttggccttaaacaagctgtgaaggtgccgttcgcgttatttgagtctttcccggaagacttttatgtggaaggcttacctgagggtgtgccattccgaagaccatcgacttttggcattccgaggctggagaagatactcagaaacaaagccaaaattaagttcatcattaaaaagcccgaaatgtttgagacggcgattaaggagagcacctcctctaagagccctcccagaaaaataaattcatcacccaatgttaatactactgcatcaggtgttgaagaccttaacatcattcaggtgacaattccagatgatgataatgaaagactctcgaaagttgaaaaagctagacagctaagagaacaagtgaatgacctctttagtcggaaatttggtgaagctattggtatgggttttcctgtgaaagttccctacaggaaaatcacaattaaccctggctgtgtggtggttgatggcatgcccccgggggtgtccttcaaagcccccagctacctggaaatcagctccatgagaaggatcttagactctgccgagtttatcaaattcacggtcattagaccatttccaggacttgtgattaataaccagctggttgatcagagtgagtcagaaggccccgtgatacaagaatcagctgaaccaagccagttggaagttccagccacagaagaaataaaagagactgatggaagctctcagatcaagcaagaaccagaccccacgtggtagacctcttccctcctaggagccttgagttacggtgtttattttccaatcaagtgaagatatctcctacttctcctactggaacatctcagcttctgcagtgaagaaaaattcctgtgatagttcagttctttagtttttctatttgaaaaaaaaaaatcatttaaatgatcctttgttcacggctctccttaatgactgagtgaacagttcctatctgtatatttgactaaaccttttcctaagctatctctcatggttcctatgtttttttatcataattaaaagcaaaaccatctggatcacctaacagtcagaggtcagtatctcagcgtgtgaattatagaggaaatacagagagaacctcttccacttttacttttcgtccaaataaaatgcatggtgtaccagaagttgaagatcgggttgaggattggggctagctcgatgacactaaggccccaacatcgcgggacctgctgtggcgcggattcttaggaacgctgttctagccggccccctctccaggggtcgccgtggccggcattatttcctagttcttcttgtaaccctgaggtgccagcgcggggagtgaggaggggtcagggggctaaggatgcaacctctgacgttctgcgccttcctaggagagtcttacatgtgttgagatttcacaagcaatgcgagttgtaaaataccagctctacaagaagctaggctctgtgacggcatagttttcagtagctttatcacaatattcacaatggagaattatatgacatggtagcagaaataggcccttttatgtgttgcttctattttacctcaaattgtagatatagggtaatcaataaaatccatccatgcctttcacacactaagt

SEQ ID NO: 5029 - protein, 543 aa, Homo sapiens; identical to SEQ ID NO: 4195

SEQ ID NO: 5030 - DNA, 7748 bp, Homo sapiens
gggtcttgttctgtctcccaagctggagtgcagtggtgtggtcataggtcactgcagcgtcgaactcctaggctcaagtgatcctcttgcctcaggctcctgagtagctgggacaacaggcgtgtaccacacctggatactttttaaatttttggtagagaagggatctcactctattgccaagctggtgtcgaactcttggtcttaagcagccctcccacgtcagcatcccaaagtgttgggatttcagagggatcatggcccaagttgcaatgtccaccctccccgttgaagatgaggagtcctcggagagcaggatggtggtgacattcctcatgtcagctctcgagtccatgtgtaaagaactggccaagtccaaagccgaagtggcctgcattgcagtgtatgaaacagacgtgtttgtcgtcggaactgaaagaggacgtgcttttgtcaataccagaaaggattttcaaaaagattttgtaaaatattgtgttgaagaagaagaaaaagctgcagagatgcataaaatgaaatctacaacccaggcaaatcggatgagtgtagatgctgtagaaattgaaacactcagaaaaacagttgaggactatttctgcttttgctatgggaaagctttaggcaaatccacagtggtacctgtaccatatgagaagatgctgcgagaccagtcggctgtggtagtgcaggggcttccggaaggtgttgcctttaaacaccccgagaactatgatcttgcaaccctgaaatggattttggagaacaaagcagggatttcattcatcattaagagaccttttttagagccaaagaagcatgtaggtggtcgtgtgatggtaacagatgctgacaggtcaatactatctccaggtggaagttgtggccccatcaaagtgaaaactgaacccacagaagattctggcatttccctggaaatggcagctgtgacagtaaaggaagaatcagaagatcctgattattatcaatataacattcaaggaagccaccattcttcagagggcaatgaaggcacagaaatggaagtaccagcagaagatgatgattattctccaccgtctaagagaccaaaggccaatgagctaccgcagccaccagtcccggaacccgccaatgctgggaagcggaaagtgagggagttcaacttcgagaaatggaatgctcgcatcactgatctacgtaaacaagttgaagaattgtttgaaaggaaatatgctcaagccataaaagccaaaggtccggtgacgatcccgtaccctcttttccagtctcatgttgaagatctttatgtagaaggacttcctgaaggaattccttttagaaggccatctacttacggaattcctcgcctggagaggatattacttgcaaaggaaaggattcgttttgtgattaagaaacatgagcttctgaattcaacacgtgaagatttacagcttgataagccagcttcaggagtaaaggaagaatggtatgccagaatcactaaattaagaaagatggtggatcagcttttctgcaaaaaatttgcggaagccttggggagcactgaagccaaggctgtaccgtaccaaaaatttgaggcacacccgaatgatctgtacgtggaaggactgccagaaaacattcctttccgaagtccctcatggtatggaatcccaaggctggaaaaaatcattcaagtgggcaatcgaattaaatttgttattaaaagaccagaacttctgactcacagtaccactgaagttactcagccaagaacgaatacaccagtcaaagaagattggaatgtcagaattaccaagctacggaagcaagtggaagagatttttaatttgaaatttgctcaagctcttggactcaccgaggcagtaaaagtaccatatcctgtgtttgaatcaaacccggagttcttgtatgtggaaggcttgccagaggggattcccttccgaagccctacctggtttggaattccacgacttgaaaggatcgtccgcgggagtaataaaatcaagttcgttgttaaaaaacctgaactagttatttcctacttgcctcctgggatggctagtaaaataaacactaaagctttgcagtcccccaaaagaccacgaagtcctgggagtaattcaaaggttcctgaaattgaggtcaccgtggaaggccctaataacaacaatcctcaaacctcagctgttcgaaccccgacccagactaacggttctaacgttcccttcaagccacgagggagagagttttcctttgaggcctggaatgccaaaatcacggacctaaaacagaaagttgaaaatctcttcaatgagaaatgtggggaagctcttggccttaaacaagctgtgaaggtgccgttcgcgttatttgagtctttcccggaagacttttatgtggaaggcttacctgagggtgtgccattccgaagaccatcgacttttggcattccgaggctggagaagatactcagaaacaaagccaaaattaagttcatcattaaaaagcccgaaatgtttgagacggcgattaaggagagcacctcctctaagagccctcccagaaaaataaattcatcacccaatgttaatactactgcatcaggtgttgaagaccttaacatcattcaggtgacaattccagatgatgataatgaaagactctcgaaagttgaaaaagctagacagctaagagaacaagtgaatgacctctttagtcggaaatttggtgaagctattggtatgggttttcctgtgaaagttccctacaggaaaatcacaattaaccctggctgtgtggtggttgatggcatgcccccgggggtgtccttcaaagcccccagctacctggaaatcagctccatgagaaggatcttagactctgccgagtttatcaaattcacggtcattaggtaagtgagagtttcctgcttagtcacaggagcgaatctggagctcatgaggctgactcttctaaaatgcagccacaggtagtcatcgaatccggcttcctatgctgtgcaatcaacaaatcaaaataacttgtgtcatcattagaatgtcagatgtgcttctacgaactaagctgactcttttaattctttggcaaagggttggcaaactaggactgtttgccaaattcaggctgcctcctatttttagagtcttcctgaaacacagctacacccgtattatccatggctgctttcctgtcacagtgagtaagtagctgggactgagaaggcatggcctccaaagtctaaaatatttactctctagcactttgtagaaaaaccttagctaggcacagtggctaacgcctgtaatcccagcattttgggaggccaaggcaggcagatcacctgaggtcaggagttccagaccagcctggccaacatggtgaaatcccatctctacaaaaataaaacagttagctgggcatgatggcgggtgcctgtaatcccagctactcgggaggctgaggcaggatagtcgcttgaacccaggaggtggaggttgcaatgagccaagatcatgccactgcactccagcctggacgacagagtgagactccatcacaagaaaaaaagaactttgtcaacctctgtcttagggcgccttgtcacaggcttcgggtcagacggattcaaccttgcatcagccatttgttagccaggtcactctgttctttgtctgtaaatgagattgatcgttgttcccactgagagtgtcagctccttcccgtagagcaggcatgatgattgtactcacctctgacaccattgtgagtgccacattccttcccacgtccttgtcactgtaagagatgcccacctgagcaccaaccccaggttatcttcccctttgtcttccagccccccagaaacagctacgactcaacctacccaatcatttcatcatcagattgccactgtctctagttcaggtctcttgggactggcactcagaaatctcataataaatcctcttgaggcttctcatacactcgtcttcttccaatcttctttccctcaaaatctcatattttggttccacttcacccaccgtcattctccatatcactcccaggagttaggcaaaaagccccttccgttcttccgtatgttaaacttagaatcactctgttccctgctctgcgtttctattttttgtttttcctccatttactagtagcttaacactttctaacagtgttcttattattgatacgtatctatctcttccataagcttataaggtcacggataatacttctcattgtagtacgtaaatgacgtgggctagatatgagttgaataaacagttatacctgtaaattcttacagagtgaaaataaattgttatactttacaatttgtttctctctttagaccatttccaggacttgtgattaataaccgtgagtattttgtgaagtgttttgtttttgttttttcctggggtctgacgtgtgtgcgtgtgagtgtgtatacatgcttaacgtatatcacgttacttcacctatgtcagtaaccaggccaaatacttgttttagccctcagtaaaaacaccaggcacttcctagttgtaaaattattcaagcttcttaacttcctatcctcgatgcacttaatcataaaatggtaataatagcaccgattttgggggagtcgttccagtagatggaaagcatctggaacaggtgtcagcaagctcctgccgacgtgtatgcataaagttttattgaaaccaccatcgtgtccatttgtttatggcagaactgagagatggcagcagcaagtgtgtgcctgcaaaacctaaaatatttactaattggctctgcaagaaaagagtttgcatccccctaacctagaacagtgtctagcctctagtatgtgtttagcctacagtatgtgctcagcgaatacaatctatatttattactgcttttatgactgttataattactgtgcttggatttcgttacaaagtaagtcacaatgtgcctgcttctgttagtatttcagcacagtgcctggcacacatggggctctcaaatattgctgagcgagtgaacaaatgtcctttcaattccttaacgttgatgtcattttcaatagtattttgagccaaacttaattttgcgagtgtgttttgttttcttaactttattattaaaaatgtataaaagtgaggccaggcgtggtggctcacgcctgtaatcccagcagtttgggaggctgaggcaggcggatcagttgaggttgggagttggagaccagcccgtccaacatggtgaaagcctgtctctactaaaaatacaaaaatcagctgggtgtggtggcgcgtgcctgtaatcccagctactcaggaggctgaggcaggagagttgcttgaatcctagaggtggaggttgcagtgagctgagatcgtgccattgcactccagcctgggcaacaagagcaaaactctgtcccaataaataaataaataaaatgttctcttttgttcctgttcttgtgcggtagtgtggtatagagttttatggtaattactgtgaattagtgattctgagggacatatcagaactctgaggtttgtttccttctcatcttgagggaaacagcaaatgtatgttaaaatgcttttccaagggaacaacacatccttacattatttaaaccaatctgcttcattttcagagctggttgatcagagtgagtcagaaggccccgtgatacaagaatcagctgaaccaagccagttggaagttccagccacagaagaaataaaagagactgatggaagctctcagatcaagcaagaaccagaccccacgtggtagacctcttccctcctagggtaaatcagcttctgtgtcagggatgctgtgtggtgtccatctgaaccccctgcatacgcgtagctaatgtgatctccccactttcacataagatggtggccctgccttcagggaatgtgggagccaggtgggagccttcccggatatttaagctagaagattctacagggagattctccttggatcaatatatgtctctcagtcaaagatgtaaaagcacttttgccttaaaaagaatgttctgtttctaaatagagtcaacgttgtcctcctcattggaattcactatgagtcagaatcattagactgacttttttttttccatagtaatagtattttgcagagtctcacagagctgcagatcttttgttcatcttgcagagttaacaagtctgatcctgttagtccagatttcttaaatttggccaagttataataggagcagtagcttgagacccgaagtcaggaaactttgacaatggatttttttttttaatccagagacttgtactggaatttgccttaccctgtcagctcatggacttaaggtttcatcccgctttatgagtgcttctgaatccaagtcattgttacctgaatttgcaaattaagttgtgatattcgtgactgttaaattcctgtaattagattaacctctttgcttgcttgtttgttttctctcctattttagcttaaagtatcagtggttgagaagagcttttcggacctgttactaccccaagctgtgtaatatacttgtataacagaaataccttctatacaaacctttttttctacttttagatagaaatgtctactttttcagcagttctgtgaattaaagagcagagtgactgtgggtctggaatggctggtgtacttgggaatgtactatcaggattttacagcaatgctgggaaatgacagggaaaatgacaggaatgaatctcaccagattttttatgtactcagcagagccttgagttacggtgtttattttccaatcaagtgaagatatctcctacttctcctactggaacatctcagcttctgcagtgaagaaaaattcctgtgatagttcagttctttagtttttctatttgaaaaaaaaaaatcatttaaatgatcctttgttcacggctctccttaatgactgagtgaacagttcctatctgtatatttgactaaaccttttcctaagctatctctcatggttcctatgtttttttatcataattaaaagcaaaaccatctggatcacctaacagtcagaggtcagtatctcagcgtgtgaattatagaggaaatacagagagaacctcttccacttttacttttcgtccaaataaaatgcatggtgtaccagaagttgaagatcgggttgaggattggggctagctcgatgacactaaggccccaacatcgcgggacctgctgtggcgcggattcttaggaacgctgttctagccggccccctctccaggggtcgccgtggccggcattatttcctagttcttcttgtaaccctgaggtgccagcgcggggagtgaggaggggtcagggggctaaggatgcaacctctgacgttctgcgccttcctaggagagtcttacatgtgttgagatttcacaagcaatgcgagttgtaaaataccagctctacaagaagctaggctctgtgacggcatagttttcagtagctttatcacaatattcacaatggagaattatatgacatggtagcagaaataggcccttttatgtgttgcttctattttacctcaaattgtagatatagggtaatcaataaaatccatccatgcctttcacacactaagt

SEQ ID NO: 5031 - protein, 901 aa, Homo sapiens [sequence omitted]

SEQ ID NO: 5032 - DNA, 7860 bp, Homo sapiens
gggtcttgttctgtctcccaagctggagtgcagtggtgtggtcataggtcactgcagcgtcgaactcctaggctcaagtgatcctcttgcctcaggctcctgagtagctgggacaacaggcgtgtaccacacctggatactttttaaatttttggtagagaagggatctcactctattgccaagctggtgtcgaactcttggtcttaagcagccctcccacgtcagcatcccaaagtgttgggatttcagagggatcatggcccaagttgcaatgtccaccctccccgttgaagatgaggagtcctcggagagcaggatggtggtgacattcctcatgtcagctctcgagtccatgtgtaaagaactggccaagtccaaagccgaagtggcctgcattgcagtgtatgaaacagacgtgtttgtcgtcggaactgaaagaggacgtgcttttgtcaataccagaaaggattttcaaaaagattttgtaaaatattgtgttgaagaagaagaaaaagctgcagagatgcataaaatgaaatctacaacccaggcaaatcggatgagtgtagatgctgtagaaattgaaacactcagaaaaacagttgaggactatttctgcttttgctatgggaaagctttaggcaaatccacagtggtacctgtaccatatgagaagatgctgcgagaccagtcggctgtggtagtgcaggggcttccggaaggtgttgcctttaaacaccccgagaactatgatcttgcaaccctgaaatggattttggagaacaaagcagggatttcattcatcattaagagaccttttttagagccaaagaagcatgtaggtggtcgtgtgatggtaacagatgctgacaggtcaatactatctccaggtggaagttgtggccccatcaaagtgaaaactgaacccacagaagattctggcatttccctggaaatggcagctgtgacagtaaaggaagaatcagaagatcctgattattatcaatataacattcaaggaagccaccattcttcagagggcaatgaaggcacagaaatggaagtaccagcagaagatgatgattattctccaccgtctaagagaccaaaggccaatgagctaccgcagccaccagtcccggaacccgccaatgctgggaagcggaaagtgagggagttcaacttcgagaaatggaatgctcgcatcactgatctacgtaaacaagttgaagaattgtttgaaaggaaatatgctcaagccataaaagccaaaggtccggtgacgatcccgtaccctcttttccagtctcatgttgaagatctttatgtagaaggacttcctgaaggaattccttttagaaggccatctacttacggaattcctcgcctggagaggatattacttgcaaaggaaaggattcgttttgtgattaagaaacatgagcttctgaattcaacacgtgaagatttacagcttgataagccagcttcaggagtaaaggaagaatggtatgccagaatcactaaattaagaaagatggtggatcagcttttctgcaaaaaatttgcggaagccttggggagcactgaagccaaggctgtaccgtaccaaaaatttgaggcacacccgaatgatctgtacgtggaaggactgccagaaaacattcctttccgaagtccctcatggtatggaatcccaaggctggaaaaaatcattcaagtgggcaatcgaattaaatttgttattaaaagaccagaacttctgactcacagtaccactgaagttactcagccaagaacgaatacaccagtcaaagaagattggaatgtcagaattaccaagctacggaagcaagtggaagagatttttaatttgaaatttgcttagatttgttgacagcggtttcctggagtgctgtcttgagaacgattctgaggaggctcagcaagaaagagtgtttcagttgattgggtgtgtctgtcatggagaaggaactcaagctcttggactcaccgaggcagtaaaagtaccatatcctgtgtttgaatcaaacccggagttcttgtatgtggaaggcttgccagaggggattcccttccgaagccctacctggtttggaattccacgacttgaaaggatcgtccgcgggagtaataaaatcaagttcgttgttaaaaaacctgaactagttatttcctacttgcctcctgggatggctagtaaaataaacactaaagctttgcagtcccccaaaagaccacgaagtcctgggagtaattcaaaggttcctgaaattgaggtcaccgtggaaggccctaataacaacaatcctcaaacctcagctgttcgaaccccgacccagactaacggttctaacgttcccttcaagccacgagggagagagttttcctttgaggcctggaatgccaaaatcacggacctaaaacagaaagttgaaaatctcttcaatgagaaatgtggggaagctcttggccttaaacaagctgtgaaggtgccgttcgcgttatttgagtctttcccggaagacttttatgtggaaggcttacctgagggtgtgccattccgaagaccatcgacttttggcattccgaggctggagaagatactcagaaacaaagccaaaattaagttcatcattaaaaagcccgaaatgtttgagacggcgattaaggagagcacctcctctaagagccctcccagaaaaataaattcatcacccaatgttaatactactgcatcaggtgttgaagaccttaacatcattcaggtgacaattccagatgatgataatgaaagactctcgaaagttgaaaaagctagacagctaagagaacaagtgaatgacctctttagtcggaaatttggtgaagctattggtatgggttttcctgtgaaagttccctacaggaaaatcacaattaaccctggctgtgtggtggttgatggcatgcccccgggggtgtccttcaaagcccccagctacctggaaatcagctccatgagaaggatcttagactctgccgagtttatcaaattcacggtcattaggtaagtgagagtttcctgcttagtcacaggagcgaatctggagctcatgaggctgactcttctaaaatgcagccacaggtagtcatcgaatccggcttcctatgctgtgcaatcaacaaatcaaaataacttgtgtcatcattagaatgtcagatgtgcttctacgaactaagctgactcttttaattctttggcaaagggttggcaaactaggactgtttgccaaattcaggctgcctcctatttttagagtcttcctgaaacacagctacacccgtattatccatggctgctttcctgtcacagtgagtaagtagctgggactgagaaggcatggcctccaaagtctaaaatatttactctctagcactttgtagaaaaaccttagctaggcacagtggctaacgcctgtaatcccagcattttgggaggccaaggcaggcagatcacctgaggtcaggagttccagaccagcctggccaacatggtgaaatcccatctctacaaaaataaaacagttagctgggcatgatggcgggtgcctgtaatcccagctactcgggaggctgaggcaggatagtcgcttgaacccaggaggtggaggttgcaatgagccaagatcatgccactgcactccagcctggacgacagagtgagactccatcacaagaaaaaaagaactttgtcaacctctgtcttagggcgccttgtcacaggcttcgggtcagacggattcaaccttgcatcagccatttgttagccaggtcactctgttctttgtctgtaaatgagattgatcgttgttcccactgagagtgtcagctccttcccgtagagcaggcatgatgattgtactcacctctgacaccattgtgagtgccacattccttcccacgtccttgtcactgtaagagatgcccacctgagcaccaaccccaggttatcttcccctttgtcttccagccccccagaaacagctacgactcaacctacccaatcatttcatcatcagattgccactgtctctagttcaggtctcttgggactggcactcagaaatctcataataaatcctcttgaggcttctcatacactcgtcttcttccaatcttctttccctcaaaatctcatattttggttccacttcacccaccgtcattctccatatcactcccaggagttaggcaaaaagccccttccgttcttccgtatgttaaacttagaatcactctgttccctgctctgcgtttctattttttgtttttcctccatttactagtagcttaacactttctaacagtgttcttattattgatacgtatctatctcttccataagcttataaggtcacggataatacttctcattgtagtacgtaaatgacgtgggctagatatgagttgaataaacagttatacctgtaaattcttacagagtgaaaataaattgttatactttacaatttgtttctctctttagaccatttccaggacttgtgattaataaccgtgagtattttgtgaagtgttttgtttttgttttttcctggggtctgacgtgtgtgcgtgtgagtgtgtatacatgcttaacgtatatcacgttacttcacctatgtcagtaaccaggccaaatacttgttttagccctcagtaaaaacaccaggcacttcctagttgtaaaattattcaagcttcttaacttcctatcctcgatgcacttaatcataaaatggtaataatagcaccgattttgggggagtcgttccagtagatggaaagcatctggaacaggtgtcagcaagctcctgccgacgtgtatgcataaagttttattgaaaccaccatcgtgtccatttgtttatggcagaactgagagatggcagcagcaagtgtgtgcctgcaaaacctaaaatatttactaattggctctgcaagaaaagagtttgcatccccctaacctagaacagtgtctagcctctagtatgtgtttagcctacagtatgtgctcagcgaatacaatctatatttattactgcttttatgactgttataattactgtgcttggatttcgttacaaagtaagtcacaatgtgcctgcttctgttagtatttcagcacagtgcctggcacacatggggctctcaaatattgctgagcgagtgaacaaatgtcctttcaattccttaacgttgatgtcattttcaatagtattttgagccaaacttaattttgcgagtgtgttttgttttcttaactttattattaaaaatgtataaaagtgaggccaggcgtggtggctcacgcctgtaatcccagcagtttgggaggctgaggcaggcggatcagttgaggttgggagttggagaccagcccgtccaacatggtgaaagcctgtctctactaaaaatacaaaaatcagctgggtgtggtggcgcgtgcctgtaatcccagctactcaggaggctgaggcaggagagttgcttgaatcctagaggtggaggttgcagtgagctgagatcgtgccattgcactccagcctgggcaacaagagcaaaactctgtcccaataaataaataaataaaatgttctcttttgttcctgttcttgtgcggtagtgtggtatagagttttatggtaattactgtgaattagtgattctgagggacatatcagaactctgaggtttgtttccttctcatcttgagggaaacagcaaatgtatgttaaaatgcttttccaagggaacaacacatccttacattatttaaaccaatctgcttcattttcagagctggttgatcagagtgagtcagaaggccccgtgatacaagaatcagctgaaccaagccagttggaagttccagccacagaagaaataaaagagactgatggaagctctcagatcaagcaagaaccagaccccacgtggtagacctcttccctcctagggtaaatcagcttctgtgtcagggatgctgtgtggtgtccatctgaaccccctgcatacgcgtagctaatgtgatctccccactttcacataagatggtggccctgccttcagggaatgtgggagccaggtgggagccttcccggatatttaagctagaagattctacagggagattctccttggatcaatatatgtctctcagtcaaagatgtaaaagcacttttgccttaaaaagaatgttctgtttctaaatagagtcaacgttgtcctcctcattggaattcactatgagtcagaatcattagactgacttttttttttccatagtaatagtattttgcagagtctcacagagctgcagatcttttgttcatcttgcagagttaacaagtctgatcctgttagtccagatttcttaaatttggccaagttataataggagcagtagcttgagacccgaagtcaggaaactttgacaatggatttttttttttaatccagagacttgtactggaatttgccttaccctgtcagctcatggacttaaggtttcatcccgctttatgagtgcttctgaatccaagtcattgttacctgaatttgcaaattaagttgtgatattcgtgactgttaaattcctgtaattagattaacctctttgcttgcttgtttgttttctctcctattttagcttaaagtatcagtggttgagaagagcttttcggacctgttactaccccaagctgtgtaatatacttgtataacagaaataccttctatacaaacctttttttctacttttagatagaaatgtctactttttcagcagttctgtgaattaaagagcagagtgactgtgggtctggaatggctggtgtacttgggaatgtactatcaggattttacagcaatgctgggaaatgacagggaaaatgacaggaatgaatctcaccagattttttatgtactcagcagagccttgagttacggtgtttattttccaatcaagtgaagatatctcctacttctcctactggaacatctcagcttctgcagtgaagaaaaattcctgtgatagttcagttctttagtttttctatttgaaaaaaaaaaatcatttaaatgatcctttgttcacggctctccttaatgactgagtgaacagttcctatctgtatatttgactaaaccttttcctaagctatctctcatggttcctatgtttttttatcataattaaaagcaaaaccatctggatcacctaacagtcagaggtcagtatctcagcgtgtgaattatagaggaaatacagagagaacctcttccacttttacttttcgtccaaataaaatgcatggtgtaccagaagttgaagatcgggttgaggattggggctagctcgatgacactaaggccccaacatcgcgggacctgctgtggcgcggattcttaggaacgctgttctagccggccccctctccaggggtcgccgtggccggcattatttcctagttcttcttgtaaccctgaggtgccagcgcggggagtgaggaggggtcagggggctaaggatgcaacctctgacgttctgcgccttcctaggagagtcttacatgtgttgagatttcacaagcaatgcgagttgtaaaataccagctctacaagaagctaggctctgtgacggcatagttttcagtagctttatcacaatattcacaatggagaattatatgacatggtagcagaaataggcccttttatgtgttgcttctattttacctcaaattgtagatatagggtaatcaataaaatccatccatgcctttcacacactaagt

SEQ ID NO: 5033 - protein, 543 aa, Homo sapiens; identical to SEQ ID NO: 4195

SEQ ID NO: 5034 - DNA, 4920 bp, Homo sapiens
gggtcttgttctgtctcccaagctggagtgcagtggtgtggtcataggtcactgcagcgtcgaactcctaggctcaagtgatcctcttgcctcaggctcctgagtagctgggacaacaggcgtgtaccacacctggatactttttaaatttttggtagagaagggatctcactctattgccaagctggtgtcgaactcttggtcttaagcagccctcccacgtcagcatcccaaagtgttgggatttcagagggatcatggcccaagttgcaatgtccaccctccccgttgaagatgaggagtcctcggagagcaggatggtggtgacattcctcatgtcagctctcgagtccatgtgtaaagaactggccaagtccaaagccgaagtggcctgcattgcagtgtatgaaacagacgtgtttgtcgtcggaactgaaagaggacgtgcttttgtcaataccagaaaggattttcaaaaagattttgtaaaatattgtgttgaagaagaagaaaaagctgcagagatgcataaaatgaaatctacaacccaggcaaatcggatgagtgtagatgctgtagaaattgaaacactcagaaaaacagttgaggactatttctgcttttgctatgggaaagctttaggcaaatccacagtggtacctgtaccatatgagaagatgctgcgagaccagtcggctgtggtagtgcaggggcttccggaaggtgttgcctttaaacaccccgagaactatgatcttgcaaccctgaaatggattttggagaacaaagcagggatttcattcatcattaagagaccttttttagagccaaagaagcatgtaggtggtcgtgtgatggtaacagatgctgacaggtcaatactatctccaggtggaagttgtggccccatcaaagtgaaaactgaacccacagaagattctggcatttccctggaaatggcagctgtgacagtaaaggaagaatcagaagatcctgattattatcaatataacattcaaggaagccaccattcttcagagggcaatgaaggcacagaaatggaagtaccagcagaagatgatgattattctccaccgtctaagagaccaaaggccaatgagctaccgcagccaccagtcccggaacccgccaatgctgggaagcggaaagtgagggagttcaacttcgagaaatggaatgctcgcatcactgatctacgtaaacaagttgaagaattgtttgaaaggaaatatgctcaagccataaaagccaaaggtccggtgacgatcccgtaccctcttttccagtctcatgttgaagatctttatgtagaaggacttcctgaaggaattccttttagaaggccatctacttacggaattcctcgcctggagaggatattacttgcaaaggaaaggattcgttttgtgattaagaaacatgagcttctgaattcaacacgtgaagatttacagcttgataagccagcttcaggagtaaaggaagaatggtatgccagaatcactaaattaagaaagatggtggatcagcttttctgcaaaaaatttgcggaagccttggggagcactgaagccaaggctgtaccgtaccaaaaatttgaggcacacccgaatgatctgtacgtggaaggactgccagaaaacattcctttccgaagtccctcatggtatggaatcccaaggctggaaaaaatcattcaagtgggcaatcgaattaaatttgttattaaaagaccagaacttctgactcacagtaccactgaagttactcagccaagaacgaatacaccagtcaaagaagattggaatgtcagaattaccaagctacggaagcaagtggaagagatttttaatttgaaatttgctcaagctcttggactcaccgaggcagtaaaagtaccatatcctgtgtttgaatcaaacccggagttcttgaaaggatcgtccgcgggagtaataaaatcaagttcgttgttaaaaaacctgaactagttatttcctacttgcctcctgggatggctagtaaaataaacactaaagctttgcagtcccccaaaagaccacgaagtcctgggagtaattcaaaggttcctgaaattgaggtcaccgtggaaggccctaataacaacaatcctcaaacctcagctgttcgaaccccgacccagactaacggttctaacgttcccttcaagccacgagggagagagttttcctttgaggcctggaatgccaaaatcacggacctaaaacagaaagttgaaaatctcttcaatgagaaatgtggggaagctcttggccttaaacaagctgtgaaggtgccgttcgcgttatttgagtctttcccggaagacttttatgtggaaggcttacctgagggtgtgccattccgaagaccatcgacttttggcattccgaggctggagaagatactcagaaacaaagccaaaattaagttcatcattaaaaagcccgaaatgtttgagacggcgattaaggagagcacctcctctaagagccctcccagaaaaataaattcatcacccaatgttaatactactgcatcaggtgttgaagaccttaacatcattcaggtgacaattccagatgatgataatgaaagactctcgaaagttgaaaaagctagacagctaagagaacaagtgaatgacctctttagtcggaaatttggtgaagctattggtatgggttttcctgtgaaagttccctacaggaaaatcacaattaaccctggctgtgtggtggttgatggcatgcccccgggggtgtccttcaaagcccccagctacctggaaatcagctccatgagaaggatcttagactctgccgagtttatcaaattcacggtcattagaccatttccaggacttgtgattaataaccagctggttgatcagagtgagtcagaaggccccgtgatacaagaatcagctgaaccaagccagttggaagttccagccacagaagaaataaaagagactgatggaagctctcagatcaagcaagaaccagaccccacgtggtagacctcttccctcctagggtaaatcagcttctgtgtcagggatgctgtgtggtgtccatctgaaccccctgcatacgcgtagctaatgtgatctccccactttcacataagatggtggccctgccttcagggaatgtgggagccaggtgggagccttcccggatatttaagctagaagattctacagggagattctccttggatcaatatatgtctctcagtcaaagatgtaaaagcacttttgccttaaaaagaatgttctgtttctaaatagagtcaacgttgtcctcctcattggaattcactatgagtcagaatcattagactgacttttttttttccatagtaatagtattttgcagagtctcacagagctgcagatcttttgttcatcttgcagagttaacaagtctgatcctgttagtccagatttcttaaatttggccaagttataataggagcagtagcttgagacccgaagtcaggaaactttgacaatggatttttttttttaatccagagacttgtactggaatttgccttaccctgtcagctcatggacttaaggtttcatcccgctttatgagtgcttctgaatccaagtcattgttacctgaatttgcaaattaagttgtgatattcgtgactgttaaattcctgtaattagattaacctctttgcttgcttgtttgttttctctcctattttagcttaaagtatcagtggttgagaagagcttttcggacctgttactaccccaagctgtgtaatatacttgtataacagaaataccttctatacaaacctttttttctacttttagatagaaatgtctactttttcagcagttctgtgaattaaagagcagagtgactgtgggtctggaatggctggtgtacttgggaatgtactatcaggattttacagcaatgctgggaaatgacagggaaaatgacaggaatgaatctcaccagattttttatgtactcagcagagccttgagttacggtgtttattttccaatcaagtgaagatatctcctacttctcctactggaacatctcagcttctgcagtgaagaaaaattcctgtgatagttcagttctttagtttttctatttgaaaaaaaaaaatcatttaaatgatcctttgttcacggctctccttaatgactgagtgaacagttcctatctgtatatttgactaaaccttttcctaagctatctctcatggttcctatgtttttttatcataattaaaagcaaaaccatctggatcacctaacagtcagaggtcagtatctcagcgtgtgaattatagaggaaatacagagagaacctcttccacttttacttttcgtccaaataaaatgcatggtgtaccagaagttgaagatcgggttgaggattggggctagctcgatgacactaaggccccaacatcgcgggacctgctgtggcgcggattcttaggaacgctgttctagccggccccctctccaggggtcgccgtggccggcattatttcctagttcttcttgtaaccctgaggtgccagcgcggggagtgaggaggggtcagggggctaaggatgcaacctctgacgttctgcgccttcctaggagagtcttacatgtgttgagatttcacaagcaatgcgagttgtaaaataccagctctacaagaagctaggctctgtgacggcatagttttcagtagctttatcacaatattcacaatggagaattatatgacatggtagcagaaataggcccttttatgtgttgcttctattttacctcaaattgtagatatagggtaatcaataaaatccatccatgcctttcacacactaagt

SEQ ID NO: 5035 - protein, 584 aa, Homo sapiens; identical to SEQ ID NO: 4173

SEQ ID NO: 5036 - DNA, 5111 bp, Homo sapiens
gggtcttgttctgtctcccaagctggagtgcagtggtgtggtcataggtcactgcagcgtcgaactcctaggctcaagtgatcctcttgcctcaggctcctgagtagctgggacaacaggcgtgtaccacacctggatactttttaaatttttggtagagaagggatctcactctattgccaagctggtgtcgaactcttggtcttaagcagccctcccacgtcagcatcccaaagtgttgggatttcagagggatcatggcccaagttgcaatgtccaccctccccgttgaagatgaggagtcctcggagagcaggatggtggtgacattcctcatgtcagctctcgagtccatgtgtaaagaactggccaagtccaaagccgaagtggcctgcattgcagtgtatgaaacagacgtgtttgtcgtcggaactgaaagaggacgtgcttttgtcaataccagaaaggattttcaaaaagattttgtaaaatattgtgttgaagaagaagaaaaagctgcagagatgcataaaatgaaatctacaacccaggcaaatcggatgagtgtagatgctgtagaaattgaaacactcagaaaaacagttgaggactatttctgcttttgctatgggaaagctttaggcaaatccacagtggtacctgtaccatatgagaagatgctgcgagaccagtcggctgtggtagtgcaggggcttccggaaggtgttgcctttaaacaccccgagaactatgatcttgcaaccctgaaatggattttggagaacaaagcagggatttcattcatcattaagagaccttttttagagccaaagaagcatgtaggtggtcgtgtgatggtaacagatgctgacaggtcaatactatctccaggtggaagttgtggccccatcaaagtgaaaactgaacccacagaagattctggcatttccctggaaatggcagctgtgacagtaaaggaagaatcagaagatcctgattattatcaatataacattcaaggaagccaccattcttcagagggcaatgaaggcacagaaatggaagtaccagcagaagattctactcaacatgtcccttcagaaacaagtgaggaccctgaagttgaggtgactattgaagatgatgattattctccaccgtctaagagaccaaaggccaatgagctaccgcagccaccagtcccggaacccgccaatgctgggaagcggaaagtgagggagttcaacttcgagaaatggaatgctcgcatcactgatctacgtaaacaagttgaagaattgtttgaaaggaaatatgctcaagccataaaagccaaaggtccggtgacgatcccgtaccctcttttccagtctcatgttgaagatctttatgtagaaggacttcctgaaggaattccttttagaaggccatctacttacggaattcctcgcctggagaggatattacttgcaaaggaaaggattcgttttgtgattaagaaacatgagcttctgaattcaacacgtgaagatttacagcttgataagccagcttcaggagtaaaggaagaatggtatgccagaatcactaaattaagaaagatggtggatcagcttttctgcaaaaaatttgcggaagccttggggagcactgaagccaaggctgtaccgtaccaaaaatttgaggcacacccgaatgatctgtacgtggaaggactgccagaaaacattcctttccgaagtccctcatggtatggaatcccaaggctggaaaaaatcattcaagtgggcaatcgaattaaatttgttattaaaagaccagaacttctgactcacagtaccactgaagttactcagccaagaacgaatacaccagtcaaagaagattggaatgtcagaattaccaagctacggaagcaagtggaagagatttttaatttgaaatttgcttagatttgttgacagcggtttcctggagtgctgtcttgagaacgattctgaggaggctcagcaagaaagagtgtttcagttgattgggtgtgtctgtcatggagaaggaactcaagctcttggactcaccgaggcagtaaaagtaccatatcctgtgtttgaatcaaacccggagttcttgtatgtggaaggcttgccagaggggattcccttccgaagccctacctggtttggaattccacgacttgaaaggatcgtccgcgggagtaataaaatcaagttcgttgttaaaaaacctgaactagttatttcctacttgcctcctgggatggctagtaaaataaacactaaagctttgcagtcccccaaaagaccacgaagtcctgggagtaattcaaaggttcctgaaattgaggtcaccgtggaaggccctaataacaacaatcctcaaacctcagctgttcgaaccccgacccagactaacggttctaacgttcccttcaagccacgagggagagagttttcctttgaggcctggaatgccaaaatcacggacctaaaacagaaagttgaaaatctcttcaatgagaaatgtggggaagctcttggccttaaacaagctgtgaaggtgccgttcgcgttatttgagtctttcccggaagacttttatgtggaaggcttacctgagggtgtgccattccgaagaccatcgacttttggcattccgaggctggagaagatactcagaaacaaagccaaaattaagttcatcattaaaaagcccgaaatgtttgagacggcgattaaggagagcacctcctctaagagccctcccagaaaaataaattcatcacccaatgttaatactactgcatcaggtgttgaagaccttaacatcattcaggtgacaattccagatgatgataatgaaagactctcgaaagttgaaaaagctagacagctaagagaacaagtgaatgacctctttagtcggaaatttggtgaagctattggtatgggttttcctgtgaaagttccctacaggaaaatcacaattaaccctggctgtgtggtggttgatggcatgcccccgggggtgtccttcaaagcccccagctacctggaaatcagctccatgagaaggatcttagactctgccgagtttatcaaattcacggtcattagaccatttccaggacttgtgattaataaccagctggttgatcagagtgagtcagaaggccccgtgatacaagaatcagctgaaccaagccagttggaagttccagccacagaaggtaaaaggacctcttccctcctagggtaaatcagcttctgtgtcagggatgctgtgtggtgtccatctgaaccccctgcatacgcgtagctaatgtgatctccccactttcacataagatggtggccctgccttcagggaatgtgggagccaggtgggagccttcccggatatttaagctagaagattctacagggagattctccttggatcaatatatgtctctcagtcaaagatgtaaaagcacttttgccttaaaaagaatgttctgtttctaaatagagtcaacgttgtcctcctcattggaattcactatgagtcagaatcattagactgacttttttttttccatagtaatagtattttgcagagtctcacagagctgcagatcttttgttcatcttgcagagttaacaagtctgatcctgttagtccagatttcttaaatttggccaagttataataggagcagtagcttgagacccgaagtcaggaaactttgacaatggatttttttttttaatccagagacttgtactggaatttgccttaccctgtcagctcatggacttaaggtttcatcccgctttatgagtgcttctgaatccaagtcattgttacctgaatttgcaaattaagttgtgatattcgtgactgttaaattcctgtaattagattaacctctttgcttgcttgtttgttttctctcctattttagcttaaagtatcagtggttgagaagagcttttcggacctgttactaccccaagctgtgtaatatacttgtataacagaaataccttctatacaaacctttttttctacttttagatagaaatgtctactttttcagcagttctgtgaattaaagagcagagtgactgtgggtctggaatggctggtgtacttgggaatgtactatcaggattttacagcaatgctgggaaatgacagggaaaatgacaggaatgaatctcaccagattttttatgtactcagcagagccttgagttacggtgtttattttccaatcaagtgaagatatctcctacttctcctactggaacatctcagcttctgcagtgaagaaaaattcctgtgatagttcagttctttagtttttctatttgaaaaaaaaaaatcatttaaatgatcctttgttcacggctctccttaatgactgagtgaacagttcctatctgtatatttgactaaaccttttcctaagctatctctcatggttcctatgtttttttatcataattaaaagcaaaaccatctggatcacctaacagtcagaggtcagtatctcagcgtgtgaattatagaggaaatacagagagaacctcttccacttttacttttcgtccaaataaaatgcatggtgtaccagaagttgaagatcgggttgaggattggggctagctcgatgacactaaggccccaacatcgcgggacctgctgtggcgcggattcttaggaacgctgttctagccggccccctctccaggggtcgccgtggccggcattatttcctagttcttcttgtaaccctgaggtgccagcgcggggagtgaggaggggtcagggggctaaggatgcaacctctgacgttctgcgccttcctaggagagtcttacatgtgttgagatttcacaagcaatgcgagttgtaaaataccagctctacaagaagctaggctctgtgacggcatagttttcagtagctttatcacaatattcacaatggagaattatatgacatggtagcagaaataggcccttttatgtgttgcttctattttacctcaaattgtagatatagggtaatcaataaaatccatccatgcctttcacacactaagt

SEQ ID NO: 5037 - protein, 564 aa, Homo sapiens; identical to SEQ ID NO: 4061

SEQ ID NO: 5038 - DNA, 4130 bp, Homo sapiens
gggtcttgttctgtctcccaagctggagtgcagtggtgtggtcataggtcactgcagcgtcgaactcctaggctcaagtgatcctcttgcctcaggctcctgagtagctgggacaacaggcgtgtaccacacctggatactttttaaatttttggtagagaagggatctcactctattgccaagctggtgtcgaactcttggtcttaagcagccctcccacgtcagcatcccaaagtgttgggatttcagagggatcatggcccaagttgcaatgtccaccctccccgttgaagatgaggagtcctcggagagcaggatggtggtgacattcctcatgtcagctctcgagtccatgtgtaaagaactggccaagtccaaagccgaagtggcctgcattgcagtgtatgaaacagacgtgtttgtcgtcggaactgaaagaggacgtgcttttgtcaataccagaaaggattttcaaaaagattttgtaaaatattgtgttgaagaagaagaaaaagctgcagagatgcataaaatgaaatctacaacccaggcaaatcggatgagtgtagatgctgtagaaattgaaacactcagaaaaacagttgaggactatttctgcttttgctatgggaaagctttaggcaaatccacagtggtacctgtaccatatgagaagatgctgcgagaccagtcggctgtggtagtgcaggggcttccggaaggtgttgcctttaaacaccccgagaactatgatcttgcaaccctgaaatggattttggagaacaaagcagggatttcattcatcattaagagaccttttttagagccaaagaagcatgtaggtggtcgtgtgatggtaacagatgctgacaggtcaatactatctccaggtggaagttgtggccccatcaaagtgaaaactgaacccacagaagattctggcatttccctggaaatggcagctgtgacagtaaaggaagaatcagaagatcctgattattatcaatataacattcaaggaagccaccattcttcagagggcaatgaaggcacagaaatggaagtaccagcagaagattctactcaacatgtcccttcagaaacaagtgaggaccctgaagttgaggtgactattgaagatgatgattattctccaccgtctaagagaccaaaggccaatgagctaccgcagccaccagtcccggaacccgccaatgctgggaagcggaaagtgagggagttcaacttcgagaaatggaatgctcgcatcactgatctacgtaaacaagttgaagaattgtttgaaaggaaatatgctcaagccataaaagccaaaggtccggtgacgatcccgtaccctcttttccagtctcatgttgaagatctttatgtagaaggacttcctgaaggaattccttttagaaggccatctacttacggaattcctcgcctggagaggatattacttgcaaaggaaaggattcgttttgtgattaagaaacatgagcttctgaattcaacacgtgaagatttacagcttgataagccagcttcaggagtaaaggaagaatggtatgccagaatcactaaattaagaaagatggtggatcagcttttctgcaaaaaatttgcggaagccttggggagcactgaagccaaggctgtaccgtaccaaaaatttgaggcacacccgaatgatctgtacgtggaaggactgccagaaaacattcctttccgaagtccctcatggtatggaatcccaaggctggaaaaaatcattcaagtgggcaatcgaattaaatttgttattaaaagaccagaacttctgactcacagtaccactgaagttactcagccaagaacgaatacaccagtcaaagaagattggaatgtcagaattaccaagctacggaagcaagtggaagagatttttaatttgaaatttgctcaagctcttggactcaccgaggcagtaaaagtaccatatcctgtgtttgaatcaaacccggagttcttgtatgtggaaggcttgccagaggggattcccttccgaagccctacctggtttggaattccacgacttgaaaggatcgtccgcgggagtaataaaatcaagttcgttgttaaaaaacctgaactagttatttcctacttgcctcctgggatggctagtaaaataaacactaaagctttgcagtcccccaaaagaccacgaagtcctgggagtaattcaaaggttcctgaaattgaggtcaccgtggaaggccctaataacaacaatcctcaaacctcagctgttcgaaccccgacccagactaacggttctaacgttcccttcaagccacgagggagagagttttcctttgaggcctggaatgccaaaatcacggacctaaaacagaaagttgaaaatctcttcaatgagaaatgtggggaagctcttggccttaaacaagctgtgaaggtgccgttcgcgttatttgagtctttcccggaagacttttatgtggaaggcttacctgagggtgtgccattccgaagaccatcgacttttggcattccgaggctggagaagatactcagaaacaaagccaaaattaagttcatcattaaaaagcccgaaatgtttgagacggcgattaaggagagcacctcctctaagagccctcccagaaaaataaattcatcacccaatgttaatactactgcatcaggtgttgaagaccttaacatcattcaggtgacaattccagatgatgataatgaaagactctcgaaagttgaaaaagctagacagctaagagaacaagtgaatgacctctttagtcggaaatttggtgaagctattggtatgggttttcctgtgaaagttccctacaggaaaatcacaattaaccctggctgtgtggtggttgatggcatgcccccgggggtgtccttcaaagcccccagctacctggaaatcagctccatgagaaggatcttagactctgccgagtttatcaaattcacggtcattagaccatttccaggacttgtgattaataaccagctggttgatcagagtgagtcagaaggccccgtgatacaagaatcagctgaaccaagccagttggaagttccagccacagaagaaataaaagagactgatggaagctctcagatcaagcaagaaccagaccccacgtggtagacctcttccctcctaggcttaaagtatcagtggttgagaagagcttttcggacctgttactaccccaagctgtagccttgagttacggtgtttattttccaatcaagtgaagatatctcctacttctcctactggaacatctcagcttctgcagtgaagaaaaattcctgtgatagttcagttctttagtttttctatttgaaaaaaaaaaatcatttaaatgatcctttgttcacggctctccttaatgactgagtgaacagttcctatctgtatatttgactaaaccttttcctaagctatctctcatggttcctatgtttttttatcataattaaaagcaaaaccatctggatcacctaacagtcagaggtcagtatctcagcgtgtgaattatagaggaaatacagagagaacctcttccacttttacttttcgtccaaataaaatgcatggtgtaccagaagttgaagatcgggttgaggattggggctagctcgatgacactaaggccccaacatcgcgggacctgctgtggcgcggattcttaggaacgctgttctagccggccccctctccaggggtcgccgtggccggcattatttcctagttcttcttgtaaccctgaggtgccagcgcggggagtgaggaggggtcagggggctaaggatgcaacctctgacgttctgcgccttcctaggagagtcttacatgtgttgagatttcacaagcaatgcgagttgtaaaataccagctctacaagaagctaggctctgtgacggcatagttttcagtagctttatcacaatattcacaatggagaattatatgacatggtagcagaaataggcccttttatgtgttgcttctattttacctcaaattgtagatatagggtaatcaataaaatccatccatgcctttcacacactaagt

SEQ ID NO: 5039 - protein, 978 aa, Homo sapiens; identical to SEQ ID NO: 470

SEQ ID NO: 5040 - DNA, 4358 bp, Homo sapiens
gggtcttgttctgtctcccaagctggagtgcagtggtgtggtcataggtcactgcagcgtcgaactcctaggctcaagtgatcctcttgcctcaggctcctgagtagctgggacaacaggcgtgtaccacacctggatactttttaaatttttggtagagaagggatctcactctattgccaagctggtgtcgaactcttggtcttaagcagccctcccacgtcagcatcccaaagtgttgggatttcagagggatcatggcccaagttgcaatgtccaccctccccgttgaagatgaggagtcctcggagagcaggatggtggtgacattcctcatgtcagctctcgagtccatgtgtaaagaactggccaagtccaaagccgaagtggcctgcattgcagtgtatgaaacagacgtgtttgtcgtcggaactgaaagaggacgtgcttttgtcaataccagaaaggattttcaaaaagattttgtaaaatattgtgttgaagaagaagaaaaagctgcagagatgcataaaatgaaatctacaacccaggcaaatcggatgagtgtagatgctgtagaaattgaaacactcagaaaaacagttgaggactatttctgcttttgctatgggaaagctttaggcaaatccacagtggtacctgtaccatatgagaagatgctgcgagaccagtcggctgtggtagtgcaggggcttccggaaggtgttgcctttaaacaccccgagaactatgatcttgcaaccctgaaatggattttggagaacaaagcagggatttcattcatcattaagagaccttttttagagccaaagaagcatgtaggtggtcgtgtgatggtaacagatgctgacaggtcaatactatctccaggtggaagttgtggccccatcaaagtgaaaactgaacccacagaagattctggcatttccctggaaatggcagctgtgacagtaaaggaagaatcagaagatcctgattattatcaatataacattcaaggaagccaccattcttcagagggcaatgaaggcacagaaatggaagtaccagcagaagattctactcaacatgtcccttcagaaacaagtgaggaccctgaagttgaggtgactattgaagatgatgattattctccaccgtctaagagaccaaaggccaatgagctaccgcagccaccagtcccggaacccgccaatgctgggaagcggaaagtgagggagttcaacttcgagaaatggaatgctcgcatcactgatctacgtaaacaagttgaagaattgtttgaaaggaaatatgctcaagccataaaagccaaaggtccggtgacgatcccgtaccctcttttccagtctcatgttgaagatctttatgtagaaggacttcctgaaggaattccttttagaaggccatctacttacggaattcctcgcctggagaggatattacttgcaaaggaaaggattcgttttgtgattaagaaacatgagcttctgaattcaacacgtgaagatttacagcttgataagccagcttcaggagtaaaggaagaatggtatgccagaatcactaaattaagaaagatggtggatcagcttttctgcaaaaaatttgcggaagccttggggagcactgaagccaaggctgtaccgtaccaaaaatttgaggcacacccgaatgatctgtacgtggaaggactgccagaaaacattcctttccgaagtccctcatggtatggaatcccaaggctggaaaaaatcattcaagtgggcaatcgaattaaatttgttattaaaagaccagaacttctgactcacagtaccactgaagttactcagccaagaacgaatacaccagtcaaagaagattggaatgtcagaattaccaagctacggaagcaagtggaagagatttttaatttgaaatttgctcaagctcttggactcaccgaggcagtaaaagtaccatatcctgtgtttgaatcaaacccggagttcttgtatgtggaaggcttgccagaggggattcccttccgaagccctacctggtttggaattccacgacttgaaaggatcgtccgcgggagtaataaaatcaagttcgttgttaaaaaacctgaactagttatttcctacttgcctcctgggatggctagtaaaataaacactaaagctttgcagtcccccaaaagaccacgaagtcctgggagtaattcaaaggttcctgaaattgaggtcaccgtggaaggccctaataacaacaatcctcaaacctcagctgttcgaaccccgacccagactaacggttctaacgttcccttcaagccacgagggagagagttttcctttgaggcctggaatgccaaaatcacggacctaaaacagaaagttgaaaatctcttcaatgagaaatgtggggaagctcttggccttaaacaagctgtgaaggtgccgttcgcgttatttgagtctttcccggaagacttttatgtggaaggcttacctgagggtgtgccattccgaagaccatcgacttttggcattccgaggctggagaagatactcagaaacaaagccaaaattaagttcatcattaaaaagcccgaaatgtttgagacggcgattaaggagagcacctcctctaagagccctcccagaaaaataaattcatcacccaatgttaatactactgcatcaggtgttgaagaccttaacatcattcaggtgacaattccagatgatgataatgaaagactctcgaaagttgaaaaagctagacagctaagagaacaagtgaatgacctctttagtcggaaatttggtgaagctattggtatgggttttcctgtgaaagttccctacaggaaaatcacaattaaccctggctgtgtggtggttgatggcatgcccccgggggtgtccttcaaagcccccagctacctggaaatcagctccatgagaaggatcttagactctgccgagtttatcaaattcacggtcattagaccatttccaggacttgtgattaataaccagctggttgatcagagtgagtcagaaggccccgtgatacaagaatcagctgaaccaagccagttggaagttccagccacagaagaaataaaagagactgatggaagctctcagatcaagcaagaaccagaccccacgtggtagacctcttccctcctaggcttaaagtatcagtggttgagaagagcttttcggacctgttactaccccaagctgtgtaatatacttgtataacagaaataccttctatacaaacctttttttctacttttagatagaaatgtctactttttcagcagttctgtgaattaaagagcagagtgactgtgggtctggaatggctggtgtacttgggaatgtactatcaggattttacagcaatgctgggaaatgacagggaaaatgacaggaatgaatctcaccagattttttatgtactcagcagagccttgagttacggtgtttattttccaatcaagtgaagatatctcctacttctcctactggaacatctcagcttctgcagtgaagaaaaattcctgtgatagttcagttctttagtttttctatttgaaaaaaaaaaatcatttaaatgatcctttgttcacggctctccttaatgactgagtgaacagttcctatctgtatatttgactaaaccttttcctaagctatctctcatggttcctatgtttttttatcataattaaaagcaaaaccatctggatcacctaacagtcagaggtcagtatctcagcgtgtgaattatagaggaaatacagagagaacctcttccacttttacttttcgtccaaataaaatgcatggtgtaccagaagttgaagatcgggttgaggattggggctagctcgatgacactaaggccccaacatcgcgggacctgctgtggcgcggattcttaggaacgctgttctagccggccccctctccaggggtcgccgtggccggcattatttcctagttcttcttgtaaccctgaggtgccagcgcggggagtgaggaggggtcagggggctaaggatgcaacctctgacgttctgcgccttcctaggagagtcttacatgtgttgagatttcacaagcaatgcgagttgtaaaataccagctctacaagaagctaggctctgtgacggcatagttttcagtagctttatcacaatattcacaatggagaattatatgacatggtagcagaaataggcccttttatgtgttgcttctattttacctcaaattgtagatatagggtaatcaataaaatccatccatgcctttcacacactaagt

SEQ ID NO: 5041 - protein, 978 aa, Homo sapiens; identical to SEQ ID NO: 470

SEQ ID NO: 5042 - DNA, 4987 bp, Homo sapiens
gggtcttgttctgtctcccaagctggagtgcagtggtgtggtcataggtcactgcagcgtcgaactcctaggctcaagtgatcctcttgcctcaggctcctgagtagctgggacaacaggcgtgtaccacacctggatactttttaaatttttggtagagaagggatctcactctattgccaagctggtgtcgaactcttggtcttaagcagccctcccacgtcagcatcccaaagtgttgggatttcagagggatcatggcccaagttgcaatgtccaccctccccgttgaagatgaggagtcctcggagagcaggatggtggtgacattcctcatgtcagctctcgagtccatgtgtaaagaactggccaagtccaaagccgaagtggcctgcattgcagtgtatgaaacagacgtgtttgtcgtcggaactgaaagaggacgtgcttttgtcaataccagaaaggattttcaaaaagattttgtaaaatattgtgttgaagaagaagaaaaagctgcagagatgcataaaatgaaatctacaacccaggcaaatcggatgagtgtagatgctgtagaaattgaaacactcagaaaaacagttgaggactatttctgcttttgctatgggaaagctttaggcaaatccacagtggtacctgtaccatatgagaagatgctgcgagaccagtcggctgtggtagtgcaggggcttccggaaggtgttgcctttaaacaccccgagaactatgatcttgcaaccctgaaatggattttggagaacaaagcagggatttcattcatcattaagagaccttttttagagccaaagaagcatgtaggtggtcgtgtgatggtaacagatgctgacaggtcaatactatctccaggtggaagttgtggccccatcaaagtgaaaactgaacccacagaagattctggcatttccctggaaatggcagctgtgacagtaaaggaagaatcagaagatcctgattattatcaatataacattcaagcaggcccttctgaaactgatgatgttgatgaaaaacagcccctatcgaagcctttgcaaggaagccaccattcttcagagggcaatgaaggcacagaaatggaagtaccagcagaagattctactcaacatgtcccttcagaaacaagtgaggaccctgaagttgaggtgactattgaagatgatgattattctccaccgtctaagagaccaaaggccaatgagctaccgcagccaccagtcccggaacccgccaatgctgggaagcggaaagtgagggagttcaacttcgagaaatggaatgctcgcatcactgatctacgtaaacaagttgaagaattgtttgaaaggaaatatgctcaagccataaaagccaaaggtccggtgacgatcccgtaccctcttttccagtctcatgttgaagatctttatgtagaaggacttcctgaaggaattccttttagaaggccatctacttacggaattcctcgcctggagaggatattacttgcaaaggaaaggattcgttttgtgattaagaaacatgagcttctgaattcaacacgtgaagatttacagcttgataagccagcttcaggagtaaaggaagaatggtatgccagaatcactaaattaagaaagatggtggatcagcttttctgcaaaaaatttgcggaagccttggggagcactgaagccaaggctgtaccgtaccaaaaatttgaggcacacccgaatgatctgtacgtggaaggactgccagaaaacattcctttccgaagtccctcatggtatggaatcccaaggctggaaaaaatcattcaagtgggcaatcgaattaaatttgttattaaaagaccagaacttctgactcacagtaccactgaagttactcagccaagaacgaatacaccagctcaagctcttggactcaccgaggcagtaaaagtaccatatcctgtgtttgaatcaaacccggagttcttgtatgtggaaggcttgccagaggggattcccttccgaagccctacctggtttggaattccacgacttgaaaggatcgtccgcgggagtaataaaatcaagttcgttgttaaaaaacctgaactagttatttcctacttgcctcctgggatggctagtaaaataaacactaaagctttgcagtcccccaaaagaccacgaagtcctgggagtaattcaaaggttcctgaaattgaggtcaccgtggaaggccctaataacaacaatcctcaaacctcagctgttcgaaccccgacccagactaacggttctaacgttcccttcaagccacgagggagagagttttcctttgaggcctggaatgccaaaatcacggacctaaaacagaaagttgaaaatctcttcaatgagaaatgtggggaagctcttggccttaaacaagctgtgaaggtgccgttcgcgttatttgagtctttcccggaagacttttatgtggaaggcttacctgagggtgtgccattccgaagaccatcgacttttggcattccgaggctggagaagatactcagaaacaaagccaaaattaagttcatcattaaaaagcccgaaatgtttgagacggcgattaaggagagcacctcctctaagagccctcccagaaaaataaattcatcacccaatgttaatactactgcatcaggtgttgaagaccttaacatcattcaggtgacaattccagatgatgataatgaaagactctcgaaagttgaaaaagctagacagctaagagaacaagtgaatgacctctttagtcggaaatttggtgaagctattggtatgggttttcctgtgaaagttccctacaggaaaatcacaattaaccctggctgtgtggtggttgatggcatgcccccgggggtgtccttcaaagcccccagctacctggaaatcagctccatgagaaggatcttagactctgccgagtttatcaaattcacggtcattagaccatttccaggacttgtgattaataaccagctggttgatcagagtgagtcagaaggccccgtgatacaagaatcagctgaaccaagccagttggaagttccagccacagaaggtaaaaggacctcttccctcctagggtaaatcagcttctgtgtcagggatgctgtgtggtgtccatctgaaccccctgcatacgcgtagctaatgtgatctccccactttcacataagatggtggccctgccttcagggaatgtgggagccaggtgggagccttcccggatatttaagctagaagattctacagggagattctccttggatcaatatatgtctctcagtcaaagatgtaaaagcacttttgccttaaaaagaatgttctgtttctaaatagagtcaacgttgtcctcctcattggaattcactatgagtcagaatcattagactgacttttttttttccatagtaatagtattttgcagagtctcacagagctgcagatcttttgttcatcttgcagagttaacaagtctgatcctgttagtccagatttcttaaatttggccaagttataataggagcagtagcttgagacccgaagtcaggaaactttgacaatggatttttttttttaatccagagacttgtactggaatttgccttaccctgtcagctcatggacttaaggtttcatcccgctttatgagtgcttctgaatccaagtcattgttacctgaatttgcaaattaagttgtgatattcgtgactgttaaattcctgtaattagattaacctctttgcttgcttgtttgttttctctcctattttagcttaaagtatcagtggttgagaagagcttttcggacctgttactaccccaagctgtgtaatatacttgtataacagaaataccttctatacaaacctttttttctacttttagatagaaatgtctactttttcagcagttctgtgaattaaagagcagagtgactgtgggtctggaatggctggtgtacttgggaatgtactatcaggattttacagcaatgctgggaaatgacagggaaaatgacaggaatgaatctcaccagattttttatgtactcagcagagccttgagttacggtgtttattttccaatcaagtgaagatatctcctacttctcctactggaacatctcagcttctgcagtgaagaaaaattcctgtgatagttcagttctttagtttttctatttgaaaaaaaaaaatcatttaaatgatcctttgttcacggctctccttaatgactgagtgaacagttcctatctgtatatttgactaaaccttttcctaagctatctctcatggttcctatgtttttttatcataattaaaagcaaaaccatctggatcacctaacagtcagaggtcagtatctcagcgtgtgaattatagaggaaatacagagagaacctcttccacttttacttttcgtccaaataaaatgcatggtgtaccagaagttgaagatcgggttgaggattggggctagctcgatgacactaaggccccaacatcgcgggacctgctgtggcgcggattcttaggaacgctgttctagccggccccctctccaggggtcgccgtggccggcattatttcctagttcttcttgtaaccctgaggtgccagcgcggggagtgaggaggggtcagggggctaaggatgcaacctctgacgttctgcgccttcctaggagagtcttacatgtgttgagatttcacaagcaatgcgagttgtaaaataccagctctacaagaagctaggctctgtgacggcatagttttcagtagctttatcacaatattcacaatggagaattatatgacatggtagcagaaataggcccttttatgtgttgcttctattttacctcaaattgtagatatagggtaatcaataaaatccatccatgcctttcacacactaagt

SEQ ID NO: 5043 - protein, 964 aa, Homo sapiens; identical to SEQ ID NO: 4743

SEQ ID NO: 5044 - DNA, 4929 bp, Homo sapiens
gggtcttgttctgtctcccaagctggagtgcagtggtgtggtcataggtcactgcagcgtcgaactcctaggctcaagtgatcctcttgcctcaggctcctgagtagctgggacaacaggcgtgtaccacacctggatactttttaaatttttggtagagaagggatctcactctattgccaagctggtgtcgaactcttggtcttaagcagccctcccacgtcagcatcccaaagtgttgggatttcagagggatcatggcccaagttgcaatgtccaccctccccgttgaagatgaggagtcctcggagagcaggatggtggtgacattcctcatgtcagctctcgagtccatgtgtaaagaactggccaagtccaaagccgaagtggcctgcattgcagtgtatgaaacagacgtgtttgtcgtcggaactgaaagaggacgtgcttttgtcaataccagaaaggattttcaaaaagattttgtaaaatattgtgttgaagaagaagaaaaagctgcagagatgcataaaatgaaatctacaacccaggcaaatcggatgagtgtagatgctgtagaaattgaaacactcagaaaaacagttgaggactatttctgcttttgctatgggaaagctttaggcaaatccacagtggtacctgtaccatatgagaagatgctgcgagaccagtcggctgtggtagtgcaggggcttccggaaggtgttgcctttaaacaccccgagaactatgatcttgcaaccctgaaatggattttggagaacaaagcagggatttcattcatcattaagagaccttttttagagccaaagaagcatgtaggtggtcgtgtgatggtaacagatgctgacaggtcaatactatctccaggtggaagttgtggccccatcaaagtgaaaactgaacccacagaagattctggcatttccctggaaatggcagctgtgacagtaaaggaagaatcagaagatcctgattattatcaatataacattcaagcaggcccttctgaaactgatgatgttgatgaaaaacagcccctatcgaagcctttgcaaggaagccaccattcttcagagggcaatgaaggcacagaaatggaagtaccagcagaagatgatgattattctccaccgtctaagagaccaaaggccaatgagctaccgcagccaccagtcccggaacccgccaatgctgggaagcggaaagtgagggagttcaacttcgagaaatggaatgctcgcatcactgatctacgtaaacaagttgaagaattgtttgaaaggaaatatgctcaagccataaaagccaaaggtccggtgacgatcccgtaccctcttttccagtctcatgttgaagatctttatgtagaaggacttcctgaaggaattccttttagaaggccatctacttacggaattcctcgcctggagaggatattacttgcaaaggaaaggattcgttttgtgattaagaaacatgagcttctgaattcaacacgtgaagatttacagcttgataagccagcttcaggagtaaaggaagaatggtatgccagaatcactaaattaagaaagatggtggatcagcttttctgcaaaaaatttgcggaagccttggggagcactgaagccaaggctgtaccgtaccaaaaatttgaggcacacccgaatgatctgtacgtggaaggactgccagaaaacattcctttccgaagtccctcatggtatggaatcccaaggctggaaaaaatcattcaagtgggcaatcgaattaaatttgttattaaaagaccagaacttctgactcacagtaccactgaagttactcagccaagaacgaatacaccagtcaaagaagattggaatgtcagaattaccaagctacggaagcaagtggaagagatttttaatttgaaatttgctcaagctcttggactcaccgaggcagtaaaagtaccatatcctgtgtttgaatcaaacccggagttcttgaaaggatcgtccgcgggagtaataaaatcaagttcgttgttaaaaaacctgaactagttatttcctacttgcctcctgggatggctagtaaaataaacactaaagctttgcagtcccccaaaagaccacgaagtcctgggagtaattcaaaggttcctgaaattgaggtcaccgtggaaggccctaataacaacaatcctcaaacctcagctgttcgaaccccgacccagactaacggttctaacgttcccttcaagccacgagggagagagttttcctttgaggcctggaatgccaaaatcacggacctaaaacagaaagttgaaaatctcttcaatgagaaatgtggggaagctcttggccttaaacaagctgtgaaggtgccgttcgcgttatttgagtctttcccggaagacttttatgtggaaggcttacctgagggtgtgccattccgaagaccatcgacttttggcattccgaggctggagaagatactcagaaacaaagccaaaattaagttcatcattaaaaagcccgaaatgtttgagacggcgattaaggagagcacctcctctaagagccctcccagaaaaataaattcatcacccaatgttaatactactgcatcaggtgttgaagaccttaacatcattcaggtgacaattccagatgatgataatgaaagactctcgaaagttgaaaaagctagacagctaagagaacaagtgaatgacctctttagtcggaaatttggtgaagctattggtatgggttttcctgtgaaagttccctacaggaaaatcacaattaaccctggctgtgtggtggttgatggcatgcccccgggggtgtccttcaaagcccccagctacctggaaatcagctccatgagaaggatcttagactctgccgagtttatcaaattcacggtcattagaccatttccaggacttgtgattaataaccagctggttgatcagagtgagtcagaaggccccgtgatacaagaatcagctgaaccaagccagttggaagttccagccacagaaggtaaaaggacctcttccctcctagggtaaatcagcttctgtgtcagggatgctgtgtggtgtccatctgaaccccctgcatacgcgtagctaatgtgatctccccactttcacataagatggtggccctgccttcagggaatgtgggagccaggtgggagccttcccggatatttaagctagaagattctacagggagattctccttggatcaatatatgtctctcagtcaaagatgtaaaagcacttttgccttaaaaagaatgttctgtttctaaatagagtcaacgttgtcctcctcattggaattcactatgagtcagaatcattagactgacttttttttttccatagtaatagtattttgcagagtctcacagagctgcagatcttttgttcatcttgcagagttaacaagtctgatcctgttagtccagatttcttaaatttggccaagttataataggagcagtagcttgagacccgaagtcaggaaactttgacaatggatttttttttttaatccagagacttgtactggaatttgccttaccctgtcagctcatggacttaaggtttcatcccgctttatgagtgcttctgaatccaagtcattgttacctgaatttgcaaattaagttgtgatattcgtgactgttaaattcctgtaattagattaacctctttgcttgcttgtttgttttctctcctattttagcttaaagtatcagtggttgagaagagcttttcggacctgttactaccccaagctgtgtaatatacttgtataacagaaataccttctatacaaacctttttttctacttttagatagaaatgtctactttttcagcagttctgtgaattaaagagcagagtgactgtgggtctggaatggctggtgtacttgggaatgtactatcaggattttacagcaatgctgggaaatgacagggaaaatgacaggaatgaatctcaccagattttttatgtactcagcagagccttgagttacggtgtttattttccaatcaagtgaagatatctcctacttctcctactggaacatctcagcttctgcagtgaagaaaaattcctgtgatagttcagttctttagtttttctatttgaaaaaaaaaaatcatttaaatgatcctttgttcacggctctccttaatgactgagtgaacagttcctatctgtatatttgactaaaccttttcctaagctatctctcatggttcctatgtttttttatcataattaaaagcaaaaccatctggatcacctaacagtcagaggtcagtatctcagcgtgtgaattatagaggaaatacagagagaacctcttccacttttacttttcgtccaaataaaatgcatggtgtaccagaagttgaagatcgggttgaggattggggctagctcgatgacactaaggccccaacatcgcgggacctgctgtggcgcggattcttaggaacgctgttctagccggccccctctccaggggtcgccgtggccggcattatttcctagttcttcttgtaaccctgaggtgccagcgcggggagtgaggaggggtcagggggctaaggatgcaacctctgacgttctgcgccttcctaggagagtcttacatgtgttgagatttcacaagcaatgcgagttgtaaaataccagctctacaagaagctaggctctgtgacggcatagttttcagtagctttatcacaatattcacaatggagaattatatgacatggtagcagaaataggcccttttatgtgttgcttctattttacctcaaattgtagatatagggtaatcaataaaatccatccatgcctttcacacactaagt

SEQ ID NO: 5045 - protein, 604 aa, Homo sapiens; identical to SEQ ID NO: 4117

SEQ ID NO: 5046 - DNA, 7119 bp, Homo sapiens
gggtcttgttctgtctcccaagctggagtgcagtggtgtggtcataggtcactgcagcgtcgaactcctaggctcaagtgatcctcttgcctcaggctcctgagtagctgggacaacaggcgtgtaccacacctggatactttttaaatttttggtagagaagggatctcactctattgccaagctggtgtcgaactcttggtcttaagcagccctcccacgtcagcatcccaaagtgttgggatttcagagggatcatggcccaagttgcaatgtccaccctccccgttgaagatgaggagtcctcggagagcaggatggtggtgacattcctcatgtcagctctcgagtccatgtgtaaagaactggccaagtccaaagccgaagtggcctgcattgcagtgtatgaaacagacgtgtttgtcgtcggaactgaaagaggacgtgcttttgtcaataccagaaaggattttcaaaaagattttgtaaaatattgtgttgaagaagaagaaaaagctgcagagatgcataaaatgaaatctacaacccaggcaaatcggatgagtgtagatgctgtagaaattgaaacactcagaaaaacagttgaggactatttctgcttttgctatgggaaagctttaggcaaatccacagtggtacctgtaccatatgagaagatgctgcgagaccagtcggctgtggtagtgcaggggcttccggaaggtgttgcctttaaacaccccgagaactatgatcttgcaaccctgaaatggattttggagaacaaagcagggatttcattcatcattaagagaccttttttagagccaaagaagcatgtaggtggtcgtgtgatggtaacagatgctgacaggtcaatactatctccaggtggaagttgtggccccatcaaagtgaaaactgaacccacagaagattctggcatttccctggaaatggcagctgtgacagtaaaggaagaatcagaagatcctgattattatcaatataacattcaaggaagccaccattcttcagagggcaatgaaggcacagaaatggaagtaccagcagaagattctactcaacatgtcccttcagaaacaagtgaggaccctgaagttgaggtgactattgaagatgatgattattctccaccgtctaagagaccaaaggccaatgagctaccgcagccaccagtcccggaacccgccaatgctgggaagcggaaagtgagggagttcaacttcgagaaatggaatgctcgcatcactgatctacgtaaacaagttgaagaattgtttgaaaggaaatatgctcaagccataaaagccaaaggtccggtgacgatcccgtaccctcttttccagtctcatgttgaagatctttatgtagaaggacttcctgaaggaattccttttagaaggccatctacttacggaattcctcgcctggagaggatattacttgcaaaggaaaggattcgttttgtgattaagaaacatgagcttctgaattcaacacgtgaagatttacagcttgataagccagcttcaggagtaaaggaagaatggtatgccagaatcactaaattaagaaagatggtggatcagcttttctgcaaaaaatttgcggaagccttggggagcactgaagccaaggctgtaccgtaccaaaaatttgaggcacacccgaatgatctgtacgtggaaggactgccagaaaacattcctttccgaagtccctcatggtatggaatcccaaggctggaaaaaatcattcaagtgggcaatcgaattaaatttgttattaaaagaccagaacttctgactcacagtaccactgaagttactcagccaagaacgaatacaccagtcaaagaagattggaatgtcagaattaccaagctacggaagcaagtggaagagatttttaatttgaaatttgctcaagctcttggactcaccgaggcagtaaaagtaccatatcctgtgtttgaatcaaacccggagttcttgtatgtggaaggcttgccagaggggattcccttccgaagccctacctggtttggaattccacgacttgaaaggatcgtccgcgggagtaataaaatcaagttcgttgttaaaaaacctgaactagttatttcctacttgcctcctgggatggctagtaaaataaacactaaagctttgcagtcccccaaaagaccacgaagtcctgggagtaattcaaaggttcctgaaattgaggtcaccgtggaaggccctaataacaacaatcctcaaacctcagctgttcgaaccccgacccagactaacggttctaacgttcccttcaagccacgagggagagagttttcctttgaggcctggaatgccaaaatcacggacctaaaacagaaagttgaaaatctcttcaatgagaaatgtggggaagctcttggccttaaacaagctgtgaaggtgccgttcgcgttatttgagtctttcccggaagacttttatgtggaaggcttacctgagggtgtgccattccgaagaccatcgacttttggcattccgaggctggagaagatactcagaaacaaagccaaaattaagttcatcattaaaaagcccgaaatgtttgagacggcgattaaggagagcacctcctctaagagccctcccagaaaaataaattcatcacccaatgttaatactactgcatcaggtgttgaagaccttaacatcattcaggtgacaattccagatgatgataatgaaagactctcgaaagttgaaaaagctagacagctaagagaacaagtgaatgacctctttagtcggaaatttggtgaagctattggtatgggttttcctgtgaaagttccctacaggaaaatcacaattaaccctggctgtgtggtggttgatggcatgcccccgggggtgtccttcaaagcccccagctacctggaaatcagctccatgagaaggatcttagactctgccgagtttatcaaattcacggtcattaggtaagtgagagtttcctgcttagtcacaggagcgaatctggagctcatgaggctgactcttctaaaatgcagccacaggtagtcatcgaatccggcttcctatgctgtgcaatcaacaaatcaaaataacttgtgtcatcattagaatgtcagatgtgcttctacgaactaagctgactcttttaattctttggcaaagggttggcaaactaggactgtttgccaaattcaggctgcctcctatttttagagtcttcctgaaacacagctacacccgtattatccatggctgctttcctgtcacagtgagtaagtagctgggactgagaaggcatggcctccaaagtctaaaatatttactctctagcactttgtagaaaaaccttagctaggcacagtggctaacgcctgtaatcccagcattttgggaggccaaggcaggcagatcacctgaggtcaggagttccagaccagcctggccaacatggtgaaatcccatctctacaaaaataaaacagttagctgggcatgatggcgggtgcctgtaatcccagctactcgggaggctgaggcaggatagtcgcttgaacccaggaggtggaggttgcaatgagccaagatcatgccactgcactccagcctggacgacagagtgagactccatcacaagaaaaaaagaactttgtcaacctctgtcttagggcgccttgtcacaggcttcgggtcagacggattcaaccttgcatcagccatttgttagccaggtcactctgttctttgtctgtaaatgagattgatcgttgttcccactgagagtgtcagctccttcccgtagagcaggcatgatgattgtactcacctctgacaccattgtgagtgccacattccttcccacgtccttgtcactgtaagagatgcccacctgagcaccaaccccaggttatcttcccctttgtcttccagccccccagaaacagctacgactcaacctacccaatcatttcatcatcagattgccactgtctctagttcaggtctcttgggactggcactcagaaatctcataataaatcctcttgaggcttctcatacactcgtcttcttccaatcttctttccctcaaaatctcatattttggttccacttcacccaccgtcattctccatatcactcccaggagttaggcaaaaagccccttccgttcttccgtatgttaaacttagaatcactctgttccctgctctgcgtttctattttttgtttttcctccatttactagtagcttaacactttctaacagtgttcttattattgatacgtatctatctcttccataagcttataaggtcacggataatacttctcattgtagtacgtaaatgacgtgggctagatatgagttgaataaacagttatacctgtaaattcttacagagtgaaaataaattgttatactttacaatttgtttctctctttagaccatttccaggacttgtgattaataaccgtgagtattttgtgaagtgttttgtttttgttttttcctggggtctgacgtgtgtgcgtgtgagtgtgtatacatgcttaacgtatatcacgttacttcacctatgtcagtaaccaggccaaatacttgttttagccctcagtaaaaacaccaggcacttcctagttgtaaaattattcaagcttcttaacttcctatcctcgatgcacttaatcataaaatggtaataatagcaccgattttgggggagtcgttccagtagatggaaagcatctggaacaggtgtcagcaagctcctgccgacgtgtatgcataaagttttattgaaaccaccatcgtgtccatttgtttatggcagaactgagagatggcagcagcaagtgtgtgcctgcaaaacctaaaatatttactaattggctctgcaagaaaagagtttgcatccccctaacctagaacagtgtctagcctctagtatgtgtttagcctacagtatgtgctcagcgaatacaatctatatttattactgcttttatgactgttataattactgtgcttggatttcgttacaaagtaagtcacaatgtgcctgcttctgttagtatttcagcacagtgcctggcacacatggggctctcaaatattgctgagcgagtgaacaaatgtcctttcaattccttaacgttgatgtcattttcaatagtattttgagccaaacttaattttgcgagtgtgttttgttttcttaactttattattaaaaatgtataaaagtgaggccaggcgtggtggctcacgcctgtaatcccagcagtttgggaggctgaggcaggcggatcagttgaggttgggagttggagaccagcccgtccaacatggtgaaagcctgtctctactaaaaatacaaaaatcagctgggtgtggtggcgcgtgcctgtaatcccagctactcaggaggctgaggcaggagagttgcttgaatcctagaggtggaggttgcagtgagctgagatcgtgccattgcactccagcctgggcaacaagagcaaaactctgtcccaataaataaataaataaaatgttctcttttgttcctgttcttgtgcggtagtgtggtatagagttttatggtaattactgtgaattagtgattctgagggacatatcagaactctgaggtttgtttccttctcatcttgagggaaacagcaaatgtatgttaaaatgcttttccaagggaacaacacatccttacattatttaaaccaatctgcttcattttcagagctggttgatcagagtgagtcagaaggccccgtgatacaagaatcagctgaaccaagccagttggaagttccagccacagaagaaataaaagagactgatggaagctctcagatcaagcaagaaccagaccccacgtggtagacctcttccctcctaggcttaaagtatcagtggttgagaagagcttttcggacctgttactaccccaagctgtgtaatatacttgtataacagaaataccttctatacaaacctttttttctacttttagatagaaatgtctactttttcagcagttctgtgaattaaagagcagagtgactgtgggtctggaatggctggtgtacttgggaatgtactatcaggattttacagcaatgctgggaaatgacagggaaaatgacaggaatgaatctcaccagattttttatgtactcagcagagccttgagttacggtgtttattttccaatcaagtgaagatatctcctacttctcctactggaacatctcagcttctgcagtgaagaaaaattcctgtgatagttcagttctttagtttttctatttgaaaaaaaaaaatcatttaaatgatcctttgttcacggctctccttaatgactgagtgaacagttcctatctgtatatttgactaaaccttttcctaagctatctctcatggttcctatgtttttttatcataattaaaagcaaaaccatctggatcacctaacagtcagaggtcagtatctcagcgtgtgaattatagaggaaatacagagagaacctcttccacttttacttttcgtccaaataaaatgcatggtgtaccagaagttgaagatcgggttgaggattggggctagctcgatgacactaaggccccaacatcgcgggacctgctgtggcgcggattcttaggaacgctgttctagccggccccctctccaggggtcgccgtggccggcattatttcctagttcttcttgtaaccctgaggtgccagcgcggggagtgaggaggggtcagggggctaaggatgcaacctctgacgttctgcgccttcctaggagagtcttacatgtgttgagatttcacaagcaatgcgagttgtaaaataccagctctacaagaagctaggctctgtgacggcatagttttcagtagctttatcacaatattcacaatggagaattatatgacatggtagcagaaataggcccttttatgtgttgcttctattttacctcaaattgtagatatagggtaatcaataaaatccatccatgcctttcacacactaagt

SEQ ID NO: 5047 - protein, 922 aa, Homo sapiens; identical to SEQ ID NO: 4059

SEQ ID NO: 5048 - DNA, 7733 bp, Homo sapiens
gggtcttgttctgtctcccaagctggagtgcagtggtgtggtcataggtcactgcagcgtcgaactcctaggctcaagtgatcctcttgcctcaggctcctgagtagctgggacaacaggcgtgtaccacacctggatactttttaaatttttggtagagaagggatctcactctattgccaagctggtgtcgaactcttggtcttaagcagccctcccacgtcagcatcccaaagtgttgggatttcagagggatcatggcccaagttgcaatgtccaccctccccgttgaagatgaggagtcctcggagagcaggatggtggtgacattcctcatgtcagctctcgagtccatgtgtaaagaactggccaagtccaaagccgaagtggcctgcattgcagtgtatgaaacagacgtgtttgtcgtcggaactgaaagaggacgtgcttttgtcaataccagaaaggattttcaaaaagattttgtaaaatattgtgttgaagaagaagaaaaagctgcagagatgcataaaatgaaatctacaacccaggcaaatcggatgagtgtagatgctgtagaaattgaaacactcagaaaaacagttgaggactatttctgcttttgctatgggaaagctttaggcaaatccacagtggtacctgtaccatatgagaagatgctgcgagaccagtcggctgtggtagtgcaggggcttccggaaggtgttgcctttaaacaccccgagaactatgatcttgcaaccctgaaatggattttggagaacaaagcagggatttcattcatcattaagagaccttttttagagccaaagaagcatgtaggtggtcgtgtgatggtaacagatgctgacaggtcaatactatctccaggtggaagttgtggccccatcaaagtgaaaactgaacccacagaagattctggaagccaccattcttcagagggcaatgaaggcacagaaatggaagtaccagcagaagattctactcaacatgtcccttcagaaacaagtgaggaccctgaagttgaggtgactattgaagatgatgattattctccaccgtctaagagaccaaaggccaatgagctaccgcagccaccagtcccggaacccgccaatgctgggaagcggaaagtgagggagttcaacttcgagaaatggaatgctcgcatcactgatctacgtaaacaagttgaagaattgtttgaaaggaaatatgctcaagccataaaagccaaaggtccggtgacgatcccgtaccctcttttccagtctcatgttgaagatctttatgtagaaggacttcctgaaggaattccttttagaaggccatctacttacggaattcctcgcctggagaggatattacttgcaaaggaaaggattcgttttgtgattaagaaacatgagcttctgaattcaacacgtgaagatttacagcttgataagccagcttcaggagtaaaggaagaatggtatgccagaatcactaaattaagaaagatggtggatcagcttttctgcaaaaaatttgcggaagccttggggagcactgaagccaaggctgtaccgtaccaaaaatttgaggcacacccgaatgatctgtacgtggaaggactgccagaaaacattcctttccgaagtccctcatggtatggaatcccaaggctggaaaaaatcattcaagtgggcaatcgaattaaatttgttattaaaagaccagaacttctgactcacagtaccactgaagttactcagccaagaacgaatacaccagtcaaagaagattggaatgtcagaattaccaagctacggaagcaagtggaagagatttttaatttgaaatttgctcaagctcttggactcaccgaggcagtaaaagtaccatatcctgtgtttgaatcaaacccggagttcttgtatgtggaaggcttgccagaggggattcccttccgaagccctacctggtttggaattccacgacttgaaaggatcgtccgcgggagtaataaaatcaagttcgttgttaaaaaacctgaactagttatttcctacttgcctcctgggatggctagtaaaataaacactaaagctttgcagtcccccaaaagaccacgaagtcctgggagtaattcaaaggttcctgaaattgaggtcaccgtggaaggccctaataacaacaatcctcaaacctcagctgttcgaaccccgacccagactaacggttctaacgttcccttcaagccacgagggagagagttttcctttgaggcctggaatgccaaaatcacggacctaaaacagaaagttgaaaatctcttcaatgagaaatgtggggaagctcttggccttaaacaagctgtgaaggtgccgttcgcgttatttgagtctttcccggaagacttttatgtggaaggcttacctgagggtgtgccattccgaagaccatcgacttttggcattccgaggctggagaagatactcagaaacaaagccaaaattaagttcatcattaaaaagcccgaaatgtttgagacggcgattaaggagagcacctcctctaagagccctcccagaaaaataaattcatcacccaatgttaatactactgcatcaggtgttgaagaccttaacatcattcaggtgacaattccagatgatgataatgaaagactctcgaaagttgaaaaagctagacagctaagagaacaagtgaatgacctctttagtcggaaatttggtgaagctattggtatgggttttcctgtgaaagttccctacaggaaaatcacaattaaccctggctgtgtggtggttgatggcatgcccccgggggtgtccttcaaagcccccagctacctggaaatcagctccatgagaaggatcttagactctgccgagtttatcaaattcacggtcattaggtaagtgagagtttcctgcttagtcacaggagcgaatctggagctcatgaggctgactcttctaaaatgcagccacaggtagtcatcgaatccggcttcctatgctgtgcaatcaacaaatcaaaataacttgtgtcatcattagaatgtcagatgtgcttctacgaactaagctgactcttttaattctttggcaaagggttggcaaactaggactgtttgccaaattcaggctgcctcctatttttagagtcttcctgaaacacagctacacccgtattatccatggctgctttcctgtcacagtgagtaagtagctgggactgagaaggcatggcctccaaagtctaaaatatttactctctagcactttgtagaaaaaccttagctaggcacagtggctaacgcctgtaatcccagcattttgggaggccaaggcaggcagatcacctgaggtcaggagttccagaccagcctggccaacatggtgaaatcccatctctacaaaaataaaacagttagctgggcatgatggcgggtgcctgtaatcccagctactcgggaggctgaggcaggatagtcgcttgaacccaggaggtggaggttgcaatgagccaagatcatgccactgcactccagcctggacgacagagtgagactccatcacaagaaaaaaagaactttgtcaacctctgtcttagggcgccttgtcacaggcttcgggtcagacggattcaaccttgcatcagccatttgttagccaggtcactctgttctttgtctgtaaatgagattgatcgttgttcccactgagagtgtcagctccttcccgtagagcaggcatgatgattgtactcacctctgacaccattgtgagtgccacattccttcccacgtccttgtcactgtaagagatgcccacctgagcaccaaccccaggttatcttcccctttgtcttccagccccccagaaacagctacgactcaacctacccaatcatttcatcatcagattgccactgtctctagttcaggtctcttgggactggcactcagaaatctcataataaatcctcttgaggcttctcatacactcgtcttcttccaatcttctttccctcaaaatctcatattttggttccacttcacccaccgtcattctccatatcactcccaggagttaggcaaaaagccccttccgttcttccgtatgttaaacttagaatcactctgttccctgctctgcgtttctattttttgtttttcctccatttactagtagcttaacactttctaacagtgttcttattattgatacgtatctatctcttccataagcttataaggtcacggataatacttctcattgtagtacgtaaatgacgtgggctagatatgagttgaataaacagttatacctgtaaattcttacagagtgaaaataaattgttatactttacaatttgtttctctctttagaccatttccaggacttgtgattaataaccgtgagtattttgtgaagtgttttgtttttgttttttcctggggtctgacgtgtgtgcgtgtgagtgtgtatacatgcttaacgtatatcacgttacttcacctatgtcagtaaccaggccaaatacttgttttagccctcagtaaaaacaccaggcacttcctagttgtaaaattattcaagcttcttaacttcctatcctcgatgcacttaatcataaaatggtaataatagcaccgattttgggggagtcgttccagtagatggaaagcatctggaacaggtgtcagcaagctcctgccgacgtgtatgcataaagttttattgaaaccaccatcgtgtccatttgtttatggcagaactgagagatggcagcagcaagtgtgtgcctgcaaaacctaaaatatttactaattggctctgcaagaaaagagtttgcatccccctaacctagaacagtgtctagcctctagtatgtgtttagcctacagtatgtgctcagcgaatacaatctatatttattactgcttttatgactgttataattactgtgcttggatttcgttacaaagtaagtcacaatgtgcctgcttctgttagtatttcagcacagtgcctggcacacatggggctctcaaatattgctgagcgagtgaacaaatgtcctttcaattccttaacgttgatgtcattttcaatagtattttgagccaaacttaattttgcgagtgtgttttgttttcttaactttattattaaaaatgtataaaagtgaggccaggcgtggtggctcacgcctgtaatcccagcagtttgggaggctgaggcaggcggatcagttgaggttgggagttggagaccagcccgtccaacatggtgaaagcctgtctctactaaaaatacaaaaatcagctgggtgtggtggcgcgtgcctgtaatcccagctactcaggaggctgaggcaggagagttgcttgaatcctagaggtggaggttgcagtgagctgagatcgtgccattgcactccagcctgggcaacaagagcaaaactctgtcccaataaataaataaataaaatgttctcttttgttcctgttcttgtgcggtagtgtggtatagagttttatggtaattactgtgaattagtgattctgagggacatatcagaactctgaggtttgtttccttctcatcttgagggaaacagcaaatgtatgttaaaatgcttttccaagggaacaacacatccttacattatttaaaccaatctgcttcattttcagagctggttgatcagagtgagtcagaaggccccgtgatacaagaatcagctgaaccaagccagttggaagttccagccacagaagaaataaaagagactgatggaagctctcagatcaagcaagaaccagaccccacgtggtagacctcttccctcctagggtaaatcagcttctgtgtcagggatgctgtgtggtgtccatctgaaccccctgcatacgcgtagctaatgtgatctccccactttcacataagatggtggccctgccttcagggaatgtgggagccaggtgggagccttcccggatatttaagctagaagattctacagggagattctccttggatcaatatatgtctctcagtcaaagatgtaaaagcacttttgccttaaaaagaatgttctgtttctaaatagagtcaacgttgtcctcctcattggaattcactatgagtcagaatcattagactgacttttttttttccatagtaatagtattttgcagagtctcacagagctgcagatcttttgttcatcttgcagagttaacaagtctgatcctgttagtccagatttcttaaatttggccaagttataataggagcagtagcttgagacccgaagtcaggaaactttgacaatggatttttttttttaatccagagacttgtactggaatttgccttaccctgtcagctcatggacttaaggtttcatcccgctttatgagtgcttctgaatccaagtcattgttacctgaatttgcaaattaagttgtgatattcgtgactgttaaattcctgtaattagattaacctctttgcttgcttgtttgttttctctcctattttagcttaaagtatcagtggttgagaagagcttttcggacctgttactaccccaagctgtgtaatatacttgtataacagaaataccttctatacaaacctttttttctacttttagatagaaatgtctactttttcagcagttctgtgaattaaagagcagagtgactgtgggtctggaatggctggtgtacttgggaatgtactatcaggattttacagcaatgctgggaaatgacagggaaaatgacaggaatgaatctcaccagattttttatgtactcagcagagccttgagttacggtgtttattttccaatcaagtgaagatatctcctacttctcctactggaacatctcagcttctgcagtgaagaaaaattcctgtgatagttcagttctttagtttttctatttgaaaaaaaaaaatcatttaaatgatcctttgttcacggctctccttaatgactgagtgaacagttcctatctgtatatttgactaaaccttttcctaagctatctctcatggttcctatgtttttttatcataattaaaagcaaaaccatctggatcacctaacagtcagaggtcagtatctcagcgtgtgaattatagaggaaatacagagagaacctcttccacttttacttttcgtccaaataaaatgcatggtgtaccagaagttgaagatcgggttgaggattggggctagctcgatgacactaaggccccaacatcgcgggacctgctgtggcgcggattcttaggaacgctgttctagccggccccctctccaggggtcgccgtggccggcattatttcctagttcttcttgtaaccctgaggtgccagcgcggggagtgaggaggggtcagggggctaaggatgcaacctctgacgttctgcgccttcctaggagagtcttacatgtgttgagatttcacaagcaatgcgagttgtaaaataccagctctacaagaagctaggctctgtgacggcatagttttcagtagctttatcacaatattcacaatggagaattatatgacatggtagcagaaataggcccttttatgtgttgcttctattttacctcaaattgtagatatagggtaatcaataaaatccatccatgcctttcacacactaagt

SEQ ID NO: 5049 - protein, 896 aa, Homo sapiens; identical to SEQ ID NO: 4433

SEQ ID NO: 5050 - DNA, 4228 bp, Homo sapiens
gggtcttgttctgtctcccaagctggagtgcagtggtgtggtcataggtcactgcagcgtcgaactcctaggctcaagtgatcctcttgcctcaggctcctgagtagctgggacaacaggcgtgtaccacacctggatactttttaaatttttggtagagaagggatctcactctattgccaagctggtgtcgaactcttggtcttaagcagccctcccacgtcagcatcccaaagtgttgggatttcagagggatcatggcccaagttgcaatgtccaccctccccgttgaagatgaggagtcctcggagagcaggatggtggtgacattcctcatgtcagctctcgagtccatgtgtaaagaactggccaagtccaaagccgaagtggcctgcattgcagtgtatgaaacagacgtgtttgtcgtcggaactgaaagaggacgtgcttttgtcaataccagaaaggattttcaaaaagattttgtaaaatattgtgttgaagaagaagaaaaagctgcagagatgcataaaatgaaatctacaacccaggcaaatcggatgagtgtagatgctgtagaaattgaaacactcagaaaaacagttgaggactatttctgcttttgctatgggaaagctttaggcaaatccacagtggtacctgtaccatatgagaagatgctgcgagaccagtcggctgtggtagtgcaggggcttccggaaggtgttgcctttaaacaccccgagaactatgatcttgcaaccctgaaatggattttggagaacaaagcagggatttcattcatcattaagagaccttttttagagccaaagaagcatgtaggtggtcgtgtgatggtaacagatgctgacaggtcaatactatctccaggtggaagttgtggccccatcaaagtgaaaactgaacccacagaagattctggcatttccctggaaatggcagctgtgacagtaaaggaagaatcagaagatcctgattattatcaatataacattcaaggaagccaccattcttcagagggcaatgaaggcacagaaatggaagtaccagcagaagatgatgattattctccaccgtctaagagaccaaaggccaatgagctaccgcagccaccagtcccggaacccgccaatgctgggaagcggaaagtgagggagttcaacttcgagaaatggaatgctcgcatcactgatctacgtaaacaagttgaagaattgtttgaaaggaaatatgctcaagccataaaagccaaaggtccggtgacgatcccgtaccctcttttccagtctcatgttgaagatctttatgtagaaggacttcctgaaggaattccttttagaaggccatctacttacggaattcctcgcctggagaggatattacttgcaaaggaaaggattcgttttgtgattaagaaacatgagcttctgaattcaacacgtgaagatttacagcttgataagccagcttcaggagtaaaggaagaatggtatgccagaatcactaaattaagaaagatggtggatcagcttttctgcaaaaaatttgcggaagccttggggagcactgaagccaaggctgtaccgtaccaaaaatttgaggcacacccgaatgatctgtacgtggaaggactgccagaaaacattcctttccgaagtccctcatggtatggaatcccaaggctggaaaaaatcattcaagtgggcaatcgaattaaatttgttattaaaagaccagaacttctgactcacagtaccactgaagttactcagccaagaacgaatacaccagtcaaagaagattggaatgtcagaattaccaagctacggaagcaagtggaagagatttttaatttgaaatttgctcaagctcttggactcaccgaggcagtaaaagtaccatatcctgtgtttgaatcaaacccggagttcttgaaaggatcgtccgcgggagtaataaaatcaagttcgttgttaaaaaacctgaactagttatttcctacttgcctcctgggatggctagtaaaataaacactaaagctttgcagtcccccaaaagaccacgaagtcctgggagtaattcaaaggttcctgaaattgaggtcaccgtggaaggccctaataacaacaatcctcaaacctcagctgttcgaaccccgacccagactaacggttctaacgttcccttcaagccacgagggagagagttttcctttgaggcctggaatgccaaaatcacggacctaaaacagaaagttgaaaatctcttcaatgagaaatgtggggaagctcttggccttaaacaagctgtgaaggtgccgttcgcgttatttgagtctttcccggaagacttttatgtggaaggcttacctgagggtgtgccattccgaagaccatcgacttttggcattccgaggctggagaagatactcagaaacaaagccaaaattaagttcatcattaaaaagcccgaaatgtttgagacggcgattaaggagagcacctcctctaagagccctcccagaaaaataaattcatcacccaatgttaatactactgcatcaggtgttgaagaccttaacatcattcaggtgacaattccagatgatgataatgaaagactctcgaaagttgaaaaagctagacagctaagagaacaagtgaatgacctctttagtcggaaatttggtgaagctattggtatgggttttcctgtgaaagttccctacaggaaaatcacaattaaccctggctgtgtggtggttgatggcatgcccccgggggtgtccttcaaagcccccagctacctggaaatcagctccatgagaaggatcttagactctgccgagtttatcaaattcacggtcattagaccatttccaggacttgtgattaataaccagctggttgatcagagtgagtcagaaggccccgtgatacaagaatcagctgaaccaagccagttggaagttccagccacagaagaaataaaagagactgatggaagctctcagatcaagcaagaaccagaccccacgtggtagacctcttccctcctaggcttaaagtatcagtggttgagaagagcttttcggacctgttactaccccaagctgtgtaatatacttgtataacagaaataccttctatacaaacctttttttctacttttagatagaaatgtctactttttcagcagttctgtgaattaaagagcagagtgactgtgggtctggaatggctggtgtacttgggaatgtactatcaggattttacagcaatgctgggaaatgacagggaaaatgacaggaatgaatctcaccagattttttatgtactcagcagagccttgagttacggtgtttattttccaatcaagtgaagatatctcctacttctcctactggaacatctcagcttctgcagtgaagaaaaattcctgtgatagttcagttctttagtttttctatttgaaaaaaaaaaatcatttaaatgatcctttgttcacggctctccttaatgactgagtgaacagttcctatctgtatatttgactaaaccttttcctaagctatctctcatggttcctatgtttttttatcataattaaaagcaaaaccatctggatcacctaacagtcagaggtcagtatctcagcgtgtgaattatagaggaaatacagagagaacctcttccacttttacttttcgtccaaataaaatgcatggtgtaccagaagttgaagatcgggttgaggattggggctagctcgatgacactaaggccccaacatcgcgggacctgctgtggcgcggattcttaggaacgctgttctagccggccccctctccaggggtcgccgtggccggcattatttcctagttcttcttgtaaccctgaggtgccagcgcggggagtgaggaggggtcagggggctaaggatgcaacctctgacgttctgcgccttcctaggagagtcttacatgtgttgagatttcacaagcaatgcgagttgtaaaataccagctctacaagaagctaggctctgtgacggcatagttttcagtagctttatcacaatattcacaatggagaattatatgacatggtagcagaaataggcccttttatgtgttgcttctattttacctcaaattgtagatatagggtaatcaataaaatccatccatgcctttcacacactaagt

SEQ ID NO: 5051 - protein, 584 aa, Homo sapiens; identical to SEQ ID NO: 4173

SEQ ID NO: 5052 - DNA, 5162 bp, Homo sapiens
gggtcttgttctgtctcccaagctggagtgcagtggtgtggtcataggtcactgcagcgtcgaactcctaggctcaagtgatcctcttgcctcaggctcctgagtagctgggacaacaggcgtgtaccacacctggatactttttaaatttttggtagagaagggatctcactctattgccaagctggtgtcgaactcttggtcttaagcagccctcccacgtcagcatcccaaagtgttgggatttcagagggatcatggcccaagttgcaatgtccaccctccccgttgaagatgaggagtcctcggagagcaggatggtggtgacattcctcatgtcagctctcgagtccatgtgtaaagaactggccaagtccaaagccgaagtggcctgcattgcagtgtatgaaacagacgtgtttgtcgtcggaactgaaagaggacgtgcttttgtcaataccagaaaggattttcaaaaagattttgtaaaatattgtgttgaagaagaagaaaaagctgcagagatgcataaaatgaaatctacaacccaggcaaatcggatgagtgtagatgctgtagaaattgaaacactcagaaaaacagttgaggactatttctgcttttgctatgggaaagctttaggcaaatccacagtggtacctgtaccatatgagaagatgctgcgagaccagtcggctgtggtagtgcaggggcttccggaaggtgttgcctttaaacaccccgagaactatgatcttgcaaccctgaaatggattttggagaacaaagcagggatttcattcatcattaagagaccttttttagagccaaagaagcatgtaggtggtcgtgtgatggtaacagatgctgacaggtcaatactatctccaggtggaagttgtggccccatcaaagtgaaaactgaacccacagaagattctggcatttccctggaaatggcagctgtgacagtaaaggaagaatcagaagatcctgattattatcaatataacattcaaggaagccaccattcttcagagggcaatgaaggcacagaaatggaagtaccagcagaagattctactcaacatgtcccttcagaaacaagtgaggaccctgaagttgaggtgactattgaagatgatgattattctccaccgtctaagagaccaaaggccaatgagctaccgcagccaccagtcccggaacccgccaatgctgggaagcggaaagtgagggagttcaacttcgagaaatggaatgctcgcatcactgatctacgtaaacaagttgaagaattgtttgaaaggaaatatgctcaagccataaaagccaaaggtccggtgacgatcccgtaccctcttttccagtctcatgttgaagatctttatgtagaaggacttcctgaaggaattccttttagaaggccatctacttacggaattcctcgcctggagaggatattacttgcaaaggaaaggattcgttttgtgattaagaaacatgagcttctgaattcaacacgtgaagatttacagcttgataagccagcttcaggagtaaaggaagaatggtatgccagaatcactaaattaagaaagatggtggatcagcttttctgcaaaaaatttgcggaagccttggggagcactgaagccaaggctgtaccgtaccaaaaatttgaggcacacccgaatgatctgtacgtggaaggactgccagaaaacattcctttccgaagtccctcatggtatggaatcccaaggctggaaaaaatcattcaagtgggcaatcgaattaaatttgttattaaaagaccagaacttctgactcacagtaccactgaagttactcagccaagaacgaatacaccagtcaaagaagattggaatgtcagaattaccaagctacggaagcaagtggaagagatttttaatttgaaatttgcttagatttgttgacagcggtttcctggagtgctgtcttgagaacgattctgaggaggctcagcaagaaagagtgtttcagttgattgggtgtgtctgtcatggagaaggaactcaagctcttggactcaccgaggcagtaaaagtaccatatcctgtgtttgaatcaaacccggagttcttgtatgtggaaggcttgccagaggggattcccttccgaagccctacctggtttggaattccacgacttgaaaggatcgtccgcgggagtaataaaatcaagttcgttgttaaaaaacctgaactagttatttcctacttgcctcctgggatggctagtaaaataaacactaaagctttgcagtcccccaaaagaccacgaagtcctgggagtaattcaaaggttcctgaaattgaggtcaccgtggaaggccctaataacaacaatcctcaaacctcagctgttcgaaccccgacccagactaacggttctaacgttcccttcaagccacgagggagagagttttcctttgaggcctggaatgccaaaatcacggacctaaaacagaaagttgaaaatctcttcaatgagaaatgtggggaagctcttggccttaaacaagctgtgaaggtgccgttcgcgttatttgagtctttcccggaagacttttatgtggaaggcttacctgagggtgtgccattccgaagaccatcgacttttggcattccgaggctggagaagatactcagaaacaaagccaaaattaagttcatcattaaaaagcccgaaatgtttgagacggcgattaaggagagcacctcctctaagagccctcccagaaaaataaattcatcacccaatgttaatactactgcatcaggtgttgaagaccttaacatcattcaggtgacaattccagatgatgataatgaaagactctcgaaagttgaaaaagctagacagctaagagaacaagtgaatgacctctttagtcggaaatttggtgaagctattggtatgggttttcctgtgaaagttccctacaggaaaatcacaattaaccctggctgtgtggtggttgatggcatgcccccgggggtgtccttcaaagcccccagctacctggaaatcagctccatgagaaggatcttagactctgccgagtttatcaaattcacggtcattagaccatttccaggacttgtgattaataaccagctggttgatcagagtgagtcagaaggccccgtgatacaagaatcagctgaaccaagccagttggaagttccagccacagaagaaataaaagagactgatggaagctctcagatcaagcaagaaccagaccccacgtggtagacctcttccctcctagggtaaatcagcttctgtgtcagggatgctgtgtggtgtccatctgaaccccctgcatacgcgtagctaatgtgatctccccactttcacataagatggtggccctgccttcagggaatgtgggagccaggtgggagccttcccggatatttaagctagaagattctacagggagattctccttggatcaatatatgtctctcagtcaaagatgtaaaagcacttttgccttaaaaagaatgttctgtttctaaatagagtcaacgttgtcctcctcattggaattcactatgagtcagaatcattagactgacttttttttttccatagtaatagtattttgcagagtctcacagagctgcagatcttttgttcatcttgcagagttaacaagtctgatcctgttagtccagatttcttaaatttggccaagttataataggagcagtagcttgagacccgaagtcaggaaactttgacaatggatttttttttttaatccagagacttgtactggaatttgccttaccctgtcagctcatggacttaaggtttcatcccgctttatgagtgcttctgaatccaagtcattgttacctgaatttgcaaattaagttgtgatattcgtgactgttaaattcctgtaattagattaacctctttgcttgcttgtttgttttctctcctattttagcttaaagtatcagtggttgagaagagcttttcggacctgttactaccccaagctgtgtaatatacttgtataacagaaataccttctatacaaacctttttttctacttttagatagaaatgtctactttttcagcagttctgtgaattaaagagcagagtgactgtgggtctggaatggctggtgtacttgggaatgtactatcaggattttacagcaatgctgggaaatgacagggaaaatgacaggaatgaatctcaccagattttttatgtactcagcagagccttgagttacggtgtttattttccaatcaagtgaagatatctcctacttctcctactggaacatctcagcttctgcagtgaagaaaaattcctgtgatagttcagttctttagtttttctatttgaaaaaaaaaaatcatttaaatgatcctttgttcacggctctccttaatgactgagtgaacagttcctatctgtatatttgactaaaccttttcctaagctatctctcatggttcctatgtttttttatcataattaaaagcaaaaccatctggatcacctaacagtcagaggtcagtatctcagcgtgtgaattatagaggaaatacagagagaacctcttccacttttacttttcgtccaaataaaatgcatggtgtaccagaagttgaagatcgggttgaggattggggctagctcgatgacactaaggccccaacatcgcgggacctgctgtggcgcggattcttaggaacgctgttctagccggccccctctccaggggtcgccgtggccggcattatttcctagttcttcttgtaaccctgaggtgccagcgcggggagtgaggaggggtcagggggctaaggatgcaacctctgacgttctgcgccttcctaggagagtcttacatgtgttgagatttcacaagcaatgcgagttgtaaaataccagctctacaagaagctaggctctgtgacggcatagttttcagtagctttatcacaatattcacaatggagaattatatgacatggtagcagaaataggcccttttatgtgttgcttctattttacctcaaattgtagatatagggtaatcaataaaatccatccatgcctttcacacactaagt

SEQ ID NO: 5053 - protein, 564 aa, Homo sapiens; identical to SEQ ID NO: 4061

SEQ ID NO: 5054 - DNA, 4924 bp, Homo sapiens
gggtcttgttctgtctcccaagctggagtgcagtggtgtggtcataggtcactgcagcgtcgaactcctaggctcaagtgatcctcttgcctcaggctcctgagtagctgggacaacaggcgtgtaccacacctggatactttttaaatttttggtagagaagggatctcactctattgccaagctggtgtcgaactcttggtcttaagcagccctcccacgtcagcatcccaaagtgttgggatttcagagggatcatggcccaagttgcaatgtccaccctccccgttgaagatgaggagtcctcggagagcaggatggtggtgacattcctcatgtcagctctcgagtccatgtgtaaagaactggccaagtccaaagccgaagtggcctgcattgcagtgtatgaaacagacgtgtttgtcgtcggaactgaaagaggacgtgcttttgtcaataccagaaaggattttcaaaaagattttgtaaaatattgtgttgaagaagaagaaaaagctgcagagatgcataaaatgaaatctacaacccaggcaaatcggatgagtgtagatgctgtagaaattgaaacactcagaaaaacagttgaggactatttctgcttttgctatgggaaagctttaggcaaatccacagtggtacctgtaccatatgagaagatgctgcgagaccagtcggctgtggtagtgcaggggcttccggaaggtgttgcctttaaacaccccgagaactatgatcttgcaaccctgaaatggattttggagaacaaagcagggatttcattcatcattaagagaccttttttagagccaaagaagcatgtaggtggtcgtgtgatggtaacagatgctgacaggtcaatactatctccaggtggaagttgtggccccatcaaagtgaaaactgaacccacagaagattctggcatttccctggaaatggcagctgtgacagtaaaggaagaatcagaagatcctgattattatcaatataacattcaagcaggcccttctgaaactgatgatgttgatgaaaaacagcccctatcgaagcctttgcaaggaagccaccattcttcagagggcaatgaaggcacagaaatggaagtaccagcagaagatgatgattattctccaccgtctaagagaccaaaggccaatgagctaccgcagccaccagtcccggaacccgccaatgctgggaagcggaaagtgagggagttcaacttcgagaaatggaatgctcgcatcactgatctacgtaaacaagttgaagaattgtttgaaaggaaatatgctcaagccataaaagccaaaggtccggtgacgatcccgtaccctcttttccagtctcatgttgaagatctttatgtagaaggacttcctgaaggaattccttttagaaggccatctacttacggaattcctcgcctggagaggatattacttgcaaaggaaaggattcgttttgtgattaagaaacatgagcttctgaattcaacacgtgaagatttacagcttgataagccagcttcaggagtaaaggaagaatggtatgccagaatcactaaattaagaaagatggtggatcagcttttctgcaaaaaatttgcggaagccttggggagcactgaagccaaggctgtaccgtaccaaaaatttgaggcacacccgaatgatctgtacgtggaaggactgccagaaaacattcctttccgaagtccctcatggtatggaatcccaaggctggaaaaaatcattcaagtgggcaatcgaattaaatttgttattaaaagaccagaacttctgactcacagtaccactgaagttactcagccaagaacgaatacaccagctcaagctcttggactcaccgaggcagtaaaagtaccatatcctgtgtttgaatcaaacccggagttcttgtatgtggaaggcttgccagaggggattcccttccgaagccctacctggtttggaattccacgacttgaaaggatcgtccgcgggagtaataaaatcaagttcgttgttaaaaaacctgaactagttatttcctacttgcctcctgggatggctagtaaaataaacactaaagctttgcagtcccccaaaagaccacgaagtcctgggagtaattcaaaggttcctgaaattgaggtcaccgtggaaggccctaataacaacaatcctcaaacctcagctgttcgaaccccgacccagactaacggttctaacgttcccttcaagccacgagggagagagttttcctttgaggcctggaatgccaaaatcacggacctaaaacagaaagttgaaaatctcttcaatgagaaatgtggggaagctcttggccttaaacaagctgtgaaggtgccgttcgcgttatttgagtctttcccggaagacttttatgtggaaggcttacctgagggtgtgccattccgaagaccatcgacttttggcattccgaggctggagaagatactcagaaacaaagccaaaattaagttcatcattaaaaagcccgaaatgtttgagacggcgattaaggagagcacctcctctaagagccctcccagaaaaataaattcatcacccaatgttaatactactgcatcaggtgttgaagaccttaacatcattcaggtgacaattccagatgatgataatgaaagactctcgaaagttgaaaaagctagacagctaagagaacaagtgaatgacctctttagtcggaaatttggtgaagctattggtatgggttttcctgtgaaagttccctacaggaaaatcacaattaaccctggctgtgtggtggttgatggcatgcccccgggggtgtccttcaaagcccccagctacctggaaatcagctccatgagaaggatcttagactctgccgagtttatcaaattcacggtcattagaccatttccaggacttgtgattaataaccagctggttgatcagagtgagtcagaaggccccgtgatacaagaatcagctgaaccaagccagttggaagttccagccacagaaggtaaaaggacctcttccctcctagggtaaatcagcttctgtgtcagggatgctgtgtggtgtccatctgaaccccctgcatacgcgtagctaatgtgatctccccactttcacataagatggtggccctgccttcagggaatgtgggagccaggtgggagccttcccggatatttaagctagaagattctacagggagattctccttggatcaatatatgtctctcagtcaaagatgtaaaagcacttttgccttaaaaagaatgttctgtttctaaatagagtcaacgttgtcctcctcattggaattcactatgagtcagaatcattagactgacttttttttttccatagtaatagtattttgcagagtctcacagagctgcagatcttttgttcatcttgcagagttaacaagtctgatcctgttagtccagatttcttaaatttggccaagttataataggagcagtagcttgagacccgaagtcaggaaactttgacaatggatttttttttttaatccagagacttgtactggaatttgccttaccctgtcagctcatggacttaaggtttcatcccgctttatgagtgcttctgaatccaagtcattgttacctgaatttgcaaattaagttgtgatattcgtgactgttaaattcctgtaattagattaacctctttgcttgcttgtttgttttctctcctattttagcttaaagtatcagtggttgagaagagcttttcggacctgttactaccccaagctgtgtaatatacttgtataacagaaataccttctatacaaacctttttttctacttttagatagaaatgtctactttttcagcagttctgtgaattaaagagcagagtgactgtgggtctggaatggctggtgtacttgggaatgtactatcaggattttacagcaatgctgggaaatgacagggaaaatgacaggaatgaatctcaccagattttttatgtactcagcagagccttgagttacggtgtttattttccaatcaagtgaagatatctcctacttctcctactggaacatctcagcttctgcagtgaagaaaaattcctgtgatagttcagttctttagtttttctatttgaaaaaaaaaaatcatttaaatgatcctttgttcacggctctccttaatgactgagtgaacagttcctatctgtatatttgactaaaccttttcctaagctatctctcatggttcctatgtttttttatcataattaaaagcaaaaccatctggatcacctaacagtcagaggtcagtatctcagcgtgtgaattatagaggaaatacagagagaacctcttccacttttacttttcgtccaaataaaatgcatggtgtaccagaagttgaagatcgggttgaggattggggctagctcgatgacactaaggccccaacatcgcgggacctgctgtggcgcggattcttaggaacgctgttctagccggccccctctccaggggtcgccgtggccggcattatttcctagttcttcttgtaaccctgaggtgccagcgcggggagtgaggaggggtcagggggctaaggatgcaacctctgacgttctgcgccttcctaggagagtcttacatgtgttgagatttcacaagcaatgcgagttgtaaaataccagctctacaagaagctaggctctgtgacggcatagttttcagtagctttatcacaatattcacaatggagaattatatgacatggtagcagaaataggcccttttatgtgttgcttctattttacctcaaattgtagatatagggtaatcaataaaatccatccatgcctttcacacactaagt

SEQ ID NO: 5055 - protein, 943 aa, Homo sapiens; identical to SEQ ID NO: 4103

SEQ ID NO: 5056 - DNA, 3866 bp, Homo sapiens
gggtcttgttctgtctcccaagctggagtgcagtggtgtggtcataggtcactgcagcgtcgaactcctaggctcaagtgatcctcttgcctcaggctcctgagtagctgggacaacaggcgtgtaccacacctggatactttttaaatttttggtagagaagggatctcactctattgccaagctggtgtcgaactcttggtcttaagcagccctcccacgtcagcatcccaaagtgttgggatttcagagggatcatggcccaagttgcaatgtccaccctccccgttgaagatgaggagtcctcggagagcaggatggtggtgacattcctcatgtcagctctcgagtccatgtgtaaagaactggccaagtccaaagccgaagtggcctgcattgcagtgtatgaaacagacgtgtttgtcgtcggaactgaaagaggacgtgcttttgtcaataccagaaaggattttcaaaaagattttgtaaaatattgtgttgaagaagaagaaaaagctgcagagatgcataaaatgaaatctacaacccaggcaaatcggatgagtgtagatgctgtagaaattgaaacactcagaaaaacagttgaggactatttctgcttttgctatgggaaagctttaggcaaatccacagtggtacctgtaccatatgagaagatgctgcgagaccagtcggctgtggtagtgcaggggcttccggaaggtgttgcctttaaacaccccgagaactatgatcttgcaaccctgaaatggattttggagaacaaagcagggatttcattcatcattaagagaccttttttagagccaaagaagcatgtaggtggtcgtgtgatggtaacagatgctgacaggtcaatactatctccaggtggaagttgtggccccatcaaagtgaaaactgaacccacagaagattctggcatttccctggaaatggcagctgtgacagtaaaggaagaatcagaagatcctgattattatcaatataacattcaagcaggcccttctgaaactgatgatgttgatgaaaaacagcccctatcgaagcctttgcaaggaagccaccattcttcagagggcaatgaaggcacagaaatggaagtaccagcagaagattctactcaacatgtcccttcagaaacaagtgaggaccctgaagttgaggtgactattgaagatgatgattattctccaccgtctaagagaccaaaggccaatgagctaccgcagccaccagtcccggaacccgccaatgctgggaagcggaaagtgagggagttcaacttcgagaaatggaatgctcgcatcactgatctacgtaaacaagttgaagaattgtttgaaaggaaatatgctcaagccataaaagccaaaggtccggtgacgatcccgtaccctcttttccagtctcatgttgaagatctttatgtagaaggacttcctgaaggaattccttttagaaggccatctacttacggaattcctcgcctggagaggatattacttgcaaaggaaaggattcgttttgtgattaagaaacatgagcttctgaattcaacacgtgaagatttacagcttgataagccagcttcaggagtaaaggaagaatggtatgccagaatcactaaattaagaaagatggtggatcagcttttctgcaaaaaatttgcggaagccttggggagcactgaagccaaggctgtaccgtaccaaaaatttgaggcacacccgaatgatctgtacgtggaaggactgccagaaaacattcctttccgaagtccctcatggtatggaatcccaaggctggaaaaaatcattcaagtgggcaatcgaattaaatttgttattaaaagaccagaacttctgactcacagtaccactgaagttactcagccaagaacgaatacaccagtcaaagaagattggaatgtcagaattaccaagctacggaagcaagtggaagagatttttaatttgaaatttgctcaagctcttggactcaccgaggcagtaaaagtaccatatcctgtgtttgaatcaaacccggagttcttgtatgtggaaggcttgccagaggggattcccttccgaagccctacctggtttggaattccacgacttgaaaggatcgtccgcgggagtaataaaatcaagttcgttgttaaaaaacctgaactagttatttcctacttgcctcctgggatggctagtaaaataaacactaaagctttgcagtcccccaaaagaccacgaagtcctgggagtaattcaaaggttcctgaaattgaggtcaccgtggaaggccctaataacaacaatcctcaaacctcagctgttcgaaccccgacccagactaacggttctaacgttcccttcaagccacgagggagagagttttcctttgaggcctggaatgccaaaatcacggacctaaaacagaaagttgaaaatctcttcaatgagaaatgtggggaagctcttggccttaaacaagctgtgaaggtgccgttcgcgttatttgagtctttcccggaagacttttatgtggaaggcttacctgagggtgtgccattccgaagaccatcgacttttggcattccgaggctggagaagatactcagaaacaaagccaaaattaagttcatcattaaaaagcccgaaatgtttgagacggcgattaaggagagcacctcctctaagagccctcccagaaaaataaattcatcacccaatgttaatactactgcatcaggtgttgaagaccttaacatcattcaggtgacaattccagatgatgataatgaaagactctcgaaagttgaaaaagctagacagctaagagaacaagtgaatgacctctttagtcggaaatttggtgaagctattggtatgggttttcctgtgaaagttccctacaggaaaatcacaattaaccctggctgtgtggtggttgatggcatgcccccgggggtgtccttcaaagcccccagctacctggaaatcagctccatgagaaggatcttagactctgccgagtttatcaaattcacggtcattagaccatttccaggacttgtgattaataaccagctggttgatcagagtgagtcagaaggccccgtgatacaagaatcagctgaaccaagccagttggaagttccagccacagaagaaataaaagagactgatggaagctctcagatcaagcaagaaccagaccccacgtggtagacctcttccctcctaggcaaaaccatctggatcacctaacagtcagaggtcagtatctcagcgtgtgaattatagaggaaatacagagagaacctcttccacttttacttttcgtccaaataaaatgcatggtgtaccagaagttgaagatcgggttgaggattggggctagctcgatgacactaaggccccaacatcgcgggacctgctgtggcgcggattcttaggaacgctgttctagccggccccctctccaggggtcgccgtggccggcattatttcctagttcttcttgtaaccctgaggtgccagcgcggggagtgaggaggggtcagggggctaaggatgcaacctctgacgttctgcgccttcctaggagagtcttacatgtgttgagatttcacaagcaatgcgagttgtaaaataccagctctacaagaagctaggctctgtgacggcatagttttcagtagctttatcacaatattcacaatggagaattatatgacatggtagcagaaataggcccttttatgtgttgcttctattttacctcaaattgtagatatagggtaatcaataaaatccatccatgcctttcacacactaagt

SEQ ID NO: 5057 - protein, 998 aa, Homo sapiens; identical to SEQ ID NO: 468

SEQ ID NO: 5058 - DNA, 4869 bp, Homo sapiens
gggtcttgttctgtctcccaagctggagtgcagtggtgtggtcataggtcactgcagcgtcgaactcctaggctcaagtgatcctcttgcctcaggctcctgagtagctgggacaacaggcgtgtaccacacctggatactttttaaatttttggtagagaagggatctcactctattgccaagctggtgtcgaactcttggtcttaagcagccctcccacgtcagcatcccaaagtgttgggatttcagagggatcatggcccaagttgcaatgtccaccctccccgttgaagatgaggagtcctcggagagcaggatggtggtgacattcctcatgtcagctctcgagtccatgtgtaaagaactggccaagtccaaagccgaagtggcctgcattgcagtgtatgaaacagacgtgtttgtcgtcggaactgaaagaggacgtgcttttgtcaataccagaaaggattttcaaaaagattttgtaaaatattgtgttgaagaagaagaaaaagctgcagagatgcataaaatgaaatctacaacccaggcaaatcggatgagtgtagatgctgtagaaattgaaacactcagaaaaacagttgaggactatttctgcttttgctatgggaaagctttaggcaaatccacagtggtacctgtaccatatgagaagatgctgcgagaccagtcggctgtggtagtgcaggggcttccggaaggtgttgcctttaaacaccccgagaactatgatcttgcaaccctgaaatggattttggagaacaaagcagggatttcattcatcattaagagaccttttttagagccaaagaagcatgtaggtggtcgtgtgatggtaacagatgctgacaggtcaatactatctccaggtggaagttgtggccccatcaaagtgaaaactgaacccacagaagattctggcatttccctggaaatggcagctgtgacagtaaaggaagaatcagaagatcctgattattatcaatataacattcaaggaagccaccattcttcagagggcaatgaaggcacagaaatggaagtaccagcagaagatgatgattattctccaccgtctaagagaccaaaggccaatgagctaccgcagccaccagtcccggaacccgccaatgctgggaagcggaaagtgagggagttcaacttcgagaaatggaatgctcgcatcactgatctacgtaaacaagttgaagaattgtttgaaaggaaatatgctcaagccataaaagccaaaggtccggtgacgatcccgtaccctcttttccagtctcatgttgaagatctttatgtagaaggacttcctgaaggaattccttttagaaggccatctacttacggaattcctcgcctggagaggatattacttgcaaaggaaaggattcgttttgtgattaagaaacatgagcttctgaattcaacacgtgaagatttacagcttgataagccagcttcaggagtaaaggaagaatggtatgccagaatcactaaattaagaaagatggtggatcagcttttctgcaaaaaatttgcggaagccttggggagcactgaagccaaggctgtaccgtaccaaaaatttgaggcacacccgaatgatctgtacgtggaaggactgccagaaaacattcctttccgaagtccctcatggtatggaatcccaaggctggaaaaaatcattcaagtgggcaatcgaattaaatttgttattaaaagaccagaacttctgactcacagtaccactgaagttactcagccaagaacgaatacaccagtcaaagaagattggaatgtcagaattaccaagctacggaagcaagtggaagagatttttaatttgaaatttgctcaagctcttggactcaccgaggcagtaaaagtaccatatcctgtgtttgaatcaaacccggagttcttgaaaggatcgtccgcgggagtaataaaatcaagttcgttgttaaaaaacctgaactagttatttcctacttgcctcctgggatggctagtaaaataaacactaaagctttgcagtcccccaaaagaccacgaagtcctgggagtaattcaaaggttcctgaaattgaggtcaccgtggaaggccctaataacaacaatcctcaaacctcagctgttcgaaccccgacccagactaacggttctaacgttcccttcaagccacgagggagagagttttcctttgaggcctggaatgccaaaatcacggacctaaaacagaaagttgaaaatctcttcaatgagaaatgtggggaagctcttggccttaaacaagctgtgaaggtgccgttcgcgttatttgagtctttcccggaagacttttatgtggaaggcttacctgagggtgtgccattccgaagaccatcgacttttggcattccgaggctggagaagatactcagaaacaaagccaaaattaagttcatcattaaaaagcccgaaatgtttgagacggcgattaaggagagcacctcctctaagagccctcccagaaaaataaattcatcacccaatgttaatactactgcatcaggtgttgaagaccttaacatcattcaggtgacaattccagatgatgataatgaaagactctcgaaagttgaaaaagctagacagctaagagaacaagtgaatgacctctttagtcggaaatttggtgaagctattggtatgggttttcctgtgaaagttccctacaggaaaatcacaattaaccctggctgtgtggtggttgatggcatgcccccgggggtgtccttcaaagcccccagctacctggaaatcagctccatgagaaggatcttagactctgccgagtttatcaaattcacggtcattagaccatttccaggacttgtgattaataaccagctggttgatcagagtgagtcagaaggccccgtgatacaagaatcagctgaaccaagccagttggaagttccagccacagaaggtaaaaggacctcttccctcctagggtaaatcagcttctgtgtcagggatgctgtgtggtgtccatctgaaccccctgcatacgcgtagctaatgtgatctccccactttcacataagatggtggccctgccttcagggaatgtgggagccaggtgggagccttcccggatatttaagctagaagattctacagggagattctccttggatcaatatatgtctctcagtcaaagatgtaaaagcacttttgccttaaaaagaatgttctgtttctaaatagagtcaacgttgtcctcctcattggaattcactatgagtcagaatcattagactgacttttttttttccatagtaatagtattttgcagagtctcacagagctgcagatcttttgttcatcttgcagagttaacaagtctgatcctgttagtccagatttcttaaatttggccaagttataataggagcagtagcttgagacccgaagtcaggaaactttgacaatggatttttttttttaatccagagacttgtactggaatttgccttaccctgtcagctcatggacttaaggtttcatcccgctttatgagtgcttctgaatccaagtcattgttacctgaatttgcaaattaagttgtgatattcgtgactgttaaattcctgtaattagattaacctctttgcttgcttgtttgttttctctcctattttagcttaaagtatcagtggttgagaagagcttttcggacctgttactaccccaagctgtgtaatatacttgtataacagaaataccttctatacaaacctttttttctacttttagatagaaatgtctactttttcagcagttctgtgaattaaagagcagagtgactgtgggtctggaatggctggtgtacttgggaatgtactatcaggattttacagcaatgctgggaaatgacagggaaaatgacaggaatgaatctcaccagattttttatgtactcagcagagccttgagttacggtgtttattttccaatcaagtgaagatatctcctacttctcctactggaacatctcagcttctgcagtgaagaaaaattcctgtgatagttcagttctttagtttttctatttgaaaaaaaaaaatcatttaaatgatcctttgttcacggctctccttaatgactgagtgaacagttcctatctgtatatttgactaaaccttttcctaagctatctctcatggttcctatgtttttttatcataattaaaagcaaaaccatctggatcacctaacagtcagaggtcagtatctcagcgtgtgaattatagaggaaatacagagagaacctcttccacttttacttttcgtccaaataaaatgcatggtgtaccagaagttgaagatcgggttgaggattggggctagctcgatgacactaaggccccaacatcgcgggacctgctgtggcgcggattcttaggaacgctgttctagccggccccctctccaggggtcgccgtggccggcattatttcctagttcttcttgtaaccctgaggtgccagcgcggggagtgaggaggggtcagggggctaaggatgcaacctctgacgttctgcgccttcctaggagagtcttacatgtgttgagatttcacaagcaatgcgagttgtaaaataccagctctacaagaagctaggctctgtgacggcatagttttcagtagctttatcacaatattcacaatggagaattatatgacatggtagcagaaataggcccttttatgtgttgcttctattttacctcaaattgtagatatagggtaatcaataaaatccatccatgcctttcacacactaagt

SEQ ID NO: 5059 - protein, 584 aa, Homo sapiens; identical to SEQ ID NO: 4173

SEQ ID NO: 5060 - DNA, 4242 bp, Homo sapiens
gggtcttgttctgtctcccaagctggagtgcagtggtgtggtcataggtcactgcagcgtcgaactcctaggctcaagtgatcctcttgcctcaggctcctgagtagctgggacaacaggcgtgtaccacacctggatactttttaaatttttggtagagaagggatctcactctattgccaagctggtgtcgaactcttggtcttaagcagccctcccacgtcagcatcccaaagtgttgggatttcagagggatcatggcccaagttgcaatgtccaccctccccgttgaagatgaggagtcctcggagagcaggatggtggtgacattcctcatgtcagctctcgagtccatgtgtaaagaactggccaagtccaaagccgaagtggcctgcattgcagtgtatgaaacagacgtgtttgtcgtcggaactgaaagaggacgtgcttttgtcaataccagaaaggattttcaaaaagattttgtaaaatattgtgttgaagaagaagaaaaagctgcagagatgcataaaatgaaatctacaacccaggcaaatcggatgagtgtagatgctgtagaaattgaaacactcagaaaaacagttgaggactatttctgcttttgctatgggaaagctttaggcaaatccacagtggtacctgtaccatatgagaagatgctgcgagaccagtcggctgtggtagtgcaggggcttccggaaggtgttgcctttaaacaccccgagaactatgatcttgcaaccctgaaatggattttggagaacaaagcagggatttcattcatcattaagagaccttttttagagccaaagaagcatgtaggtggtcgtgtgatggtaacagatgctgacaggtcaatactatctccaggtggaagttgtggccccatcaaagtgaaaactgaacccacagaagattctggcatttccctggaaatggcagctgtgacagtaaaggaagaatcagaagatcctgattattatcaatataacattcaaggaagccaccattcttcagagggcaatgaaggcacagaaatggaagtaccagcagaagattctactcaacatgtcccttcagaaacaagtgaggaccctgaagttgaggtgactattgaagatgatgattattctccaccgtctaagagaccaaaggccaatgagctaccgcagccaccagtcccggaacccgccaatgctgggaagcggaaagtgagggagttcaacttcgagaaatggaatgctcgcatcactgatctacgtaaacaagttgaagaattgtttgaaaggaaatatgctcaagccataaaagccaaaggtccggtgacgatcccgtaccctcttttccagtctcatgttgaagatctttatgtagaaggacttcctgaaggaattccttttagaaggccatctacttacggaattcctcgcctggagaggatattacttgcaaaggaaaggattcgttttgtgattaagaaacatgagcttctgaattcaacacgtgaagatttacagcttgataagccagcttcaggagtaaaggaagaatggtatgccagaatcactaaattaagaaagatggtggatcagcttttctgcaaaaaatttgcggaagccttggggagcactgaagccaaggctgtaccgtaccaaaaatttgaggcacacccgaatgatctgtacgtggaaggactgccagaaaacattcctttccgaagtccctcatggtatggaatcccaaggctggaaaaaatcattcaagtgggcaatcgaattaaatttgttattaaaagaccagaacttctgactcacagtaccactgaagttactcagccaagaacgaatacaccagtcaaagaagattggaatgtcagaattaccaagctacggaagcaagtggaagagatttttaatttgaaatttgcttagatttgttgacagcggtttcctggagtgctgtcttgagaacgattctgaggaggctcagcaagaaagagtgtttcagttgattgggtgtgtctgtcatggagaaggaactcaagctcttggactcaccgaggcagtaaaagtaccatatcctgtgtttgaatcaaacccggagttcttgtatgtggaaggcttgccagaggggattcccttccgaagccctacctggtttggaattccacgacttgaaaggatcgtccgcgggagtaataaaatcaagttcgttgttaaaaaacctgaactagttatttcctacttgcctcctgggatggctagtaaaataaacactaaagctttgcagtcccccaaaagaccacgaagtcctgggagtaattcaaaggttcctgaaattgaggtcaccgtggaaggccctaataacaacaatcctcaaacctcagctgttcgaaccccgacccagactaacggttctaacgttcccttcaagccacgagggagagagttttcctttgaggcctggaatgccaaaatcacggacctaaaacagaaagttgaaaatctcttcaatgagaaatgtggggaagctcttggccttaaacaagctgtgaaggtgccgttcgcgttatttgagtctttcccggaagacttttatgtggaaggcttacctgagggtgtgccattccgaagaccatcgacttttggcattccgaggctggagaagatactcagaaacaaagccaaaattaagttcatcattaaaaagcccgaaatgtttgagacggcgattaaggagagcacctcctctaagagccctcccagaaaaataaattcatcacccaatgttaatactactgcatcaggtgttgaagaccttaacatcattcaggtgacaattccagatgatgataatgaaagactctcgaaagttgaaaaagctagacagctaagagaacaagtgaatgacctctttagtcggaaatttggtgaagctattggtatgggttttcctgtgaaagttccctacaggaaaatcacaattaaccctggctgtgtggtggttgatggcatgcccccgggggtgtccttcaaagcccccagctacctggaaatcagctccatgagaaggatcttagactctgccgagtttatcaaattcacggtcattagaccatttccaggacttgtgattaataaccagctggttgatcagagtgagtcagaaggccccgtgatacaagaatcagctgaaccaagccagttggaagttccagccacagaagaaataaaagagactgatggaagctctcagatcaagcaagaaccagaccccacgtggtagacctcttccctcctaggcttaaagtatcagtggttgagaagagcttttcggacctgttactaccccaagctgtagccttgagttacggtgtttattttccaatcaagtgaagatatctcctacttctcctactggaacatctcagcttctgcagtgaagaaaaattcctgtgatagttcagttctttagtttttctatttgaaaaaaaaaaatcatttaaatgatcctttgttcacggctctccttaatgactgagtgaacagttcctatctgtatatttgactaaaccttttcctaagctatctctcatggttcctatgtttttttatcataattaaaagcaaaaccatctggatcacctaacagtcagaggtcagtatctcagcgtgtgaattatagaggaaatacagagagaacctcttccacttttacttttcgtccaaataaaatgcatggtgtaccagaagttgaagatcgggttgaggattggggctagctcgatgacactaaggccccaacatcgcgggacctgctgtggcgcggattcttaggaacgctgttctagccggccccctctccaggggtcgccgtggccggcattatttcctagttcttcttgtaaccctgaggtgccagcgcggggagtgaggaggggtcagggggctaaggatgcaacctctgacgttctgcgccttcctaggagagtcttacatgtgttgagatttcacaagcaatgcgagttgtaaaataccagctctacaagaagctaggctctgtgacggcatagttttcagtagctttatcacaatattcacaatggagaattatatgacatggtagcagaaataggcccttttatgtgttgcttctattttacctcaaattgtagatatagggtaatcaataaaatccatccatgcctttcacacactaagt

SEQ ID NO: 5061 - protein, 564 aa, Homo sapiens; identical to SEQ ID NO: 4061

SEQ ID NO: 5062 - DNA, 4213 bp, Homo sapiens
gggtcttgttctgtctcccaagctggagtgcagtggtgtggtcataggtcactgcagcgtcgaactcctaggctcaagtgatcctcttgcctcaggctcctgagtagctgggacaacaggcgtgtaccacacctggatactttttaaatttttggtagagaagggatctcactctattgccaagctggtgtcgaactcttggtcttaagcagccctcccacgtcagcatcccaaagtgttgggatttcagagggatcatggcccaagttgcaatgtccaccctccccgttgaagatgaggagtcctcggagagcaggatggtggtgacattcctcatgtcagctctcgagtccatgtgtaaagaactggccaagtccaaagccgaagtggcctgcattgcagtgtatgaaacagacgtgtttgtcgtcggaactgaaagaggacgtgcttttgtcaataccagaaaggattttcaaaaagattttgtaaaatattgtgttgaagaagaagaaaaagctgcagagatgcataaaatgaaatctacaacccaggcaaatcggatgagtgtagatgctgtagaaattgaaacactcagaaaaacagttgaggactatttctgcttttgctatgggaaagctttaggcaaatccacagtggtacctgtaccatatgagaagatgctgcgagaccagtcggctgtggtagtgcaggggcttccggaaggtgttgcctttaaacaccccgagaactatgatcttgcaaccctgaaatggattttggagaacaaagcagggatttcattcatcattaagagaccttttttagagccaaagaagcatgtaggtggtcgtgtgatggtaacagatgctgacaggtcaatactatctccaggtggaagttgtggccccatcaaagtgaaaactgaacccacagaagattctggaagccaccattcttcagagggcaatgaaggcacagaaatggaagtaccagcagaagattctactcaacatgtcccttcagaaacaagtgaggaccctgaagttgaggtgactattgaagatgatgattattctccaccgtctaagagaccaaaggccaatgagctaccgcagccaccagtcccggaacccgccaatgctgggaagcggaaagtgagggagttcaacttcgagaaatggaatgctcgcatcactgatctacgtaaacaagttgaagaattgtttgaaaggaaatatgctcaagccataaaagccaaaggtccggtgacgatcccgtaccctcttttccagtctcatgttgaagatctttatgtagaaggacttcctgaaggaattccttttagaaggccatctacttacggaattcctcgcctggagaggatattacttgcaaaggaaaggattcgttttgtgattaagaaacatgagcttctgaattcaacacgtgaagatttacagcttgataagccagcttcaggagtaaaggaagaatggtatgccagaatcactaaattaagaaagatggtggatcagcttttctgcaaaaaatttgcggaagccttggggagcactgaagccaaggctgtaccgtaccaaaaatttgaggcacacccgaatgatctgtacgtggaaggactgccagaaaacattcctttccgaagtccctcatggtatggaatcccaaggctggaaaaaatcattcaagtgggcaatcgaattaaatttgttattaaaagaccagaacttctgactcacagtaccactgaagttactcagccaagaacgaatacaccagtcaaagaagattggaatgtcagaattaccaagctacggaagcaagtggaagagatttttaatttgaaatttgctcaagctcttggactcaccgaggcagtaaaagtaccatatcctgtgtttgaatcaaacccggagttcttgaaaggatcgtccgcgggagtaataaaatcaagttcgttgttaaaaaacctgaactagttatttcctacttgcctcctgggatggctagtaaaataaacactaaagctttgcagtcccccaaaagaccacgaagtcctgggagtaattcaaaggttcctgaaattgaggtcaccgtggaaggccctaataacaacaatcctcaaacctcagctgttcgaaccccgacccagactaacggttctaacgttcccttcaagccacgagggagagagttttcctttgaggcctggaatgccaaaatcacggacctaaaacagaaagttgaaaatctcttcaatgagaaatgtggggaagctcttggccttaaacaagctgtgaaggtgccgttcgcgttatttgagtctttcccggaagacttttatgtggaaggcttacctgagggtgtgccattccgaagaccatcgacttttggcattccgaggctggagaagatactcagaaacaaagccaaaattaagttcatcattaaaaagcccgaaatgtttgagacggcgattaaggagagcacctcctctaagagccctcccagaaaaataaattcatcacccaatgttaatactactgcatcaggtgttgaagaccttaacatcattcaggtgacaattccagatgatgataatgaaagactctcgaaagttgaaaaagctagacagctaagagaacaagtgaatgacctctttagtcggaaatttggtgaagctattggtatgggttttcctgtgaaagttccctacaggaaaatcacaattaaccctggctgtgtggtggttgatggcatgcccccgggggtgtccttcaaagcccccagctacctggaaatcagctccatgagaaggatcttagactctgccgagtttatcaaattcacggtcattagaccatttccaggacttgtgattaataaccagctggttgatcagagtgagtcagaaggccccgtgatacaagaatcagctgaaccaagccagttggaagttccagccacagaagaaataaaagagactgatggaagctctcagatcaagcaagaaccagaccccacgtggtagacctcttccctcctaggcttaaagtatcagtggttgagaagagcttttcggacctgttactaccccaagctgtgtaatatacttgtataacagaaataccttctatacaaacctttttttctacttttagatagaaatgtctactttttcagcagttctgtgaattaaagagcagagtgactgtgggtctggaatggctggtgtacttgggaatgtactatcaggattttacagcaatgctgggaaatgacagggaaaatgacaggaatgaatctcaccagattttttatgtactcagcagagccttgagttacggtgtttattttccaatcaagtgaagatatctcctacttctcctactggaacatctcagcttctgcagtgaagaaaaattcctgtgatagttcagttctttagtttttctatttgaaaaaaaaaaatcatttaaatgatcctttgttcacggctctccttaatgactgagtgaacagttcctatctgtatatttgactaaaccttttcctaagctatctctcatggttcctatgtttttttatcataattaaaagcaaaaccatctggatcacctaacagtcagaggtcagtatctcagcgtgtgaattatagaggaaatacagagagaacctcttccacttttacttttcgtccaaataaaatgcatggtgtaccagaagttgaagatcgggttgaggattggggctagctcgatgacactaaggccccaacatcgcgggacctgctgtggcgcggattcttaggaacgctgttctagccggccccctctccaggggtcgccgtggccggcattatttcctagttcttcttgtaaccctgaggtgccagcgcggggagtgaggaggggtcagggggctaaggatgcaacctctgacgttctgcgccttcctaggagagtcttacatgtgttgagatttcacaagcaatgcgagttgtaaaataccagctctacaagaagctaggctctgtgacggcatagttttcagtagctttatcacaatattcacaatggagaattatatgacatggtagcagaaataggcccttttatgtgttgcttctattttacctcaaattgtagatatagggtaatcaataaaatccatccatgcctttcacacactaagt

SEQ ID NO: 5063 - protein, 579 aa, Homo sapiens; identical to SEQ ID NO: 4111

SEQ ID NO: 5064 - DNA, 4007 bp, Homo sapiens
gggtcttgttctgtctcccaagctggagtgcagtggtgtggtcataggtcactgcagcgtcgaactcctaggctcaagtgatcctcttgcctcaggctcctgagtagctgggacaacaggcgtgtaccacacctggatactttttaaatttttggtagagaagggatctcactctattgccaagctggtgtcgaactcttggtcttaagcagccctcccacgtcagcatcccaaagtgttgggatttcagagggatcatggcccaagttgcaatgtccaccctccccgttgaagatgaggagtcctcggagagcaggatggtggtgacattcctcatgtcagctctcgagtccatgtgtaaagaactggccaagtccaaagccgaagtggcctgcattgcagtgtatgaaacagacgtgtttgtcgtcggaactgaaagaggacgtgcttttgtcaataccagaaaggattttcaaaaagattttgtaaaatattgtgttgaagaagaagaaaaagctgcagagatgcataaaatgaaatctacaacccaggcaaatcggatgagtgtagatgctgtagaaattgaaacactcagaaaaacagttgaggactatttctgcttttgctatgggaaagctttaggcaaatccacagtggtacctgtaccatatgagaagatgctgcgagaccagtcggctgtggtagtgcaggggcttccggaaggtgttgcctttaaacaccccgagaactatgatcttgcaaccctgaaatggattttggagaacaaagcagggatttcattcatcattaagagaccttttttagagccaaagaagcatgtaggtggtcgtgtgatggtaacagatgctgacaggtcaatactatctccaggtggaagttgtggccccatcaaagtgaaaactgaacccacagaagattctggcatttccctggaaatggcagctgtgacagtaaaggaagaatcagaagatcctgattattatcaatataacattcaaggaagccaccattcttcagagggcaatgaaggcacagaaatggaagtaccagcagaagattctactcaacatgtcccttcagaaacaagtgaggaccctgaagttgaggtgactattgaagatgatgattattctccaccgtctaagagaccaaaggccaatgagctaccgcagccaccagtcccggaacccgccaatgctgggaagcggaaagtgagggagttcaacttcgagaaatggaatgctcgcatcactgatctacgtaaacaagttgaagaattgtttgaaaggaaatatgctcaagccataaaagccaaaggtccggtgacgatcccgtaccctcttttccagtctcatgttgaagatctttatgtagaaggacttcctgaaggaattccttttagaaggccatctacttacggaattcctcgcctggagaggatattacttgcaaaggaaaggattcgttttgtgattaagaaacatgagcttctgaattcaacacgtgaagatttacagcttgataagccagcttcaggagtaaaggaagaatggtatgccagaatcactaaattaagaaagatggtggatcagcttttctgcaaaaaatttgcggaagccttggggagcactgaagccaaggctgtaccgtaccaaaaatttgaggcacacccgaatgatctgtacgtggaaggactgccagaaaacattcctttccgaagtccctcatggtatggaatcccaaggctggaaaaaatcattcaagtgggcaatcgaattaaatttgttattaaaagaccagaacttctgactcacagtaccactgaagttactcagccaagaacgaatacaccagtcaaagaagattggaatgtcagaattaccaagctacggaagcaagtggaagagatttttaatttgaaatttgctcaagctcttggactcaccgaggcagtaaaagtaccatatcctgtgtttgaatcaaacccggagttcttgaaaggatcgtccgcgggagtaataaaatcaagttcgttgttaaaaaacctgaactagttatttcctacttgcctcctgggatggctagtaaaataaacactaaagctttgcagtcccccaaaagaccacgaagtcctgggagtaattcaaaggttcctgaaattgaggtcaccgtggaaggccctaataacaacaatcctcaaacctcagctgttcgaaccccgacccagactaacggttctaacgttcccttcaagccacgagggagagagttttcctttgaggcctggaatgccaaaatcacggacctaaaacagaaagttgaaaatctcttcaatgagaaatgtggggaagctcttggccttaaacaagctgtgaaggtgccgttcgcgttatttgagtctttcccggaagacttttatgtggaaggcttacctgagggtgtgccattccgaagaccatcgacttttggcattccgaggctggagaagatactcagaaacaaagccaaaattaagttcatcattaaaaagcccgaaatgtttgagacggcgattaaggagagcacctcctctaagagccctcccagaaaaataaattcatcacccaatgttaatactactgcatcaggtgttgaagaccttaacatcattcaggtgacaattccagatgatgataatgaaagactctcgaaagttgaaaaagctagacagctaagagaacaagtgaatgacctctttagtcggaaatttggtgaagctattggtatgggttttcctgtgaaagttccctacaggaaaatcacaattaaccctggctgtgtggtggttgatggcatgcccccgggggtgtccttcaaagcccccagctacctggaaatcagctccatgagaaggatcttagactctgccgagtttatcaaattcacggtcattagaccatttccaggacttgtgattaataaccagctggttgatcagagtgagtcagaaggccccgtgatacaagaatcagctgaaccaagccagttggaagttccagccacagaagaaataaaagagactgatggaagctctcagatcaagcaagaaccagaccccacgtggtagacctcttccctcctaggagccttgagttacggtgtttattttccaatcaagtgaagatatctcctacttctcctactggaacatctcagcttctgcagtgaagaaaaattcctgtgatagttcagttctttagtttttctatttgaaaaaaaaaaatcatttaaatgatcctttgttcacggctctccttaatgactgagtgaacagttcctatctgtatatttgactaaaccttttcctaagctatctctcatggttcctatgtttttttatcataattaaaagcaaaaccatctggatcacctaacagtcagaggtcagtatctcagcgtgtgaattatagaggaaatacagagagaacctcttccacttttacttttcgtccaaataaaatgcatggtgtaccagaagttgaagatcgggttgaggattggggctagctcgatgacactaaggccccaacatcgcgggacctgctgtggcgcggattcttaggaacgctgttctagccggccccctctccaggggtcgccgtggccggcattatttcctagttcttcttgtaaccctgaggtgccagcgcggggagtgaggaggggtcagggggctaaggatgcaacctctgacgttctgcgccttcctaggagagtcttacatgtgttgagatttcacaagcaatgcgagttgtaaaataccagctctacaagaagctaggctctgtgacggcatagttttcagtagctttatcacaatattcacaatggagaattatatgacatggtagcagaaataggcccttttatgtgttgcttctattttacctcaaattgtagatatagggtaatcaataaaatccatccatgcctttcacacactaagt

SEQ ID NO: 5065 - protein, 605 aa, Homo sapiens; identical to SEQ ID NO: 4221

SEQ ID NO: 5066 - DNA, 4407 bp, Homo sapiens
gggtcttgttctgtctcccaagctggagtgcagtggtgtggtcataggtcactgcagcgtcgaactcctaggctcaagtgatcctcttgcctcaggctcctgagtagctgggacaacaggcgtgtaccacacctggatactttttaaatttttggtagagaagggatctcactctattgccaagctggtgtcgaactcttggtcttaagcagccctcccacgtcagcatcccaaagtgttgggatttcagagggatcatggcccaagttgcaatgtccaccctccccgttgaagatgaggagtcctcggagagcaggatggtggtgacattcctcatgtcagctctcgagtccatgtgtaaagaactggccaagtccaaagccgaagtggcctgcattgcagtgtatgaaacagacgtgtttgtcgtcggaactgaaagaggacgtgcttttgtcaataccagaaaggattttcaaaaagattttgtaaaatattgtgttgaagaagaagaaaaagctgcagagatgcataaaatgaaatctacaacccaggcaaatcggatgagtgtagatgctgtagaaattgaaacactcagaaaaacagttgaggactatttctgcttttgctatgggaaagctttaggcaaatccacagtggtacctgtaccatatgagaagatgctgcgagaccagtcggctgtggtagtgcaggggcttccggaaggtgttgcctttaaacaccccgagaactatgatcttgcaaccctgaaatggattttggagaacaaagcagggatttcattcatcattaagagaccttttttagagccaaagaagcatgtaggtggtcgtgtgatggtaacagatgctgacaggtcaatactatctccaggtggaagttgtggccccatcaaagtgaaaactgaacccacagaagattctggcatttccctggaaatggcagctgtgacagtaaaggaagaatcagaagatcctgattattatcaatataacattcaaggaagccaccattcttcagagggcaatgaaggcacagaaatggaagtaccagcagaagatgatgattattctccaccgtctaagagaccaaaggccaatgagctaccgcagccaccagtcccggaacccgccaatgctgggaagcggaaagtgagggagttcaacttcgagaaatggaatgctcgcatcactgatctacgtaaacaagttgaagaattgtttgaaaggaaatatgctcaagccataaaagccaaaggtccggtgacgatcccgtaccctcttttccagtctcatgttgaagatctttatgtagaaggacttcctgaaggaattccttttagaaggccatctacttacggaattcctcgcctggagaggatattacttgcaaaggaaaggattcgttttgtgattaagaaacatgagcttctgaattcaacacgtgaagatttacagcttgataagccagcttcaggagtaaaggaagaatggtatgccagaatcactaaattaagaaagatggtggatcagcttttctgcaaaaaatttgcggaagccttggggagcactgaagccaaggctgtaccgtaccaaaaatttgaggcacacccgaatgatctgtacgtggaaggactgccagaaaacattcctttccgaagtccctcatggtatggaatcccaaggctggaaaaaatcattcaagtgggcaatcgaattaaatttgttattaaaagaccagaacttctgactcacagtaccactgaagttactcagccaagaacgaatacaccagtcaaagaagattggaatgtcagaattaccaagctacggaagcaagtggaagagatttttaatttgaaatttgcttagatttgttgacagcggtttcctggagtgctgtcttgagaacgattctgaggaggctcagcaagaaagagtgtttcagttgattgggtgtgtctgtcatggagaaggaactcaagctcttggactcaccgaggcagtaaaagtaccatatcctgtgtttgaatcaaacccggagttcttgtatgtggaaggcttgccagaggggattcccttccgaagccctacctggtttggaattccacgacttgaaaggatcgtccgcgggagtaataaaatcaagttcgttgttaaaaaacctgaactagttatttcctacttgcctcctgggatggctagtaaaataaacactaaagctttgcagtcccccaaaagaccacgaagtcctgggagtaattcaaaggttcctgaaattgaggtcaccgtggaaggccctaataacaacaatcctcaaacctcagctgttcgaaccccgacccagactaacggttctaacgttcccttcaagccacgagggagagagttttcctttgaggcctggaatgccaaaatcacggacctaaaacagaaagttgaaaatctcttcaatgagaaatgtggggaagctcttggccttaaacaagctgtgaaggtgccgttcgcgttatttgagtctttcccggaagacttttatgtggaaggcttacctgagggtgtgccattccgaagaccatcgacttttggcattccgaggctggagaagatactcagaaacaaagccaaaattaagttcatcattaaaaagcccgaaatgtttgagacggcgattaaggagagcacctcctctaagagccctcccagaaaaataaattcatcacccaatgttaatactactgcatcaggtgttgaagaccttaacatcattcaggtgacaattccagatgatgataatgaaagactctcgaaagttgaaaaagctagacagctaagagaacaagtgaatgacctctttagtcggaaatttggtgaagctattggtatgggttttcctgtgaaagttccctacaggaaaatcacaattaaccctggctgtgtggtggttgatggcatgcccccgggggtgtccttcaaagcccccagctacctggaaatcagctccatgagaaggatcttagactctgccgagtttatcaaattcacggtcattagaccatttccaggacttgtgattaataaccagctggttgatcagagtgagtcagaaggccccgtgatacaagaatcagctgaaccaagccagttggaagttccagccacagaagaaataaaagagactgatggaagctctcagatcaagcaagaaccagaccccacgtggtagacctcttccctcctaggcttaaagtatcagtggttgagaagagcttttcggacctgttactaccccaagctgtgtaatatacttgtataacagaaataccttctatacaaacctttttttctacttttagatagaaatgtctactttttcagcagttctgtgaattaaagagcagagtgactgtgggtctggaatggctggtgtacttgggaatgtactatcaggattttacagcaatgctgggaaatgacagggaaaatgacaggaatgaatctcaccagattttttatgtactcagcagagccttgagttacggtgtttattttccaatcaagtgaagatatctcctacttctcctactggaacatctcagcttctgcagtgaagaaaaattcctgtgatagttcagttctttagtttttctatttgaaaaaaaaaaatcatttaaatgatcctttgttcacggctctccttaatgactgagtgaacagttcctatctgtatatttgactaaaccttttcctaagctatctctcatggttcctatgtttttttatcataattaaaagcaaaaccatctggatcacctaacagtcagaggtcagtatctcagcgtgtgaattatagaggaaatacagagagaacctcttccacttttacttttcgtccaaataaaatgcatggtgtaccagaagttgaagatcgggttgaggattggggctagctcgatgacactaaggccccaacatcgcgggacctgctgtggcgcggattcttaggaacgctgttctagccggccccctctccaggggtcgccgtggccggcattatttcctagttcttcttgtaaccctgaggtgccagcgcggggagtgaggaggggtcagggggctaaggatgcaacctctgacgttctgcgccttcctaggagagtcttacatgtgttgagatttcacaagcaatgcgagttgtaaaataccagctctacaagaagctaggctctgtgacggcatagttttcagtagctttatcacaatattcacaatggagaattatatgacatggtagcagaaataggcccttttatgtgttgcttctattttacctcaaattgtagatatagggtaatcaataaaatccatccatgcctttcacacactaagt

SEQ ID NO: 5067 - protein, 543 aa, Homo sapiens; identical to SEQ ID NO: 4195

SEQ ID NO: 5068 - DNA, 4972 bp, Homo sapiens
gggtcttgttctgtctcccaagctggagtgcagtggtgtggtcataggtcactgcagcgtcgaactcctaggctcaagtgatcctcttgcctcaggctcctgagtagctgggacaacaggcgtgtaccacacctggatactttttaaatttttggtagagaagggatctcactctattgccaagctggtgtcgaactcttggtcttaagcagccctcccacgtcagcatcccaaagtgttgggatttcagagggatcatggcccaagttgcaatgtccaccctccccgttgaagatgaggagtcctcggagagcaggatggtggtgacattcctcatgtcagctctcgagtccatgtgtaaagaactggccaagtccaaagccgaagtggcctgcattgcagtgtatgaaacagacgtgtttgtcgtcggaactgaaagaggacgtgcttttgtcaataccagaaaggattttcaaaaagattttgtaaaatattgtgttgaagaagaagaaaaagctgcagagatgcataaaatgaaatctacaacccaggcaaatcggatgagtgtagatgctgtagaaattgaaacactcagaaaaacagttgaggactatttctgcttttgctatgggaaagctttaggcaaatccacagtggtacctgtaccatatgagaagatgctgcgagaccagtcggctgtggtagtgcaggggcttccggaaggtgttgcctttaaacaccccgagaactatgatcttgcaaccctgaaatggattttggagaacaaagcagggatttcattcatcattaagagaccttttttagagccaaagaagcatgtaggtggtcgtgtgatggtaacagatgctgacaggtcaatactatctccaggtggaagttgtggccccatcaaagtgaaaactgaacccacagaagattctggaagccaccattcttcagagggcaatgaaggcacagaaatggaagtaccagcagaagattctactcaacatgtcccttcagaaacaagtgaggaccctgaagttgaggtgactattgaagatgatgattattctccaccgtctaagagaccaaaggccaatgagctaccgcagccaccagtcccggaacccgccaatgctgggaagcggaaagtgagggagttcaacttcgagaaatggaatgctcgcatcactgatctacgtaaacaagttgaagaattgtttgaaaggaaatatgctcaagccataaaagccaaaggtccggtgacgatcccgtaccctcttttccagtctcatgttgaagatctttatgtagaaggacttcctgaaggaattccttttagaaggccatctacttacggaattcctcgcctggagaggatattacttgcaaaggaaaggattcgttttgtgattaagaaacatgagcttctgaattcaacacgtgaagatttacagcttgataagccagcttcaggagtaaaggaagaatggtatgccagaatcactaaattaagaaagatggtggatcagcttttctgcaaaaaatttgcggaagccttggggagcactgaagccaaggctgtaccgtaccaaaaatttgaggcacacccgaatgatctgtacgtggaaggactgccagaaaacattcctttccgaagtccctcatggtatggaatcccaaggctggaaaaaatcattcaagtgggcaatcgaattaaatttgttattaaaagaccagaacttctgactcacagtaccactgaagttactcagccaagaacgaatacaccagtcaaagaagattggaatgtcagaattaccaagctacggaagcaagtggaagagatttttaatttgaaatttgctcaagctcttggactcaccgaggcagtaaaagtaccatatcctgtgtttgaatcaaacccggagttcttgtatgtggaaggcttgccagaggggattcccttccgaagccctacctggtttggaattccacgacttgaaaggatcgtccgcgggagtaataaaatcaagttcgttgttaaaaaacctgaactagttatttcctacttgcctcctgggatggctagtaaaataaacactaaagctttgcagtcccccaaaagaccacgaagtcctgggagtaattcaaaggttcctgaaattgaggtcaccgtggaaggccctaataacaacaatcctcaaacctcagctgttcgaaccccgacccagactaacggttctaacgttcccttcaagccacgagggagagagttttcctttgaggcctggaatgccaaaatcacggacctaaaacagaaagttgaaaatctcttcaatgagaaatgtggggaagctcttggccttaaacaagctgtgaaggtgccgttcgcgttatttgagtctttcccggaagacttttatgtggaaggcttacctgagggtgtgccattccgaagaccatcgacttttggcattccgaggctggagaagatactcagaaacaaagccaaaattaagttcatcattaaaaagcccgaaatgtttgagacggcgattaaggagagcacctcctctaagagccctcccagaaaaataaattcatcacccaatgttaatactactgcatcaggtgttgaagaccttaacatcattcaggtgacaattccagatgatgataatgaaagactctcgaaagttgaaaaagctagacagctaagagaacaagtgaatgacctctttagtcggaaatttggtgaagctattggtatgggttttcctgtgaaagttccctacaggaaaatcacaattaaccctggctgtgtggtggttgatggcatgcccccgggggtgtccttcaaagcccccagctacctggaaatcagctccatgagaaggatcttagactctgccgagtttatcaaattcacggtcattagaccatttccaggacttgtgattaataaccagctggttgatcagagtgagtcagaaggccccgtgatacaagaatcagctgaaccaagccagttggaagttccagccacagaagaaataaaagagactgatggaagctctcagatcaagcaagaaccagaccccacgtggtagacctcttccctcctagggtaaatcagcttctgtgtcagggatgctgtgtggtgtccatctgaaccccctgcatacgcgtagctaatgtgatctccccactttcacataagatggtggccctgccttcagggaatgtgggagccaggtgggagccttcccggatatttaagctagaagattctacagggagattctccttggatcaatatatgtctctcagtcaaagatgtaaaagcacttttgccttaaaaagaatgttctgtttctaaatagagtcaacgttgtcctcctcattggaattcactatgagtcagaatcattagactgacttttttttttccatagtaatagtattttgcagagtctcacagagctgcagatcttttgttcatcttgcagagttaacaagtctgatcctgttagtccagatttcttaaatttggccaagttataataggagcagtagcttgagacccgaagtcaggaaactttgacaatggatttttttttttaatccagagacttgtactggaatttgccttaccctgtcagctcatggacttaaggtttcatcccgctttatgagtgcttctgaatccaagtcattgttacctgaatttgcaaattaagttgtgatattcgtgactgttaaattcctgtaattagattaacctctttgcttgcttgtttgttttctctcctattttagcttaaagtatcagtggttgagaagagcttttcggacctgttactaccccaagctgtgtaatatacttgtataacagaaataccttctatacaaacctttttttctacttttagatagaaatgtctactttttcagcagttctgtgaattaaagagcagagtgactgtgggtctggaatggctggtgtacttgggaatgtactatcaggattttacagcaatgctgggaaatgacagggaaaatgacaggaatgaatctcaccagattttttatgtactcagcagagccttgagttacggtgtttattttccaatcaagtgaagatatctcctacttctcctactggaacatctcagcttctgcagtgaagaaaaattcctgtgatagttcagttctttagtttttctatttgaaaaaaaaaaatcatttaaatgatcctttgttcacggctctccttaatgactgagtgaacagttcctatctgtatatttgactaaaccttttcctaagctatctctcatggttcctatgtttttttatcataattaaaagcaaaaccatctggatcacctaacagtcagaggtcagtatctcagcgtgtgaattatagaggaaatacagagagaacctcttccacttttacttttcgtccaaataaaatgcatggtgtaccagaagttgaagatcgggttgaggattggggctagctcgatgacactaaggccccaacatcgcgggacctgctgtggcgcggattcttaggaacgctgttctagccggccccctctccaggggtcgccgtggccggcattatttcctagttcttcttgtaaccctgaggtgccagcgcggggagtgaggaggggtcagggggctaaggatgcaacctctgacgttctgcgccttcctaggagagtcttacatgtgttgagatttcacaagcaatgcgagttgtaaaataccagctctacaagaagctaggctctgtgacggcatagttttcagtagctttatcacaatattcacaatggagaattatatgacatggtagcagaaataggcccttttatgtgttgcttctattttacctcaaattgtagatatagggtaatcaataaaatccatccatgcctttcacacactaagt

SEQ ID NO: 5069 - protein, 952 aa, Homo sapiens; identical to SEQ ID NO: 4069

SEQ ID NO: 5070 - DNA, 7799 bp, Homo sapiens
gggtcttgttctgtctcccaagctggagtgcagtggtgtggtcataggtcactgcagcgtcgaactcctaggctcaagtgatcctcttgcctcaggctcctgagtagctgggacaacaggcgtgtaccacacctggatactttttaaatttttggtagagaagggatctcactctattgccaagctggtgtcgaactcttggtcttaagcagccctcccacgtcagcatcccaaagtgttgggatttcagagggatcatggcccaagttgcaatgtccaccctccccgttgaagatgaggagtcctcggagagcaggatggtggtgacattcctcatgtcagctctcgagtccatgtgtaaagaactggccaagtccaaagccgaagtggcctgcattgcagtgtatgaaacagacgtgtttgtcgtcggaactgaaagaggacgtgcttttgtcaataccagaaaggattttcaaaaagattttgtaaaatattgtgttgaagaagaagaaaaagctgcagagatgcataaaatgaaatctacaacccaggcaaatcggatgagtgtagatgctgtagaaattgaaacactcagaaaaacagttgaggactatttctgcttttgctatgggaaagctttaggcaaatccacagtggtacctgtaccatatgagaagatgctgcgagaccagtcggctgtggtagtgcaggggcttccggaaggtgttgcctttaaacaccccgagaactatgatcttgcaaccctgaaatggattttggagaacaaagcagggatttcattcatcattaagagaccttttttagagccaaagaagcatgtaggtggtcgtgtgatggtaacagatgctgacaggtcaatactatctccaggtggaagttgtggccccatcaaagtgaaaactgaacccacagaagattctggcatttccctggaaatggcagctgtgacagtaaaggaagaatcagaagatcctgattattatcaatataacattcaagcaggcccttctgaaactgatgatgttgatgaaaaacagcccctatcgaagcctttgcaaggaagccaccattcttcagagggcaatgaaggcacagaaatggaagtaccagcagaagattctactcaacatgtcccttcagaaacaagtgaggaccctgaagttgaggtgactattgaagatgatgattattctccaccgtctaagagaccaaaggccaatgagctaccgcagccaccagtcccggaacccgccaatgctgggaagcggaaagtgagggagttcaacttcgagaaatggaatgctcgcatcactgatctacgtaaacaagttgaagaattgtttgaaaggaaatatgctcaagccataaaagccaaaggtccggtgacgatcccgtaccctcttttccagtctcatgttgaagatctttatgtagaaggacttcctgaaggaattccttttagaaggccatctacttacggaattcctcgcctggagaggatattacttgcaaaggaaaggattcgttttgtgattaagaaacatgagcttctgaattcaacacgtgaagatttacagcttgataagccagcttcaggagtaaaggaagaatggtatgccagaatcactaaattaagaaagatggtggatcagcttttctgcaaaaaatttgcggaagccttggggagcactgaagccaaggctgtaccgtaccaaaaatttgaggcacacccgaatgatctgtacgtggaaggactgccagaaaacattcctttccgaagtccctcatggtatggaatcccaaggctggaaaaaatcattcaagtgggcaatcgaattaaatttgttattaaaagaccagaacttctgactcacagtaccactgaagttactcagccaagaacgaatacaccagctcaagctcttggactcaccgaggcagtaaaagtaccatatcctgtgtttgaatcaaacccggagttcttgtatgtggaaggcttgccagaggggattcccttccgaagccctacctggtttggaattccacgacttgaaaggatcgtccgcgggagtaataaaatcaagttcgttgttaaaaaacctgaactagttatttcctacttgcctcctgggatggctagtaaaataaacactaaagctttgcagtcccccaaaagaccacgaagtcctgggagtaattcaaaggttcctgaaattgaggtcaccgtggaaggccctaataacaacaatcctcaaacctcagctgttcgaaccccgacccagactaacggttctaacgttcccttcaagccacgagggagagagttttcctttgaggcctggaatgccaaaatcacggacctaaaacagaaagttgaaaatctcttcaatgagaaatgtggggaagctcttggccttaaacaagctgtgaaggtgccgttcgcgttatttgagtctttcccggaagacttttatgtggaaggcttacctgagggtgtgccattccgaagaccatcgacttttggcattccgaggctggagaagatactcagaaacaaagccaaaattaagttcatcattaaaaagcccgaaatgtttgagacggcgattaaggagagcacctcctctaagagccctcccagaaaaataaattcatcacccaatgttaatactactgcatcaggtgttgaagaccttaacatcattcaggtgacaattccagatgatgataatgaaagactctcgaaagttgaaaaagctagacagctaagagaacaagtgaatgacctctttagtcggaaatttggtgaagctattggtatgggttttcctgtgaaagttccctacaggaaaatcacaattaaccctggctgtgtggtggttgatggcatgcccccgggggtgtccttcaaagcccccagctacctggaaatcagctccatgagaaggatcttagactctgccgagtttatcaaattcacggtcattaggtaagtgagagtttcctgcttagtcacaggagcgaatctggagctcatgaggctgactcttctaaaatgcagccacaggtagtcatcgaatccggcttcctatgctgtgcaatcaacaaatcaaaataacttgtgtcatcattagaatgtcagatgtgcttctacgaactaagctgactcttttaattctttggcaaagggttggcaaactaggactgtttgccaaattcaggctgcctcctatttttagagtcttcctgaaacacagctacacccgtattatccatggctgctttcctgtcacagtgagtaagtagctgggactgagaaggcatggcctccaaagtctaaaatatttactctctagcactttgtagaaaaaccttagctaggcacagtggctaacgcctgtaatcccagcattttgggaggccaaggcaggcagatcacctgaggtcaggagttccagaccagcctggccaacatggtgaaatcccatctctacaaaaataaaacagttagctgggcatgatggcgggtgcctgtaatcccagctactcgggaggctgaggcaggatagtcgcttgaacccaggaggtggaggttgcaatgagccaagatcatgccactgcactccagcctggacgacagagtgagactccatcacaagaaaaaaagaactttgtcaacctctgtcttagggcgccttgtcacaggcttcgggtcagacggattcaaccttgcatcagccatttgttagccaggtcactctgttctttgtctgtaaatgagattgatcgttgttcccactgagagtgtcagctccttcccgtagagcaggcatgatgattgtactcacctctgacaccattgtgagtgccacattccttcccacgtccttgtcactgtaagagatgcccacctgagcaccaaccccaggttatcttcccctttgtcttccagccccccagaaacagctacgactcaacctacccaatcatttcatcatcagattgccactgtctctagttcaggtctcttgggactggcactcagaaatctcataataaatcctcttgaggcttctcatacactcgtcttcttccaatcttctttccctcaaaatctcatattttggttccacttcacccaccgtcattctccatatcactcccaggagttaggcaaaaagccccttccgttcttccgtatgttaaacttagaatcactctgttccctgctctgcgtttctattttttgtttttcctccatttactagtagcttaacactttctaacagtgttcttattattgatacgtatctatctcttccataagcttataaggtcacggataatacttctcattgtagtacgtaaatgacgtgggctagatatgagttgaataaacagttatacctgtaaattcttacagagtgaaaataaattgttatactttacaatttgtttctctctttagaccatttccaggacttgtgattaataaccgtgagtattttgtgaagtgttttgtttttgttttttcctggggtctgacgtgtgtgcgtgtgagtgtgtatacatgcttaacgtatatcacgttacttcacctatgtcagtaaccaggccaaatacttgttttagccctcagtaaaaacaccaggcacttcctagttgtaaaattattcaagcttcttaacttcctatcctcgatgcacttaatcataaaatggtaataatagcaccgattttgggggagtcgttccagtagatggaaagcatctggaacaggtgtcagcaagctcctgccgacgtgtatgcataaagttttattgaaaccaccatcgtgtccatttgtttatggcagaactgagagatggcagcagcaagtgtgtgcctgcaaaacctaaaatatttactaattggctctgcaagaaaagagtttgcatccccctaacctagaacagtgtctagcctctagtatgtgtttagcctacagtatgtgctcagcgaatacaatctatatttattactgcttttatgactgttataattactgtgcttggatttcgttacaaagtaagtcacaatgtgcctgcttctgttagtatttcagcacagtgcctggcacacatggggctctcaaatattgctgagcgagtgaacaaatgtcctttcaattccttaacgttgatgtcattttcaatagtattttgagccaaacttaattttgcgagtgtgttttgttttcttaactttattattaaaaatgtataaaagtgaggccaggcgtggtggctcacgcctgtaatcccagcagtttgggaggctgaggcaggcggatcagttgaggttgggagttggagaccagcccgtccaacatggtgaaagcctgtctctactaaaaatacaaaaatcagctgggtgtggtggcgcgtgcctgtaatcccagctactcaggaggctgaggcaggagagttgcttgaatcctagaggtggaggttgcagtgagctgagatcgtgccattgcactccagcctgggcaacaagagcaaaactctgtcccaataaataaataaataaaatgttctcttttgttcctgttcttgtgcggtagtgtggtatagagttttatggtaattactgtgaattagtgattctgagggacatatcagaactctgaggtttgtttccttctcatcttgagggaaacagcaaatgtatgttaaaatgcttttccaagggaacaacacatccttacattatttaaaccaatctgcttcattttcagagctggttgatcagagtgagtcagaaggccccgtgatacaagaatcagctgaaccaagccagttggaagttccagccacagaagaaataaaagagactgatggaagctctcagatcaagcaagaaccagaccccacgtggtagacctcttccctcctagggtaaatcagcttctgtgtcagggatgctgtgtggtgtccatctgaaccccctgcatacgcgtagctaatgtgatctccccactttcacataagatggtggccctgccttcagggaatgtgggagccaggtgggagccttcccggatatttaagctagaagattctacagggagattctccttggatcaatatatgtctctcagtcaaagatgtaaaagcacttttgccttaaaaagaatgttctgtttctaaatagagtcaacgttgtcctcctcattggaattcactatgagtcagaatcattagactgacttttttttttccatagtaatagtattttgcagagtctcacagagctgcagatcttttgttcatcttgcagagttaacaagtctgatcctgttagtccagatttcttaaatttggccaagttataataggagcagtagcttgagacccgaagtcaggaaactttgacaatggatttttttttttaatccagagacttgtactggaatttgccttaccctgtcagctcatggacttaaggtttcatcccgctttatgagtgcttctgaatccaagtcattgttacctgaatttgcaaattaagttgtgatattcgtgactgttaaattcctgtaattagattaacctctttgcttgcttgtttgttttctctcctattttagcttaaagtatcagtggttgagaagagcttttcggacctgttactaccccaagctgtgtaatatacttgtataacagaaataccttctatacaaacctttttttctacttttagatagaaatgtctactttttcagcagttctgtgaattaaagagcagagtgactgtgggtctggaatggctggtgtacttgggaatgtactatcaggattttacagcaatgctgggaaatgacagggaaaatgacaggaatgaatctcaccagattttttatgtactcagcagagccttgagttacggtgtttattttccaatcaagtgaagatatctcctacttctcctactggaacatctcagcttctgcagtgaagaaaaattcctgtgatagttcagttctttagtttttctatttgaaaaaaaaaaatcatttaaatgatcctttgttcacggctctccttaatgactgagtgaacagttcctatctgtatatttgactaaaccttttcctaagctatctctcatggttcctatgtttttttatcataattaaaagcaaaaccatctggatcacctaacagtcagaggtcagtatctcagcgtgtgaattatagaggaaatacagagagaacctcttccacttttacttttcgtccaaataaaatgcatggtgtaccagaagttgaagatcgggttgaggattggggctagctcgatgacactaaggccccaacatcgcgggacctgctgtggcgcggattcttaggaacgctgttctagccggccccctctccaggggtcgccgtggccggcattatttcctagttcttcttgtaaccctgaggtgccagcgcggggagtgaggaggggtcagggggctaaggatgcaacctctgacgttctgcgccttcctaggagagtcttacatgtgttgagatttcacaagcaatgcgagttgtaaaataccagctctacaagaagctaggctctgtgacggcatagttttcagtagctttatcacaatattcacaatggagaattatatgacatggtagcagaaataggcccttttatgtgttgcttctattttacctcaaattgtagatatagggtaatcaataaaatccatccatgcctttcacacactaagt

SEQ ID NO: 5071 - protein, 918 aa, Homo sapiens; identical to SEQ ID NO: 4169

SEQ ID NO: 5072 - DNA, 7983 bp, Homo sapiens
gggtcttgttctgtctcccaagctggagtgcagtggtgtggtcataggtcactgcagcgtcgaactcctaggctcaagtgatcctcttgcctcaggctcctgagtagctgggacaacaggcgtgtaccacacctggatactttttaaatttttggtagagaagggatctcactctattgccaagctggtgtcgaactcttggtcttaagcagccctcccacgtcagcatcccaaagtgttgggatttcagagggatcatggcccaagttgcaatgtccaccctccccgttgaagatgaggagtcctcggagagcaggatggtggtgacattcctcatgtcagctctcgagtccatgtgtaaagaactggccaagtccaaagccgaagtggcctgcattgcagtgtatgaaacagacgtgtttgtcgtcggaactgaaagaggacgtgcttttgtcaataccagaaaggattttcaaaaagattttgtaaaatattgtgttgaagaagaagaaaaagctgcagagatgcataaaatgaaatctacaacccaggcaaatcggatgagtgtagatgctgtagaaattgaaacactcagaaaaacagttgaggactatttctgcttttgctatgggaaagctttaggcaaatccacagtggtacctgtaccatatgagaagatgctgcgagaccagtcggctgtggtagtgcaggggcttccggaaggtgttgcctttaaacaccccgagaactatgatcttgcaaccctgaaatggattttggagaacaaagcagggatttcattcatcattaagagaccttttttagagccaaagaagcatgtaggtggtcgtgtgatggtaacagatgctgacaggtcaatactatctccaggtggaagttgtggccccatcaaagtgaaaactgaacccacagaagattctggcatttccctggaaatggcagctgtgacagtaaaggaagaatcagaagatcctgattattatcaatataacattcaagcaggcccttctgaaactgatgatgttgatgaaaaacagcccctatcgaagcctttgcaaggaagccaccattcttcagagggcaatgaaggcacagaaatggaagtaccagcagaagattctactcaacatgtcccttcagaaacaagtgaggaccctgaagttgaggtgactattgaagatgatgattattctccaccgtctaagagaccaaaggccaatgagctaccgcagccaccagtcccggaacccgccaatgctgggaagcggaaagtgagggagttcaacttcgagaaatggaatgctcgcatcactgatctacgtaaacaagttgaagaattgtttgaaaggaaatatgctcaagccataaaagccaaaggtccggtgacgatcccgtaccctcttttccagtctcatgttgaagatctttatgtagaaggacttcctgaaggaattccttttagaaggccatctacttacggaattcctcgcctggagaggatattacttgcaaaggaaaggattcgttttgtgattaagaaacatgagcttctgaattcaacacgtgaagatttacagcttgataagccagcttcaggagtaaaggaagaatggtatgccagaatcactaaattaagaaagatggtggatcagcttttctgcaaaaaatttgcggaagccttggggagcactgaagccaaggctgtaccgtaccaaaaatttgaggcacacccgaatgatctgtacgtggaaggactgccagaaaacattcctttccgaagtccctcatggtatggaatcccaaggctggaaaaaatcattcaagtgggcaatcgaattaaatttgttattaaaagaccagaacttctgactcacagtaccactgaagttactcagccaagaacgaatacaccagtcaaagaagattggaatgtcagaattaccaagctacggaagcaagtggaagagatttttaatttgaaatttgcttagatttgttgacagcggtttcctggagtgctgtcttgagaacgattctgaggaggctcagcaagaaagagtgtttcagttgattgggtgtgtctgtcatggagaaggaactcaagctcttggactcaccgaggcagtaaaagtaccatatcctgtgtttgaatcaaacccggagttcttgtatgtggaaggcttgccagaggggattcccttccgaagccctacctggtttggaattccacgacttgaaaggatcgtccgcgggagtaataaaatcaagttcgttgttaaaaaacctgaactagttatttcctacttgcctcctgggatggctagtaaaataaacactaaagctttgcagtcccccaaaagaccacgaagtcctgggagtaattcaaaggttcctgaaattgaggtcaccgtggaaggccctaataacaacaatcctcaaacctcagctgttcgaaccccgacccagactaacggttctaacgttcccttcaagccacgagggagagagttttcctttgaggcctggaatgccaaaatcacggacctaaaacagaaagttgaaaatctcttcaatgagaaatgtggggaagctcttggccttaaacaagctgtgaaggtgccgttcgcgttatttgagtctttcccggaagacttttatgtggaaggcttacctgagggtgtgccattccgaagaccatcgacttttggcattccgaggctggagaagatactcagaaacaaagccaaaattaagttcatcattaaaaagcccgaaatgtttgagacggcgattaaggagagcacctcctctaagagccctcccagaaaaataaattcatcacccaatgttaatactactgcatcaggtgttgaagaccttaacatcattcaggtgacaattccagatgatgataatgaaagactctcgaaagttgaaaaagctagacagctaagagaacaagtgaatgacctctttagtcggaaatttggtgaagctattggtatgggttttcctgtgaaagttccctacaggaaaatcacaattaaccctggctgtgtggtggttgatggcatgcccccgggggtgtccttcaaagcccccagctacctggaaatcagctccatgagaaggatcttagactctgccgagtttatcaaattcacggtcattaggtaagtgagagtttcctgcttagtcacaggagcgaatctggagctcatgaggctgactcttctaaaatgcagccacaggtagtcatcgaatccggcttcctatgctgtgcaatcaacaaatcaaaataacttgtgtcatcattagaatgtcagatgtgcttctacgaactaagctgactcttttaattctttggcaaagggttggcaaactaggactgtttgccaaattcaggctgcctcctatttttagagtcttcctgaaacacagctacacccgtattatccatggctgctttcctgtcacagtgagtaagtagctgggactgagaaggcatggcctccaaagtctaaaatatttactctctagcactttgtagaaaaaccttagctaggcacagtggctaacgcctgtaatcccagcattttgggaggccaaggcaggcagatcacctgaggtcaggagttccagaccagcctggccaacatggtgaaatcccatctctacaaaaataaaacagttagctgggcatgatggcgggtgcctgtaatcccagctactcgggaggctgaggcaggatagtcgcttgaacccaggaggtggaggttgcaatgagccaagatcatgccactgcactccagcctggacgacagagtgagactccatcacaagaaaaaaagaactttgtcaacctctgtcttagggcgccttgtcacaggcttcgggtcagacggattcaaccttgcatcagccatttgttagccaggtcactctgttctttgtctgtaaatgagattgatcgttgttcccactgagagtgtcagctccttcccgtagagcaggcatgatgattgtactcacctctgacaccattgtgagtgccacattccttcccacgtccttgtcactgtaagagatgcccacctgagcaccaaccccaggttatcttcccctttgtcttccagccccccagaaacagctacgactcaacctacccaatcatttcatcatcagattgccactgtctctagttcaggtctcttgggactggcactcagaaatctcataataaatcctcttgaggcttctcatacactcgtcttcttccaatcttctttccctcaaaatctcatattttggttccacttcacccaccgtcattctccatatcactcccaggagttaggcaaaaagccccttccgttcttccgtatgttaaacttagaatcactctgttccctgctctgcgtttctattttttgtttttcctccatttactagtagcttaacactttctaacagtgttcttattattgatacgtatctatctcttccataagcttataaggtcacggataatacttctcattgtagtacgtaaatgacgtgggctagatatgagttgaataaacagttatacctgtaaattcttacagagtgaaaataaattgttatactttacaatttgtttctctctttagaccatttccaggacttgtgattaataaccgtgagtattttgtgaagtgttttgtttttgttttttcctggggtctgacgtgtgtgcgtgtgagtgtgtatacatgcttaacgtatatcacgttacttcacctatgtcagtaaccaggccaaatacttgttttagccctcagtaaaaacaccaggcacttcctagttgtaaaattattcaagcttcttaacttcctatcctcgatgcacttaatcataaaatggtaataatagcaccgattttgggggagtcgttccagtagatggaaagcatctggaacaggtgtcagcaagctcctgccgacgtgtatgcataaagttttattgaaaccaccatcgtgtccatttgtttatggcagaactgagagatggcagcagcaagtgtgtgcctgcaaaacctaaaatatttactaattggctctgcaagaaaagagtttgcatccccctaacctagaacagtgtctagcctctagtatgtgtttagcctacagtatgtgctcagcgaatacaatctatatttattactgcttttatgactgttataattactgtgcttggatttcgttacaaagtaagtcacaatgtgcctgcttctgttagtatttcagcacagtgcctggcacacatggggctctcaaatattgctgagcgagtgaacaaatgtcctttcaattccttaacgttgatgtcattttcaatagtattttgagccaaacttaattttgcgagtgtgttttgttttcttaactttattattaaaaatgtataaaagtgaggccaggcgtggtggctcacgcctgtaatcccagcagtttgggaggctgaggcaggcggatcagttgaggttgggagttggagaccagcccgtccaacatggtgaaagcctgtctctactaaaaatacaaaaatcagctgggtgtggtggcgcgtgcctgtaatcccagctactcaggaggctgaggcaggagagttgcttgaatcctagaggtggaggttgcagtgagctgagatcgtgccattgcactccagcctgggcaacaagagcaaaactctgtcccaataaataaataaataaaatgttctcttttgttcctgttcttgtgcggtagtgtggtatagagttttatggtaattactgtgaattagtgattctgagggacatatcagaactctgaggtttgtttccttctcatcttgagggaaacagcaaatgtatgttaaaatgcttttccaagggaacaacacatccttacattatttaaaccaatctgcttcattttcagagctggttgatcagagtgagtcagaaggccccgtgatacaagaatcagctgaaccaagccagttggaagttccagccacagaagaaataaaagagactgatggaagctctcagatcaagcaagaaccagaccccacgtggtagacctcttccctcctagggtaaatcagcttctgtgtcagggatgctgtgtggtgtccatctgaaccccctgcatacgcgtagctaatgtgatctccccactttcacataagatggtggccctgccttcagggaatgtgggagccaggtgggagccttcccggatatttaagctagaagattctacagggagattctccttggatcaatatatgtctctcagtcaaagatgtaaaagcacttttgccttaaaaagaatgttctgtttctaaatagagtcaacgttgtcctcctcattggaattcactatgagtcagaatcattagactgacttttttttttccatagtaatagtattttgcagagtctcacagagctgcagatcttttgttcatcttgcagagttaacaagtctgatcctgttagtccagatttcttaaatttggccaagttataataggagcagtagcttgagacccgaagtcaggaaactttgacaatggatttttttttttaatccagagacttgtactggaatttgccttaccctgtcagctcatggacttaaggtttcatcccgctttatgagtgcttctgaatccaagtcattgttacctgaatttgcaaattaagttgtgatattcgtgactgttaaattcctgtaattagattaacctctttgcttgcttgtttgttttctctcctattttagcttaaagtatcagtggttgagaagagcttttcggacctgttactaccccaagctgtgtaatatacttgtataacagaaataccttctatacaaacctttttttctacttttagatagaaatgtctactttttcagcagttctgtgaattaaagagcagagtgactgtgggtctggaatggctggtgtacttgggaatgtactatcaggattttacagcaatgctgggaaatgacagggaaaatgacaggaatgaatctcaccagattttttatgtactcagcagagccttgagttacggtgtttattttccaatcaagtgaagatatctcctacttctcctactggaacatctcagcttctgcagtgaagaaaaattcctgtgatagttcagttctttagtttttctatttgaaaaaaaaaaatcatttaaatgatcctttgttcacggctctccttaatgactgagtgaacagttcctatctgtatatttgactaaaccttttcctaagctatctctcatggttcctatgtttttttatcataattaaaagcaaaaccatctggatcacctaacagtcagaggtcagtatctcagcgtgtgaattatagaggaaatacagagagaacctcttccacttttacttttcgtccaaataaaatgcatggtgtaccagaagttgaagatcgggttgaggattggggctagctcgatgacactaaggccccaacatcgcgggacctgctgtggcgcggattcttaggaacgctgttctagccggccccctctccaggggtcgccgtggccggcattatttcctagttcttcttgtaaccctgaggtgccagcgcggggagtgaggaggggtcagggggctaaggatgcaacctctgacgttctgcgccttcctaggagagtcttacatgtgttgagatttcacaagcaatgcgagttgtaaaataccagctctacaagaagctaggctctgtgacggcatagttttcagtagctttatcacaatattcacaatggagaattatatgacatggtagcagaaataggcccttttatgtgttgcttctattttacctcaaattgtagatatagggtaatcaataaaatccatccatgcctttcacacactaagt

SEQ ID NO: 5073 - protein, 584 aa, Homo sapiens; identical to SEQ ID NO: 4053

SEQ ID NO: 5074 - DNA, 4118 bp, Homo sapiens
gggtcttgttctgtctcccaagctggagtgcagtggtgtggtcataggtcactgcagcgtcgaactcctaggctcaagtgatcctcttgcctcaggctcctgagtagctgggacaacaggcgtgtaccacacctggatactttttaaatttttggtagagaagggatctcactctattgccaagctggtgtcgaactcttggtcttaagcagccctcccacgtcagcatcccaaagtgttgggatttcagagggatcatggcccaagttgcaatgtccaccctccccgttgaagatgaggagtcctcggagagcaggatggtggtgacattcctcatgtcagctctcgagtccatgtgtaaagaactggccaagtccaaagccgaagtggcctgcattgcagtgtatgaaacagacgtgtttgtcgtcggaactgaaagaggacgtgcttttgtcaataccagaaaggattttcaaaaagattttgtaaaatattgtgttgaagaagaagaaaaagctgcagagatgcataaaatgaaatctacaacccaggcaaatcggatgagtgtagatgctgtagaaattgaaacactcagaaaaacagttgaggactatttctgcttttgctatgggaaagctttaggcaaatccacagtggtacctgtaccatatgagaagatgctgcgagaccagtcggctgtggtagtgcaggggcttccggaaggtgttgcctttaaacaccccgagaactatgatcttgcaaccctgaaatggattttggagaacaaagcagggatttcattcatcattaagagaccttttttagagccaaagaagcatgtaggtggtcgtgtgatggtaacagatgctgacaggtcaatactatctccaggtggaagttgtggccccatcaaagtgaaaactgaacccacagaagattctggcatttccctggaaatggcagctgtgacagtaaaggaagaatcagaagatcctgattattatcaatataacattcaagcaggcccttctgaaactgatgatgttgatgaaaaacagcccctatcgaagcctttgcaaggaagccaccattcttcagagggcaatgaaggcacagaaatggaagtaccagcagaagattctactcaacatgtcccttcagaaacaagtgaggaccctgaagttgaggtgactattgaagatgatgattattctccaccgtctaagagaccaaaggccaatgagctaccgcagccaccagtcccggaacccgccaatgctgggaagcggaaagtgagggagttcaacttcgagaaatggaatgctcgcatcactgatctacgtaaacaagttgaagaattgtttgaaaggaaatatgctcaagccataaaagccaaaggtccggtgacgatcccgtaccctcttttccagtctcatgttgaagatctttatgtagaaggacttcctgaaggaattccttttagaaggccatctacttacggaattcctcgcctggagaggatattacttgcaaaggaaaggattcgttttgtgattaagaaacatgagcttctgaattcaacacgtgaagatttacagcttgataagccagcttcaggagtaaaggaagaatggtatgccagaatcactaaattaagaaagatggtggatcagcttttctgcaaaaaatttgcggaagccttggggagcactgaagccaaggctgtaccgtaccaaaaatttgaggcacacccgaatgatctgtacgtggaaggactgccagaaaacattcctttccgaagtccctcatggtatggaatcccaaggctggaaaaaatcattcaagtgggcaatcgaattaaatttgttattaaaagaccagaacttctgactcacagtaccactgaagttactcagccaagaacgaatacaccagctcaagctcttggactcaccgaggcagtaaaagtaccatatcctgtgtttgaatcaaacccggagttcttgtatgtggaaggcttgccagaggggattcccttccgaagccctacctggtttggaattccacgacttgaaaggatcgtccgcgggagtaataaaatcaagttcgttgttaaaaaacctgaactagttatttcctacttgcctcctgggatggctagtaaaataaacactaaagctttgcagtcccccaaaagaccacgaagtcctgggagtaattcaaaggttcctgaaattgaggtcaccgtggaaggccctaataacaacaatcctcaaacctcagctgttcgaaccccgacccagactaacggttctaacgttcccttcaagccacgagggagagagttttcctttgaggcctggaatgccaaaatcacggacctaaaacagaaagttgaaaatctcttcaatgagaaatgtggggaagctcttggccttaaacaagctgtgaaggtgccgttcgcgttatttgagtctttcccggaagacttttatgtggaaggcttacctgagggtgtgccattccgaagaccatcgacttttggcattccgaggctggagaagatactcagaaacaaagccaaaattaagttcatcattaaaaagcccgaaatgtttgagacggcgattaaggagagcacctcctctaagagccctcccagaaaaataaattcatcacccaatgttaatactactgcatcaggtgttgaagaccttaacatcattcaggtgacaattccagatgatgataatgaaagactctcgaaagttgaaaaagctagacagctaagagaacaagtgaatgacctctttagtcggaaatttggtgaagctattggtatgggttttcctgtgaaagttccctacaggaaaatcacaattaaccctggctgtgtggtggttgatggcatgcccccgggggtgtccttcaaagcccccagctacctggaaatcagctccatgagaaggatcttagactctgccgagtttatcaaattcacggtcattagaccatttccaggacttgtgattaataaccagctggttgatcagagtgagtcagaaggccccgtgatacaagaatcagctgaaccaagccagttggaagttccagccacagaagaaataaaagagactgatggaagctctcagatcaagcaagaaccagaccccacgtggtagacctcttccctcctaggcttaaagtatcagtggttgagaagagcttttcggacctgttactaccccaagctgtagccttgagttacggtgtttattttccaatcaagtgaagatatctcctacttctcctactggaacatctcagcttctgcagtgaagaaaaattcctgtgatagttcagttctttagtttttctatttgaaaaaaaaaaatcatttaaatgatcctttgttcacggctctccttaatgactgagtgaacagttcctatctgtatatttgactaaaccttttcctaagctatctctcatggttcctatgtttttttatcataattaaaagcaaaaccatctggatcacctaacagtcagaggtcagtatctcagcgtgtgaattatagaggaaatacagagagaacctcttccacttttacttttcgtccaaataaaatgcatggtgtaccagaagttgaagatcgggttgaggattggggctagctcgatgacactaaggccccaacatcgcgggacctgctgtggcgcggattcttaggaacgctgttctagccggccccctctccaggggtcgccgtggccggcattatttcctagttcttcttgtaaccctgaggtgccagcgcggggagtgaggaggggtcagggggctaaggatgcaacctctgacgttctgcgccttcctaggagagtcttacatgtgttgagatttcacaagcaatgcgagttgtaaaataccagctctacaagaagctaggctctgtgacggcatagttttcagtagctttatcacaatattcacaatggagaattatatgacatggtagcagaaataggcccttttatgtgttgcttctattttacctcaaattgtagatatagggtaatcaataaaatccatccatgcctttcacacactaagt

SEQ ID NO: 5075 - protein, 974 aa, Homo sapiens; identical to SEQ ID NO: 4101

SEQ ID NO: 5076 - DNA, 5171 bp, Homo sapiens
gggtcttgttctgtctcccaagctggagtgcagtggtgtggtcataggtcactgcagcgtcgaactcctaggctcaagtgatcctcttgcctcaggctcctgagtagctgggacaacaggcgtgtaccacacctggatactttttaaatttttggtagagaagggatctcactctattgccaagctggtgtcgaactcttggtcttaagcagccctcccacgtcagcatcccaaagtgttgggatttcagagggatcatggcccaagttgcaatgtccaccctccccgttgaagatgaggagtcctcggagagcaggatggtggtgacattcctcatgtcagctctcgagtccatgtgtaaagaactggccaagtccaaagccgaagtggcctgcattgcagtgtatgaaacagacgtgtttgtcgtcggaactgaaagaggacgtgcttttgtcaataccagaaaggattttcaaaaagattttgtaaaatattgtgttgaagaagaagaaaaagctgcagagatgcataaaatgaaatctacaacccaggcaaatcggatgagtgtagatgctgtagaaattgaaacactcagaaaaacagttgaggactatttctgcttttgctatgggaaagctttaggcaaatccacagtggtacctgtaccatatgagaagatgctgcgagaccagtcggctgtggtagtgcaggggcttccggaaggtgttgcctttaaacaccccgagaactatgatcttgcaaccctgaaatggattttggagaacaaagcagggatttcattcatcattaagagaccttttttagagccaaagaagcatgtaggtggtcgtgtgatggtaacagatgctgacaggtcaatactatctccaggtggaagttgtggccccatcaaagtgaaaactgaacccacagaagattctggcatttccctggaaatggcagctgtgacagtaaaggaagaatcagaagatcctgattattatcaatataacattcaagcaggcccttctgaaactgatgatgttgatgaaaaacagcccctatcgaagcctttgcaaggaagccaccattcttcagagggcaatgaaggcacagaaatggaagtaccagcagaagattctactcaacatgtcccttcagaaacaagtgaggaccctgaagttgaggtgactattgaagatgatgattattctccaccgtctaagagaccaaaggccaatgagctaccgcagccaccagtcccggaacccgccaatgctgggaagcggaaagtgagggagttcaacttcgagaaatggaatgctcgcatcactgatctacgtaaacaagttgaagaattgtttgaaaggaaatatgctcaagccataaaagccaaaggtccggtgacgatcccgtaccctcttttccagtctcatgttgaagatctttatgtagaaggacttcctgaaggaattccttttagaaggccatctacttacggaattcctcgcctggagaggatattacttgcaaaggaaaggattcgttttgtgattaagaaacatgagcttctgaattcaacacgtgaagatttacagcttgataagccagcttcaggagtaaaggaagaatggtatgccagaatcactaaattaagaaagatggtggatcagcttttctgcaaaaaatttgcggaagccttggggagcactgaagccaaggctgtaccgtaccaaaaatttgaggcacacccgaatgatctgtacgtggaaggactgccagaaaacattcctttccgaagtccctcatggtatggaatcccaaggctggaaaaaatcattcaagtgggcaatcgaattaaatttgttattaaaagaccagaacttctgactcacagtaccactgaagttactcagccaagaacgaatacaccagtcaaagaagattggaatgtcagaattaccaagctacggaagcaagtggaagagatttttaatttgaaatttgcttagatttgttgacagcggtttcctggagtgctgtcttgagaacgattctgaggaggctcagcaagaaagagtgtttcagttgattgggtgtgtctgtcatggagaaggaactcaagctcttggactcaccgaggcagtaaaagtaccatatcctgtgtttgaatcaaacccggagttcttgtatgtggaaggcttgccagaggggattcccttccgaagccctacctggtttggaattccacgacttgaaaggatcgtccgcgggagtaataaaatcaagttcgttgttaaaaaacctgaactagttatttcctacttgcctcctgggatggctagtaaaataaacactaaagctttgcagtcccccaaaagaccacgaagtcctgggagtaattcaaaggttcctgaaattgaggtcaccgtggaaggccctaataacaacaatcctcaaacctcagctgttcgaaccccgacccagactaacggttctaacgttcccttcaagccacgagggagagagttttcctttgaggcctggaatgccaaaatcacggacctaaaacagaaagttgaaaatctcttcaatgagaaatgtggggaagctcttggccttaaacaagctgtgaaggtgccgttcgcgttatttgagtctttcccggaagacttttatgtggaaggcttacctgagggtgtgccattccgaagaccatcgacttttggcattccgaggctggagaagatactcagaaacaaagccaaaattaagttcatcattaaaaagcccgaaatgtttgagacggcgattaaggagagcacctcctctaagagccctcccagaaaaataaattcatcacccaatgttaatactactgcatcaggtgttgaagaccttaacatcattcaggtgacaattccagatgatgataatgaaagactctcgaaagttgaaaaagctagacagctaagagaacaagtgaatgacctctttagtcggaaatttggtgaagctattggtatgggttttcctgtgaaagttccctacaggaaaatcacaattaaccctggctgtgtggtggttgatggcatgcccccgggggtgtccttcaaagcccccagctacctggaaatcagctccatgagaaggatcttagactctgccgagtttatcaaattcacggtcattagaccatttccaggacttgtgattaataaccagctggttgatcagagtgagtcagaaggccccgtgatacaagaatcagctgaaccaagccagttggaagttccagccacagaaggtaaaaggacctcttccctcctagggtaaatcagcttctgtgtcagggatgctgtgtggtgtccatctgaaccccctgcatacgcgtagctaatgtgatctccccactttcacataagatggtggccctgccttcagggaatgtgggagccaggtgggagccttcccggatatttaagctagaagattctacagggagattctccttggatcaatatatgtctctcagtcaaagatgtaaaagcacttttgccttaaaaagaatgttctgtttctaaatagagtcaacgttgtcctcctcattggaattcactatgagtcagaatcattagactgacttttttttttccatagtaatagtattttgcagagtctcacagagctgcagatcttttgttcatcttgcagagttaacaagtctgatcctgttagtccagatttcttaaatttggccaagttataataggagcagtagcttgagacccgaagtcaggaaactttgacaatggatttttttttttaatccagagacttgtactggaatttgccttaccctgtcagctcatggacttaaggtttcatcccgctttatgagtgcttctgaatccaagtcattgttacctgaatttgcaaattaagttgtgatattcgtgactgttaaattcctgtaattagattaacctctttgcttgcttgtttgttttctctcctattttagcttaaagtatcagtggttgagaagagcttttcggacctgttactaccccaagctgtgtaatatacttgtataacagaaataccttctatacaaacctttttttctacttttagatagaaatgtctactttttcagcagttctgtgaattaaagagcagagtgactgtgggtctggaatggctggtgtacttgggaatgtactatcaggattttacagcaatgctgggaaatgacagggaaaatgacaggaatgaatctcaccagattttttatgtactcagcagagccttgagttacggtgtttattttccaatcaagtgaagatatctcctacttctcctactggaacatctcagcttctgcagtgaagaaaaattcctgtgatagttcagttctttagtttttctatttgaaaaaaaaaaatcatttaaatgatcctttgttcacggctctccttaatgactgagtgaacagttcctatctgtatatttgactaaaccttttcctaagctatctctcatggttcctatgtttttttatcataattaaaagcaaaaccatctggatcacctaacagtcagaggtcagtatctcagcgtgtgaattatagaggaaatacagagagaacctcttccacttttacttttcgtccaaataaaatgcatggtgtaccagaagttgaagatcgggttgaggattggggctagctcgatgacactaaggccccaacatcgcgggacctgctgtggcgcggattcttaggaacgctgttctagccggccccctctccaggggtcgccgtggccggcattatttcctagttcttcttgtaaccctgaggtgccagcgcggggagtgaggaggggtcagggggctaaggatgcaacctctgacgttctgcgccttcctaggagagtcttacatgtgttgagatttcacaagcaatgcgagttgtaaaataccagctctacaagaagctaggctctgtgacggcatagttttcagtagctttatcacaatattcacaatggagaattatatgacatggtagcagaaataggcccttttatgtgttgcttctattttacctcaaattgtagatatagggtaatcaataaaatccatccatgcctttcacacactaagt

SEQ ID NO: 5077 - protein, 584 aa, Homo sapiens; identical to SEQ ID NO: 4053

SEQ ID NO: 5078 - DNA, 3676 bp, Homo sapiens
gggtcttgttctgtctcccaagctggagtgcagtggtgtggtcataggtcactgcagcgtcgaactcctaggctcaagtgatcctcttgcctcaggctcctgagtagctgggacaacaggcgtgtaccacacctggatactttttaaatttttggtagagaagggatctcactctattgccaagctggtgtcgaactcttggtcttaagcagccctcccacgtcagcatcccaaagtgttgggatttcagagggatcatggcccaagttgcaatgtccaccctccccgttgaagatgaggagtcctcggagagcaggatggtggtgacattcctcatgtcagctctcgagtccatgtgtaaagaactggccaagtccaaagccgaagtggcctgcattgcagtgtatgaaacagacgtgtttgtcgtcggaactgaaagaggacgtgcttttgtcaataccagaaaggattttcaaaaagattttgtaaaatattgtgttgaagaagaagaaaaagctgcagagatgcataaaatgaaatctacaacccaggcaaatcggatgagtgtagatgctgtagaaattgaaacactcagaaaaacagttgaggactatttctgcttttgctatgggaaagctttaggcaaatccacagtggtacctgtaccatatgagaagatgctgcgagaccagtcggctgtggtagtgcaggggcttccggaaggtgttgcctttaaacaccccgagaactatgatcttgcaaccctgaaatggattttggagaacaaagcagggatttcattcatcattaagagaccttttttagagccaaagaagcatgtaggtggtcgtgtgatggtaacagatgctgacaggtcaatactatctccaggtggaagttgtggccccatcaaagtgaaaactgaacccacagaagattctggcatttccctggaaatggcagctgtgacagtaaaggaagaatcagaagatcctgattattatcaatataacattcaaggaagccaccattcttcagagggcaatgaaggcacagaaatggaagtaccagcagaagatgatgattattctccaccgtctaagagaccaaaggccaatgagctaccgcagccaccagtcccggaacccgccaatgctgggaagcggaaagtgagggagttcaacttcgagaaatggaatgctcgcatcactgatctacgtaaacaagttgaagaattgtttgaaaggaaatatgctcaagccataaaagccaaaggtccggtgacgatcccgtaccctcttttccagtctcatgttgaagatctttatgtagaaggacttcctgaaggaattccttttagaaggccatctacttacggaattcctcgcctggagaggatattacttgcaaaggaaaggattcgttttgtgattaagaaacatgagcttctgaattcaacacgtgaagatttacagcttgataagccagcttcaggagtaaaggaagaatggtatgccagaatcactaaattaagaaagatggtggatcagcttttctgcaaaaaatttgcggaagccttggggagcactgaagccaaggctgtaccgtaccaaaaatttgaggcacacccgaatgatctgtacgtggaaggactgccagaaaacattcctttccgaagtccctcatggtatggaatcccaaggctggaaaaaatcattcaagtgggcaatcgaattaaatttgttattaaaagaccagaacttctgactcacagtaccactgaagttactcagccaagaacgaatacaccagtcaaagaagattggaatgtcagaattaccaagctacggaagcaagtggaagagatttttaatttgaaatttgctcaagctcttggactcaccgaggcagtaaaagtaccatatcctgtgtttgaatcaaacccggagttcttgaaaggatcgtccgcgggagtaataaaatcaagttcgttgttaaaaaacctgaactagttatttcctacttgcctcctgggatggctagtaaaataaacactaaagctttgcagtcccccaaaagaccacgaagtcctgggagtaattcaaaggttcctgaaattgaggtcaccgtggaaggccctaataacaacaatcctcaaacctcagctgttcgaaccccgacccagactaacggttctaacgttcccttcaagccacgagggagagagttttcctttgaggcctggaatgccaaaatcacggacctaaaacagaaagttgaaaatctcttcaatgagaaatgtggggaagctcttggccttaaacaagctgtgaaggtgccgttcgcgttatttgagtctttcccggaagacttttatgtggaaggcttacctgagggtgtgccattccgaagaccatcgacttttggcattccgaggctggagaagatactcagaaacaaagccaaaattaagttcatcattaaaaagcccgaaatgtttgagacggcgattaaggagagcacctcctctaagagccctcccagaaaaataaattcatcacccaatgttaatactactgcatcaggtgttgaagaccttaacatcattcaggtgacaattccagatgatgataatgaaagactctcgaaagttgaaaaagctagacagctaagagaacaagtgaatgacctctttagtcggaaatttggtgaagctattggtatgggttttcctgtgaaagttccctacaggaaaatcacaattaaccctggctgtgtggtggttgatggcatgcccccgggggtgtccttcaaagcccccagctacctggaaatcagctccatgagaaggatcttagactctgccgagtttatcaaattcacggtcattagaccatttccaggacttgtgattaataaccagctggttgatcagagtgagtcagaaggccccgtgatacaagaatcagctgaaccaagccagttggaagttccagccacagaagaaataaaagagactgatggaagctctcagatcaagcaagaaccagaccccacgtggtagacctcttccctcctaggcaaaaccatctggatcacctaacagtcagaggtcagtatctcagcgtgtgaattatagaggaaatacagagagaacctcttccacttttacttttcgtccaaataaaatgcatggtgtaccagaagttgaagatcgggttgaggattggggctagctcgatgacactaaggccccaacatcgcgggacctgctgtggcgcggattcttaggaacgctgttctagccggccccctctccaggggtcgccgtggccggcattatttcctagttcttcttgtaaccctgaggtgccagcgcggggagtgaggaggggtcagggggctaaggatgcaacctctgacgttctgcgccttcctaggagagtcttacatgtgttgagatttcacaagcaatgcgagttgtaaaataccagctctacaagaagctaggctctgtgacggcatagttttcagtagctttatcacaatattcacaatggagaattatatgacatggtagcagaaataggcccttttatgtgttgcttctattttacctcaaattgtagatatagggtaatcaataaaatccatccatgcctttcacacactaagt

SEQ ID NO: 5079 - protein, 584 aa, Homo sapiens; identical to SEQ ID NO: 4173

SEQ ID NO: 5080 - DNA, 5048 bp, Homo sapiens
gggtcttgttctgtctcccaagctggagtgcagtggtgtggtcataggtcactgcagcgtcgaactcctaggctcaagtgatcctcttgcctcaggctcctgagtagctgggacaacaggcgtgtaccacacctggatactttttaaatttttggtagagaagggatctcactctattgccaagctggtgtcgaactcttggtcttaagcagccctcccacgtcagcatcccaaagtgttgggatttcagagggatcatggcccaagttgcaatgtccaccctccccgttgaagatgaggagtcctcggagagcaggatggtggtgacattcctcatgtcagctctcgagtccatgtgtaaagaactggccaagtccaaagccgaagtggcctgcattgcagtgtatgaaacagacgtgtttgtcgtcggaactgaaagaggacgtgcttttgtcaataccagaaaggattttcaaaaagattttgtaaaatattgtgttgaagaagaagaaaaagctgcagagatgcataaaatgaaatctacaacccaggcaaatcggatgagtgtagatgctgtagaaattgaaacactcagaaaaacagttgaggactatttctgcttttgctatgggaaagctttaggcaaatccacagtggtacctgtaccatatgagaagatgctgcgagaccagtcggctgtggtagtgcaggggcttccggaaggtgttgcctttaaacaccccgagaactatgatcttgcaaccctgaaatggattttggagaacaaagcagggatttcattcatcattaagagaccttttttagagccaaagaagcatgtaggtggtcgtgtgatggtaacagatgctgacaggtcaatactatctccaggtggaagttgtggccccatcaaagtgaaaactgaacccacagaagattctggcatttccctggaaatggcagctgtgacagtaaaggaagaatcagaagatcctgattattatcaatataacattcaaggaagccaccattcttcagagggcaatgaaggcacagaaatggaagtaccagcagaagatgatgattattctccaccgtctaagagaccaaaggccaatgagctaccgcagccaccagtcccggaacccgccaatgctgggaagcggaaagtgagggagttcaacttcgagaaatggaatgctcgcatcactgatctacgtaaacaagttgaagaattgtttgaaaggaaatatgctcaagccataaaagccaaaggtccggtgacgatcccgtaccctcttttccagtctcatgttgaagatctttatgtagaaggacttcctgaaggaattccttttagaaggccatctacttacggaattcctcgcctggagaggatattacttgcaaaggaaaggattcgttttgtgattaagaaacatgagcttctgaattcaacacgtgaagatttacagcttgataagccagcttcaggagtaaaggaagaatggtatgccagaatcactaaattaagaaagatggtggatcagcttttctgcaaaaaatttgcggaagccttggggagcactgaagccaaggctgtaccgtaccaaaaatttgaggcacacccgaatgatctgtacgtggaaggactgccagaaaacattcctttccgaagtccctcatggtatggaatcccaaggctggaaaaaatcattcaagtgggcaatcgaattaaatttgttattaaaagaccagaacttctgactcacagtaccactgaagttactcagccaagaacgaatacaccagtcaaagaagattggaatgtcagaattaccaagctacggaagcaagtggaagagatttttaatttgaaatttgcttagatttgttgacagcggtttcctggagtgctgtcttgagaacgattctgaggaggctcagcaagaaagagtgtttcagttgattgggtgtgtctgtcatggagaaggaactcaagctcttggactcaccgaggcagtaaaagtaccatatcctgtgtttgaatcaaacccggagttcttgtatgtggaaggcttgccagaggggattcccttccgaagccctacctggtttggaattccacgacttgaaaggatcgtccgcgggagtaataaaatcaagttcgttgttaaaaaacctgaactagttatttcctacttgcctcctgggatggctagtaaaataaacactaaagctttgcagtcccccaaaagaccacgaagtcctgggagtaattcaaaggttcctgaaattgaggtcaccgtggaaggccctaataacaacaatcctcaaacctcagctgttcgaaccccgacccagactaacggttctaacgttcccttcaagccacgagggagagagttttcctttgaggcctggaatgccaaaatcacggacctaaaacagaaagttgaaaatctcttcaatgagaaatgtggggaagctcttggccttaaacaagctgtgaaggtgccgttcgcgttatttgagtctttcccggaagacttttatgtggaaggcttacctgagggtgtgccattccgaagaccatcgacttttggcattccgaggctggagaagatactcagaaacaaagccaaaattaagttcatcattaaaaagcccgaaatgtttgagacggcgattaaggagagcacctcctctaagagccctcccagaaaaataaattcatcacccaatgttaatactactgcatcaggtgttgaagaccttaacatcattcaggtgacaattccagatgatgataatgaaagactctcgaaagttgaaaaagctagacagctaagagaacaagtgaatgacctctttagtcggaaatttggtgaagctattggtatgggttttcctgtgaaagttccctacaggaaaatcacaattaaccctggctgtgtggtggttgatggcatgcccccgggggtgtccttcaaagcccccagctacctggaaatcagctccatgagaaggatcttagactctgccgagtttatcaaattcacggtcattagaccatttccaggacttgtgattaataaccagctggttgatcagagtgagtcagaaggccccgtgatacaagaatcagctgaaccaagccagttggaagttccagccacagaaggtaaaaggacctcttccctcctagggtaaatcagcttctgtgtcagggatgctgtgtggtgtccatctgaaccccctgcatacgcgtagctaatgtgatctccccactttcacataagatggtggccctgccttcagggaatgtgggagccaggtgggagccttcccggatatttaagctagaagattctacagggagattctccttggatcaatatatgtctctcagtcaaagatgtaaaagcacttttgccttaaaaagaatgttctgtttctaaatagagtcaacgttgtcctcctcattggaattcactatgagtcagaatcattagactgacttttttttttccatagtaatagtattttgcagagtctcacagagctgcagatcttttgttcatcttgcagagttaacaagtctgatcctgttagtccagatttcttaaatttggccaagttataataggagcagtagcttgagacccgaagtcaggaaactttgacaatggatttttttttttaatccagagacttgtactggaatttgccttaccctgtcagctcatggacttaaggtttcatcccgctttatgagtgcttctgaatccaagtcattgttacctgaatttgcaaattaagttgtgatattcgtgactgttaaattcctgtaattagattaacctctttgcttgcttgtttgttttctctcctattttagcttaaagtatcagtggttgagaagagcttttcggacctgttactaccccaagctgtgtaatatacttgtataacagaaataccttctatacaaacctttttttctacttttagatagaaatgtctactttttcagcagttctgtgaattaaagagcagagtgactgtgggtctggaatggctggtgtacttgggaatgtactatcaggattttacagcaatgctgggaaatgacagggaaaatgacaggaatgaatctcaccagattttttatgtactcagcagagccttgagttacggtgtttattttccaatcaagtgaagatatctcctacttctcctactggaacatctcagcttctgcagtgaagaaaaattcctgtgatagttcagttctttagtttttctatttgaaaaaaaaaaatcatttaaatgatcctttgttcacggctctccttaatgactgagtgaacagttcctatctgtatatttgactaaaccttttcctaagctatctctcatggttcctatgtttttttatcataattaaaagcaaaaccatctggatcacctaacagtcagaggtcagtatctcagcgtgtgaattatagaggaaatacagagagaacctcttccacttttacttttcgtccaaataaaatgcatggtgtaccagaagttgaagatcgggttgaggattggggctagctcgatgacactaaggccccaacatcgcgggacctgctgtggcgcggattcttaggaacgctgttctagccggccccctctccaggggtcgccgtggccggcattatttcctagttcttcttgtaaccctgaggtgccagcgcggggagtgaggaggggtcagggggctaaggatgcaacctctgacgttctgcgccttcctaggagagtcttacatgtgttgagatttcacaagcaatgcgagttgtaaaataccagctctacaagaagctaggctctgtgacggcatagttttcagtagctttatcacaatattcacaatggagaattatatgacatggtagcagaaataggcccttttatgtgttgcttctattttacctcaaattgtagatatagggtaatcaataaaatccatccatgcctttcacacactaagt

SEQ ID NO: 5081 - protein, 543 aa, Homo sapiens; identical to SEQ ID NO: 4195

SEQ ID NO: 5082 - DNA, 7107 bp, Homo sapiens
gggtcttgttctgtctcccaagctggagtgcagtggtgtggtcataggtcactgcagcgtcgaactcctaggctcaagtgatcctcttgcctcaggctcctgagtagctgggacaacaggcgtgtaccacacctggatactttttaaatttttggtagagaagggatctcactctattgccaagctggtgtcgaactcttggtcttaagcagccctcccacgtcagcatcccaaagtgttgggatttcagagggatcatggcccaagttgcaatgtccaccctccccgttgaagatgaggagtcctcggagagcaggatggtggtgacattcctcatgtcagctctcgagtccatgtgtaaagaactggccaagtccaaagccgaagtggcctgcattgcagtgtatgaaacagacgtgtttgtcgtcggaactgaaagaggacgtgcttttgtcaataccagaaaggattttcaaaaagattttgtaaaatattgtgttgaagaagaagaaaaagctgcagagatgcataaaatgaaatctacaacccaggcaaatcggatgagtgtagatgctgtagaaattgaaacactcagaaaaacagttgaggactatttctgcttttgctatgggaaagctttaggcaaatccacagtggtacctgtaccatatgagaagatgctgcgagaccagtcggctgtggtagtgcaggggcttccggaaggtgttgcctttaaacaccccgagaactatgatcttgcaaccctgaaatggattttggagaacaaagcagggatttcattcatcattaagagaccttttttagagccaaagaagcatgtaggtggtcgtgtgatggtaacagatgctgacaggtcaatactatctccaggtggaagttgtggccccatcaaagtgaaaactgaacccacagaagattctggcatttccctggaaatggcagctgtgacagtaaaggaagaatcagaagatcctgattattatcaatataacattcaagcaggcccttctgaaactgatgatgttgatgaaaaacagcccctatcgaagcctttgcaaggaagccaccattcttcagagggcaatgaaggcacagaaatggaagtaccagcagaagattctactcaacatgtcccttcagaaacaagtgaggaccctgaagttgaggtgactattgaagatgatgattattctccaccgtctaagagaccaaaggccaatgagctaccgcagccaccagtcccggaacccgccaatgctgggaagcggaaagtgagggagttcaacttcgagaaatggaatgctcgcatcactgatctacgtaaacaagttgaagaattgtttgaaaggaaatatgctcaagccataaaagccaaaggtccggtgacgatcccgtaccctcttttccagtctcatgttgaagatctttatgtagaaggacttcctgaaggaattccttttagaaggccatctacttacggaattcctcgcctggagaggatattacttgcaaaggaaaggattcgttttgtgattaagaaacatgagcttctgaattcaacacgtgaagatttacagcttgataagccagcttcaggagtaaaggaagaatggtatgccagaatcactaaattaagaaagatggtggatcagcttttctgcaaaaaatttgcggaagccttggggagcactgaagccaaggctgtaccgtaccaaaaatttgaggcacacccgaatgatctgtacgtggaaggactgccagaaaacattcctttccgaagtccctcatggtatggaatcccaaggctggaaaaaatcattcaagtgggcaatcgaattaaatttgttattaaaagaccagaacttctgactcacagtaccactgaagttactcagccaagaacgaatacaccagctcaagctcttggactcaccgaggcagtaaaagtaccatatcctgtgtttgaatcaaacccggagttcttgtatgtggaaggcttgccagaggggattcccttccgaagccctacctggtttggaattccacgacttgaaaggatcgtccgcgggagtaataaaatcaagttcgttgttaaaaaacctgaactagttatttcctacttgcctcctgggatggctagtaaaataaacactaaagctttgcagtcccccaaaagaccacgaagtcctgggagtaattcaaaggttcctgaaattgaggtcaccgtggaaggccctaataacaacaatcctcaaacctcagctgttcgaaccccgacccagactaacggttctaacgttcccttcaagccacgagggagagagttttcctttgaggcctggaatgccaaaatcacggacctaaaacagaaagttgaaaatctcttcaatgagaaatgtggggaagctcttggccttaaacaagctgtgaaggtgccgttcgcgttatttgagtctttcccggaagacttttatgtggaaggcttacctgagggtgtgccattccgaagaccatcgacttttggcattccgaggctggagaagatactcagaaacaaagccaaaattaagttcatcattaaaaagcccgaaatgtttgagacggcgattaaggagagcacctcctctaagagccctcccagaaaaataaattcatcacccaatgttaatactactgcatcaggtgttgaagaccttaacatcattcaggtgacaattccagatgatgataatgaaagactctcgaaagttgaaaaagctagacagctaagagaacaagtgaatgacctctttagtcggaaatttggtgaagctattggtatgggttttcctgtgaaagttccctacaggaaaatcacaattaaccctggctgtgtggtggttgatggcatgcccccgggggtgtccttcaaagcccccagctacctggaaatcagctccatgagaaggatcttagactctgccgagtttatcaaattcacggtcattaggtaagtgagagtttcctgcttagtcacaggagcgaatctggagctcatgaggctgactcttctaaaatgcagccacaggtagtcatcgaatccggcttcctatgctgtgcaatcaacaaatcaaaataacttgtgtcatcattagaatgtcagatgtgcttctacgaactaagctgactcttttaattctttggcaaagggttggcaaactaggactgtttgccaaattcaggctgcctcctatttttagagtcttcctgaaacacagctacacccgtattatccatggctgctttcctgtcacagtgagtaagtagctgggactgagaaggcatggcctccaaagtctaaaatatttactctctagcactttgtagaaaaaccttagctaggcacagtggctaacgcctgtaatcccagcattttgggaggccaaggcaggcagatcacctgaggtcaggagttccagaccagcctggccaacatggtgaaatcccatctctacaaaaataaaacagttagctgggcatgatggcgggtgcctgtaatcccagctactcgggaggctgaggcaggatagtcgcttgaacccaggaggtggaggttgcaatgagccaagatcatgccactgcactccagcctggacgacagagtgagactccatcacaagaaaaaaagaactttgtcaacctctgtcttagggcgccttgtcacaggcttcgggtcagacggattcaaccttgcatcagccatttgttagccaggtcactctgttctttgtctgtaaatgagattgatcgttgttcccactgagagtgtcagctccttcccgtagagcaggcatgatgattgtactcacctctgacaccattgtgagtgccacattccttcccacgtccttgtcactgtaagagatgcccacctgagcaccaaccccaggttatcttcccctttgtcttccagccccccagaaacagctacgactcaacctacccaatcatttcatcatcagattgccactgtctctagttcaggtctcttgggactggcactcagaaatctcataataaatcctcttgaggcttctcatacactcgtcttcttccaatcttctttccctcaaaatctcatattttggttccacttcacccaccgtcattctccatatcactcccaggagttaggcaaaaagccccttccgttcttccgtatgttaaacttagaatcactctgttccctgctctgcgtttctattttttgtttttcctccatttactagtagcttaacactttctaacagtgttcttattattgatacgtatctatctcttccataagcttataaggtcacggataatacttctcattgtagtacgtaaatgacgtgggctagatatgagttgaataaacagttatacctgtaaattcttacagagtgaaaataaattgttatactttacaatttgtttctctctttagaccatttccaggacttgtgattaataaccgtgagtattttgtgaagtgttttgtttttgttttttcctggggtctgacgtgtgtgcgtgtgagtgtgtatacatgcttaacgtatatcacgttacttcacctatgtcagtaaccaggccaaatacttgttttagccctcagtaaaaacaccaggcacttcctagttgtaaaattattcaagcttcttaacttcctatcctcgatgcacttaatcataaaatggtaataatagcaccgattttgggggagtcgttccagtagatggaaagcatctggaacaggtgtcagcaagctcctgccgacgtgtatgcataaagttttattgaaaccaccatcgtgtccatttgtttatggcagaactgagagatggcagcagcaagtgtgtgcctgcaaaacctaaaatatttactaattggctctgcaagaaaagagtttgcatccccctaacctagaacagtgtctagcctctagtatgtgtttagcctacagtatgtgctcagcgaatacaatctatatttattactgcttttatgactgttataattactgtgcttggatttcgttacaaagtaagtcacaatgtgcctgcttctgttagtatttcagcacagtgcctggcacacatggggctctcaaatattgctgagcgagtgaacaaatgtcctttcaattccttaacgttgatgtcattttcaatagtattttgagccaaacttaattttgcgagtgtgttttgttttcttaactttattattaaaaatgtataaaagtgaggccaggcgtggtggctcacgcctgtaatcccagcagtttgggaggctgaggcaggcggatcagttgaggttgggagttggagaccagcccgtccaacatggtgaaagcctgtctctactaaaaatacaaaaatcagctgggtgtggtggcgcgtgcctgtaatcccagctactcaggaggctgaggcaggagagttgcttgaatcctagaggtggaggttgcagtgagctgagatcgtgccattgcactccagcctgggcaacaagagcaaaactctgtcccaataaataaataaataaaatgttctcttttgttcctgttcttgtgcggtagtgtggtatagagttttatggtaattactgtgaattagtgattctgagggacatatcagaactctgaggtttgtttccttctcatcttgagggaaacagcaaatgtatgttaaaatgcttttccaagggaacaacacatccttacattatttaaaccaatctgcttcattttcagagctggttgatcagagtgagtcagaaggccccgtgatacaagaatcagctgaaccaagccagttggaagttccagccacagaagaaataaaagagactgatggaagctctcagatcaagcaagaaccagaccccacgtggtagacctcttccctcctaggcttaaagtatcagtggttgagaagagcttttcggacctgttactaccccaagctgtgtaatatacttgtataacagaaataccttctatacaaacctttttttctacttttagatagaaatgtctactttttcagcagttctgtgaattaaagagcagagtgactgtgggtctggaatggctggtgtacttgggaatgtactatcaggattttacagcaatgctgggaaatgacagggaaaatgacaggaatgaatctcaccagattttttatgtactcagcagagccttgagttacggtgtttattttccaatcaagtgaagatatctcctacttctcctactggaacatctcagcttctgcagtgaagaaaaattcctgtgatagttcagttctttagtttttctatttgaaaaaaaaaaatcatttaaatgatcctttgttcacggctctccttaatgactgagtgaacagttcctatctgtatatttgactaaaccttttcctaagctatctctcatggttcctatgtttttttatcataattaaaagcaaaaccatctggatcacctaacagtcagaggtcagtatctcagcgtgtgaattatagaggaaatacagagagaacctcttccacttttacttttcgtccaaataaaatgcatggtgtaccagaagttgaagatcgggttgaggattggggctagctcgatgacactaaggccccaacatcgcgggacctgctgtggcgcggattcttaggaacgctgttctagccggccccctctccaggggtcgccgtggccggcattatttcctagttcttcttgtaaccctgaggtgccagcgcggggagtgaggaggggtcagggggctaaggatgcaacctctgacgttctgcgccttcctaggagagtcttacatgtgttgagatttcacaagcaatgcgagttgtaaaataccagctctacaagaagctaggctctgtgacggcatagttttcagtagctttatcacaatattcacaatggagaattatatgacatggtagcagaaataggcccttttatgtgttgcttctattttacctcaaattgtagatatagggtaatcaataaaatccatccatgcctttcacacactaagt

SEQ ID NO: 5083 - protein, 918 aa, Homo sapiens; identical to SEQ ID NO: 4169

SEQ ID NO: 5084 - DNA, 3924 bp, Homo sapiens
gggtcttgttctgtctcccaagctggagtgcagtggtgtggtcataggtcactgcagcgtcgaactcctaggctcaagtgatcctcttgcctcaggctcctgagtagctgggacaacaggcgtgtaccacacctggatactttttaaatttttggtagagaagggatctcactctattgccaagctggtgtcgaactcttggtcttaagcagccctcccacgtcagcatcccaaagtgttgggatttcagagggatcatggcccaagttgcaatgtccaccctccccgttgaagatgaggagtcctcggagagcaggatggtggtgacattcctcatgtcagctctcgagtccatgtgtaaagaactggccaagtccaaagccgaagtggcctgcattgcagtgtatgaaacagacgtgtttgtcgtcggaactgaaagaggacgtgcttttgtcaataccagaaaggattttcaaaaagattttgtaaaatattgtgttgaagaagaagaaaaagctgcagagatgcataaaatgaaatctacaacccaggcaaatcggatgagtgtagatgctgtagaaattgaaacactcagaaaaacagttgaggactatttctgcttttgctatgggaaagctttaggcaaatccacagtggtacctgtaccatatgagaagatgctgcgagaccagtcggctgtggtagtgcaggggcttccggaaggtgttgcctttaaacaccccgagaactatgatcttgcaaccctgaaatggattttggagaacaaagcagggatttcattcatcattaagagaccttttttagagccaaagaagcatgtaggtggtcgtgtgatggtaacagatgctgacaggtcaatactatctccaggtggaagttgtggccccatcaaagtgaaaactgaacccacagaagattctggaagccaccattcttcagagggcaatgaaggcacagaaatggaagtaccagcagaagattctactcaacatgtcccttcagaaacaagtgaggaccctgaagttgaggtgactattgaagatgatgattattctccaccgtctaagagaccaaaggccaatgagctaccgcagccaccagtcccggaacccgccaatgctgggaagcggaaagtgagggagttcaacttcgagaaatggaatgctcgcatcactgatctacgtaaacaagttgaagaattgtttgaaaggaaatatgctcaagccataaaagccaaaggtccggtgacgatcccgtaccctcttttccagtctcatgttgaagatctttatgtagaaggacttcctgaaggaattccttttagaaggccatctacttacggaattcctcgcctggagaggatattacttgcaaaggaaaggattcgttttgtgattaagaaacatgagcttctgaattcaacacgtgaagatttacagcttgataagccagcttcaggagtaaaggaagaatggtatgccagaatcactaaattaagaaagatggtggatcagcttttctgcaaaaaatttgcggaagccttggggagcactgaagccaaggctgtaccgtaccaaaaatttgaggcacacccgaatgatctgtacgtggaaggactgccagaaaacattcctttccgaagtccctcatggtatggaatcccaaggctggaaaaaatcattcaagtgggcaatcgaattaaatttgttattaaaagaccagaacttctgactcacagtaccactgaagttactcagccaagaacgaatacaccagctcaagctcttggactcaccgaggcagtaaaagtaccatatcctgtgtttgaatcaaacccggagttcttgtatgtggaaggcttgccagaggggattcccttccgaagccctacctggtttggaattccacgacttgaaaggatcgtccgcgggagtaataaaatcaagttcgttgttaaaaaacctgaactagttatttcctacttgcctcctgggatggctagtaaaataaacactaaagctttgcagtcccccaaaagaccacgaagtcctgggagtaattcaaaggttcctgaaattgaggtcaccgtggaaggccctaataacaacaatcctcaaacctcagctgttcgaaccccgacccagactaacggttctaacgttcccttcaagccacgagggagagagttttcctttgaggcctggaatgccaaaatcacggacctaaaacagaaagttgaaaatctcttcaatgagaaatgtggggaagctcttggccttaaacaagctgtgaaggtgccgttcgcgttatttgagtctttcccggaagacttttatgtggaaggcttacctgagggtgtgccattccgaagaccatcgacttttggcattccgaggctggagaagatactcagaaacaaagccaaaattaagttcatcattaaaaagcccgaaatgtttgagacggcgattaaggagagcacctcctctaagagccctcccagaaaaataaattcatcacccaatgttaatactactgcatcaggtgttgaagaccttaacatcattcaggtgacaattccagatgatgataatgaaagactctcgaaagttgaaaaagctagacagctaagagaacaagtgaatgacctctttagtcggaaatttggtgaagctattggtatgggttttcctgtgaaagttccctacaggaaaatcacaattaaccctggctgtgtggtggttgatggcatgcccccgggggtgtccttcaaagcccccagctacctggaaatcagctccatgagaaggatcttagactctgccgagtttatcaaattcacggtcattagaccatttccaggacttgtgattaataaccagctggttgatcagagtgagtcagaaggccccgtgatacaagaatcagctgaaccaagccagttggaagttccagccacagaagaaataaaagagactgatggaagctctcagatcaagcaagaaccagaccccacgtggtagacctcttccctcctaggagccttgagttacggtgtttattttccaatcaagtgaagatatctcctacttctcctactggaacatctcagcttctgcagtgaagaaaaattcctgtgatagttcagttctttagtttttctatttgaaaaaaaaaaatcatttaaatgatcctttgttcacggctctccttaatgactgagtgaacagttcctatctgtatatttgactaaaccttttcctaagctatctctcatggttcctatgtttttttatcataattaaaagcaaaaccatctggatcacctaacagtcagaggtcagtatctcagcgtgtgaattatagaggaaatacagagagaacctcttccacttttacttttcgtccaaataaaatgcatggtgtaccagaagttgaagatcgggttgaggattggggctagctcgatgacactaaggccccaacatcgcgggacctgctgtggcgcggattcttaggaacgctgttctagccggccccctctccaggggtcgccgtggccggcattatttcctagttcttcttgtaaccctgaggtgccagcgcggggagtgaggaggggtcagggggctaaggatgcaacctctgacgttctgcgccttcctaggagagtcttacatgtgttgagatttcacaagcaatgcgagttgtaaaataccagctctacaagaagctaggctctgtgacggcatagttttcagtagctttatcacaatattcacaatggagaattatatgacatggtagcagaaataggcccttttatgtgttgcttctattttacctcaaattgtagatatagggtaatcaataaaatccatccatgcctttcacacactaagt

SEQ ID NO: 5085 - protein, 928 aa, Homo sapiens; identical to SEQ ID NO: 4237

SEQ ID NO: 5086 - DNA, 3978 bp, Homo sapiens
gggtcttgttctgtctcccaagctggagtgcagtggtgtggtcataggtcactgcagcgtcgaactcctaggctcaagtgatcctcttgcctcaggctcctgagtagctgggacaacaggcgtgtaccacacctggatactttttaaatttttggtagagaagggatctcactctattgccaagctggtgtcgaactcttggtcttaagcagccctcccacgtcagcatcccaaagtgttgggatttcagagggatcatggcccaagttgcaatgtccaccctccccgttgaagatgaggagtcctcggagagcaggatggtggtgacattcctcatgtcagctctcgagtccatgtgtaaagaactggccaagtccaaagccgaagtggcctgcattgcagtgtatgaaacagacgtgtttgtcgtcggaactgaaagaggacgtgcttttgtcaataccagaaaggattttcaaaaagattttgtaaaatattgtgttgaagaagaagaaaaagctgcagagatgcataaaatgaaatctacaacccaggcaaatcggatgagtgtagatgctgtagaaattgaaacactcagaaaaacagttgaggactatttctgcttttgctatgggaaagctttaggcaaatccacagtggtacctgtaccatatgagaagatgctgcgagaccagtcggctgtggtagtgcaggggcttccggaaggtgttgcctttaaacaccccgagaactatgatcttgcaaccctgaaatggattttggagaacaaagcagggatttcattcatcattaagagaccttttttagagccaaagaagcatgtaggtggtcgtgtgatggtaacagatgctgacaggtcaatactatctccaggtggaagttgtggccccatcaaagtgaaaactgaacccacagaagattctggcatttccctggaaatggcagctgtgacagtaaaggaagaatcagaagatcctgattattatcaatataacattcaagcaggcccttctgaaactgatgatgttgatgaaaaacagcccctatcgaagcctttgcaaggaagccaccattcttcagagggcaatgaaggcacagaaatggaagtaccagcagaagattctactcaacatgtcccttcagaaacaagtgaggaccctgaagttgaggtgactattgaagatgatgattattctccaccgtctaagagaccaaaggccaatgagctaccgcagccaccagtcccggaacccgccaatgctgggaagcggaaagtgagggagttcaacttcgagaaatggaatgctcgcatcactgatctacgtaaacaagttgaagaattgtttgaaaggaaatatgctcaagccataaaagccaaaggtccggtgacgatcccgtaccctcttttccagtctcatgttgaagatctttatgtagaaggacttcctgaaggaattccttttagaaggccatctacttacggaattcctcgcctggagaggatattacttgcaaaggaaaggattcgttttgtgattaagaaacatgagcttctgaattcaacacgtgaagatttacagcttgataagccagcttcaggagtaaaggaagaatggtatgccagaatcactaaattaagaaagatggtggatcagcttttctgcaaaaaatttgcggaagccttggggagcactgaagccaaggctgtaccgtaccaaaaatttgaggcacacccgaatgatctgtacgtggaaggactgccagaaaacattcctttccgaagtccctcatggtatggaatcccaaggctggaaaaaatcattcaagtgggcaatcgaattaaatttgttattaaaagaccagaacttctgactcacagtaccactgaagttactcagccaagaacgaatacaccagtcaaagaagattggaatgtcagaattaccaagctacggaagcaagtggaagagatttttaatttgaaatttgcttagatttgttgacagcggtttcctggagtgctgtcttgagaacgattctgaggaggctcagcaagaaagagtgtttcagttgattgggtgtgtctgtcatggagaaggaactcaagctcttggactcaccgaggcagtaaaagtaccatatcctgtgtttgaatcaaacccggagttcttgtatgtggaaggcttgccagaggggattcccttccgaagccctacctggtttggaattccacgacttgaaaggatcgtccgcgggagtaataaaatcaagttcgttgttaaaaaacctgaactagttatttcctacttgcctcctgggatggctagtaaaataaacactaaagctttgcagtcccccaaaagaccacgaagtcctgggagtaattcaaaggttcctgaaattgaggtcaccgtggaaggccctaataacaacaatcctcaaacctcagctgttcgaaccccgacccagactaacggttctaacgttcccttcaagccacgagggagagagttttcctttgaggcctggaatgccaaaatcacggacctaaaacagaaagttgaaaatctcttcaatgagaaatgtggggaagctcttggccttaaacaagctgtgaaggtgccgttcgcgttatttgagtctttcccggaagacttttatgtggaaggcttacctgagggtgtgccattccgaagaccatcgacttttggcattccgaggctggagaagatactcagaaacaaagccaaaattaagttcatcattaaaaagcccgaaatgtttgagacggcgattaaggagagcacctcctctaagagccctcccagaaaaataaattcatcacccaatgttaatactactgcatcaggtgttgaagaccttaacatcattcaggtgacaattccagatgatgataatgaaagactctcgaaagttgaaaaagctagacagctaagagaacaagtgaatgacctctttagtcggaaatttggtgaagctattggtatgggttttcctgtgaaagttccctacaggaaaatcacaattaaccctggctgtgtggtggttgatggcatgcccccgggggtgtccttcaaagcccccagctacctggaaatcagctccatgagaaggatcttagactctgccgagtttatcaaattcacggtcattagaccatttccaggacttgtgattaataaccagctggttgatcagagtgagtcagaaggccccgtgatacaagaatcagctgaaccaagccagttggaagttccagccacagaagaaataaaagagactgatggaagctctcagatcaagcaagaaccagaccccacgtggtagacctcttccctcctaggcaaaaccatctggatcacctaacagtcagaggtcagtatctcagcgtgtgaattatagaggaaatacagagagaacctcttccacttttacttttcgtccaaataaaatgcatggtgtaccagaagttgaagatcgggttgaggattggggctagctcgatgacactaaggccccaacatcgcgggacctgctgtggcgcggattcttaggaacgctgttctagccggccccctctccaggggtcgccgtggccggcattatttcctagttcttcttgtaaccctgaggtgccagcgcggggagtgaggaggggtcagggggctaaggatgcaacctctgacgttctgcgccttcctaggagagtcttacatgtgttgagatttcacaagcaatgcgagttgtaaaataccagctctacaagaagctaggctctgtgacggcatagttttcagtagctttatcacaatattcacaatggagaattatatgacatggtagcagaaataggcccttttatgtgttgcttctattttacctcaaattgtagatatagggtaatcaataaaatccatccatgcctttcacacactaagt

SEQ ID NO: 5087 - protein, 584 aa, Homo sapiens; identical to SEQ ID NO: 4053

SEQ ID NO: 5088 - DNA, 4246 bp, Homo sapiens
gggtcttgttctgtctcccaagctggagtgcagtggtgtggtcataggtcactgcagcgtcgaactcctaggctcaagtgatcctcttgcctcaggctcctgagtagctgggacaacaggcgtgtaccacacctggatactttttaaatttttggtagagaagggatctcactctattgccaagctggtgtcgaactcttggtcttaagcagccctcccacgtcagcatcccaaagtgttgggatttcagagggatcatggcccaagttgcaatgtccaccctccccgttgaagatgaggagtcctcggagagcaggatggtggtgacattcctcatgtcagctctcgagtccatgtgtaaagaactggccaagtccaaagccgaagtggcctgcattgcagtgtatgaaacagacgtgtttgtcgtcggaactgaaagaggacgtgcttttgtcaataccagaaaggattttcaaaaagattttgtaaaatattgtgttgaagaagaagaaaaagctgcagagatgcataaaatgaaatctacaacccaggcaaatcggatgagtgtagatgctgtagaaattgaaacactcagaaaaacagttgaggactatttctgcttttgctatgggaaagctttaggcaaatccacagtggtacctgtaccatatgagaagatgctgcgagaccagtcggctgtggtagtgcaggggcttccggaaggtgttgcctttaaacaccccgagaactatgatcttgcaaccctgaaatggattttggagaacaaagcagggatttcattcatcattaagagaccttttttagagccaaagaagcatgtaggtggtcgtgtgatggtaacagatgctgacaggtcaatactatctccaggtggaagttgtggccccatcaaagtgaaaactgaacccacagaagattctggcatttccctggaaatggcagctgtgacagtaaaggaagaatcagaagatcctgattattatcaatataacattcaagcaggcccttctgaaactgatgatgttgatgaaaaacagcccctatcgaagcctttgcaaggaagccaccattcttcagagggcaatgaaggcacagaaatggaagtaccagcagaagattctactcaacatgtcccttcagaaacaagtgaggaccctgaagttgaggtgactattgaagatgatgattattctccaccgtctaagagaccaaaggccaatgagctaccgcagccaccagtcccggaacccgccaatgctgggaagcggaaagtgagggagttcaacttcgagaaatggaatgctcgcatcactgatctacgtaaacaagttgaagaattgtttgaaaggaaatatgctcaagccataaaagccaaaggtccggtgacgatcccgtaccctcttttccagtctcatgttgaagatctttatgtagaaggacttcctgaaggaattccttttagaaggccatctacttacggaattcctcgcctggagaggatattacttgcaaaggaaaggattcgttttgtgattaagaaacatgagcttctgaattcaacacgtgaagatttacagcttgataagccagcttcaggagtaaaggaagaatggtatgccagaatcactaaattaagaaagatggtggatcagcttttctgcaaaaaatttgcggaagccttggggagcactgaagccaaggctgtaccgtaccaaaaatttgaggcacacccgaatgatctgtacgtggaaggactgccagaaaacattcctttccgaagtccctcatggtatggaatcccaaggctggaaaaaatcattcaagtgggcaatcgaattaaatttgttattaaaagaccagaacttctgactcacagtaccactgaagttactcagccaagaacgaatacaccagtcaaagaagattggaatgtcagaattaccaagctacggaagcaagtggaagagatttttaatttgaaatttgcttagatttgttgacagcggtttcctggagtgctgtcttgagaacgattctgaggaggctcagcaagaaagagtgtttcagttgattgggtgtgtctgtcatggagaaggaactcaagctcttggactcaccgaggcagtaaaagtaccatatcctgtgtttgaatcaaacccggagttcttgtatgtggaaggcttgccagaggggattcccttccgaagccctacctggtttggaattccacgacttgaaaggatcgtccgcgggagtaataaaatcaagttcgttgttaaaaaacctgaactagttatttcctacttgcctcctgggatggctagtaaaataaacactaaagctttgcagtcccccaaaagaccacgaagtcctgggagtaattcaaaggttcctgaaattgaggtcaccgtggaaggccctaataacaacaatcctcaaacctcagctgttcgaaccccgacccagactaacggttctaacgttcccttcaagccacgagggagagagttttcctttgaggcctggaatgccaaaatcacggacctaaaacagaaagttgaaaatctcttcaatgagaaatgtggggaagctcttggccttaaacaagctgtgaaggtgccgttcgcgttatttgagtctttcccggaagacttttatgtggaaggcttacctgagggtgtgccattccgaagaccatcgacttttggcattccgaggctggagaagatactcagaaacaaagccaaaattaagttcatcattaaaaagcccgaaatgtttgagacggcgattaaggagagcacctcctctaagagccctcccagaaaaataaattcatcacccaatgttaatactactgcatcaggtgttgaagaccttaacatcattcaggtgacaattccagatgatgataatgaaagactctcgaaagttgaaaaagctagacagctaagagaacaagtgaatgacctctttagtcggaaatttggtgaagctattggtatgggttttcctgtgaaagttccctacaggaaaatcacaattaaccctggctgtgtggtggttgatggcatgcccccgggggtgtccttcaaagcccccagctacctggaaatcagctccatgagaaggatcttagactctgccgagtttatcaaattcacggtcattagaccatttccaggacttgtgattaataaccagctggttgatcagagtgagtcagaaggccccgtgatacaagaatcagctgaaccaagccagttggaagttccagccacagaagaaataaaagagactgatggaagctctcagatcaagcaagaaccagaccccacgtggtagacctcttccctcctaggagccttgagttacggtgtttattttccaatcaagtgaagatatctcctacttctcctactggaacatctcagcttctgcagtgaagaaaaattcctgtgatagttcagttctttagtttttctatttgaaaaaaaaaaatcatttaaatgatcctttgttcacggctctccttaatgactgagtgaacagttcctatctgtatatttgactaaaccttttcctaagctatctctcatggttcctatgtttttttatcataattaaaagcaaaaccatctggatcacctaacagtcagaggtcagtatctcagcgtgtgaattatagaggaaatacagagagaacctcttccacttttacttttcgtccaaataaaatgcatggtgtaccagaagttgaagatcgggttgaggattggggctagctcgatgacactaaggccccaacatcgcgggacctgctgtggcgcggattcttaggaacgctgttctagccggccccctctccaggggtcgccgtggccggcattatttcctagttcttcttgtaaccctgaggtgccagcgcggggagtgaggaggggtcagggggctaaggatgcaacctctgacgttctgcgccttcctaggagagtcttacatgtgttgagatttcacaagcaatgcgagttgtaaaataccagctctacaagaagctaggctctgtgacggcatagttttcagtagctttatcacaatattcacaatggagaattatatgacatggtagcagaaataggcccttttatgtgttgcttctattttacctcaaattgtagatatagggtaatcaataaaatccatccatgcctttcacacactaagt

SEQ ID NO: 5089 - protein, 584 aa, Homo sapiens; identical to SEQ ID NO: 4053

SEQ ID NO: 5090 - DNA, 3731 bp, Homo sapiens
gggtcttgttctgtctcccaagctggagtgcagtggtgtggtcataggtcactgcagcgtcgaactcctaggctcaagtgatcctcttgcctcaggctcctgagtagctgggacaacaggcgtgtaccacacctggatactttttaaatttttggtagagaagggatctcactctattgccaagctggtgtcgaactcttggtcttaagcagccctcccacgtcagcatcccaaagtgttgggatttcagagggatcatggcccaagttgcaatgtccaccctccccgttgaagatgaggagtcctcggagagcaggatggtggtgacattcctcatgtcagctctcgagtccatgtgtaaagaactggccaagtccaaagccgaagtggcctgcattgcagtgtatgaaacagacgtgtttgtcgtcggaactgaaagaggacgtgcttttgtcaataccagaaaggattttcaaaaagattttgtaaaatattgtgttgaagaagaagaaaaagctgcagagatgcataaaatgaaatctacaacccaggcaaatcggatgagtgtagatgctgtagaaattgaaacactcagaaaaacagttgaggactatttctgcttttgctatgggaaagctttaggcaaatccacagtggtacctgtaccatatgagaagatgctgcgagaccagtcggctgtggtagtgcaggggcttccggaaggtgttgcctttaaacaccccgagaactatgatcttgcaaccctgaaatggattttggagaacaaagcagggatttcattcatcattaagagaccttttttagagccaaagaagcatgtaggtggtcgtgtgatggtaacagatgctgacaggtcaatactatctccaggtggaagttgtggccccatcaaagtgaaaactgaacccacagaagattctggcatttccctggaaatggcagctgtgacagtaaaggaagaatcagaagatcctgattattatcaatataacattcaagcaggcccttctgaaactgatgatgttgatgaaaaacagcccctatcgaagcctttgcaaggaagccaccattcttcagagggcaatgaaggcacagaaatggaagtaccagcagaagatgatgattattctccaccgtctaagagaccaaaggccaatgagctaccgcagccaccagtcccggaacccgccaatgctgggaagcggaaagtgagggagttcaacttcgagaaatggaatgctcgcatcactgatctacgtaaacaagttgaagaattgtttgaaaggaaatatgctcaagccataaaagccaaaggtccggtgacgatcccgtaccctcttttccagtctcatgttgaagatctttatgtagaaggacttcctgaaggaattccttttagaaggccatctacttacggaattcctcgcctggagaggatattacttgcaaaggaaaggattcgttttgtgattaagaaacatgagcttctgaattcaacacgtgaagatttacagcttgataagccagcttcaggagtaaaggaagaatggtatgccagaatcactaaattaagaaagatggtggatcagcttttctgcaaaaaatttgcggaagccttggggagcactgaagccaaggctgtaccgtaccaaaaatttgaggcacacccgaatgatctgtacgtggaaggactgccagaaaacattcctttccgaagtccctcatggtatggaatcccaaggctggaaaaaatcattcaagtgggcaatcgaattaaatttgttattaaaagaccagaacttctgactcacagtaccactgaagttactcagccaagaacgaatacaccagctcaagctcttggactcaccgaggcagtaaaagtaccatatcctgtgtttgaatcaaacccggagttcttgtatgtggaaggcttgccagaggggattcccttccgaagccctacctggtttggaattccacgacttgaaaggatcgtccgcgggagtaataaaatcaagttcgttgttaaaaaacctgaactagttatttcctacttgcctcctgggatggctagtaaaataaacactaaagctttgcagtcccccaaaagaccacgaagtcctgggagtaattcaaaggttcctgaaattgaggtcaccgtggaaggccctaataacaacaatcctcaaacctcagctgttcgaaccccgacccagactaacggttctaacgttcccttcaagccacgagggagagagttttcctttgaggcctggaatgccaaaatcacggacctaaaacagaaagttgaaaatctcttcaatgagaaatgtggggaagctcttggccttaaacaagctgtgaaggtgccgttcgcgttatttgagtctttcccggaagacttttatgtggaaggcttacctgagggtgtgccattccgaagaccatcgacttttggcattccgaggctggagaagatactcagaaacaaagccaaaattaagttcatcattaaaaagcccgaaatgtttgagacggcgattaaggagagcacctcctctaagagccctcccagaaaaataaattcatcacccaatgttaatactactgcatcaggtgttgaagaccttaacatcattcaggtgacaattccagatgatgataatgaaagactctcgaaagttgaaaaagctagacagctaagagaacaagtgaatgacctctttagtcggaaatttggtgaagctattggtatgggttttcctgtgaaagttccctacaggaaaatcacaattaaccctggctgtgtggtggttgatggcatgcccccgggggtgtccttcaaagcccccagctacctggaaatcagctccatgagaaggatcttagactctgccgagtttatcaaattcacggtcattagaccatttccaggacttgtgattaataaccagctggttgatcagagtgagtcagaaggccccgtgatacaagaatcagctgaaccaagccagttggaagttccagccacagaagaaataaaagagactgatggaagctctcagatcaagcaagaaccagaccccacgtggtagacctcttccctcctaggcaaaaccatctggatcacctaacagtcagaggtcagtatctcagcgtgtgaattatagaggaaatacagagagaacctcttccacttttacttttcgtccaaataaaatgcatggtgtaccagaagttgaagatcgggttgaggattggggctagctcgatgacactaaggccccaacatcgcgggacctgctgtggcgcggattcttaggaacgctgttctagccggccccctctccaggggtcgccgtggccggcattatttcctagttcttcttgtaaccctgaggtgccagcgcggggagtgaggaggggtcagggggctaaggatgcaacctctgacgttctgcgccttcctaggagagtcttacatgtgttgagatttcacaagcaatgcgagttgtaaaataccagctctacaagaagctaggctctgtgacggcatagttttcagtagctttatcacaatattcacaatggagaattatatgacatggtagcagaaataggcccttttatgtgttgcttctattttacctcaaattgtagatatagggtaatcaataaaatccatccatgcctttcacacactaagt

SEQ ID NO: 5091 - protein, 953 aa, Homo sapiens; identical to SEQ ID NO: 4179

SEQ ID NO: 5092 - DNA, 7044 bp, Homo sapiens
gggtcttgttctgtctcccaagctggagtgcagtggtgtggtcataggtcactgcagcgtcgaactcctaggctcaagtgatcctcttgcctcaggctcctgagtagctgggacaacaggcgtgtaccacacctggatactttttaaatttttggtagagaagggatctcactctattgccaagctggtgtcgaactcttggtcttaagcagccctcccacgtcagcatcccaaagtgttgggatttcagagggatcatggcccaagttgcaatgtccaccctccccgttgaagatgaggagtcctcggagagcaggatggtggtgacattcctcatgtcagctctcgagtccatgtgtaaagaactggccaagtccaaagccgaagtggcctgcattgcagtgtatgaaacagacgtgtttgtcgtcggaactgaaagaggacgtgcttttgtcaataccagaaaggattttcaaaaagattttgtaaaatattgtgttgaagaagaagaaaaagctgcagagatgcataaaatgaaatctacaacccaggcaaatcggatgagtgtagatgctgtagaaattgaaacactcagaaaaacagttgaggactatttctgcttttgctatgggaaagctttaggcaaatccacagtggtacctgtaccatatgagaagatgctgcgagaccagtcggctgtggtagtgcaggggcttccggaaggtgttgcctttaaacaccccgagaactatgatcttgcaaccctgaaatggattttggagaacaaagcagggatttcattcatcattaagagaccttttttagagccaaagaagcatgtaggtggtcgtgtgatggtaacagatgctgacaggtcaatactatctccaggtggaagttgtggccccatcaaagtgaaaactgaacccacagaagattctggcatttccctggaaatggcagctgtgacagtaaaggaagaatcagaagatcctgattattatcaatataacattcaagcaggcccttctgaaactgatgatgttgatgaaaaacagcccctatcgaagcctttgcaaggaagccaccattcttcagagggcaatgaaggcacagaaatggaagtaccagcagaagatgatgattattctccaccgtctaagagaccaaaggccaatgagctaccgcagccaccagtcccggaacccgccaatgctgggaagcggaaagtgagggagttcaacttcgagaaatggaatgctcgcatcactgatctacgtaaacaagttgaagaattgtttgaaaggaaatatgctcaagccataaaagccaaaggtccggtgacgatcccgtaccctcttttccagtctcatgttgaagatctttatgtagaaggacttcctgaaggaattccttttagaaggccatctacttacggaattcctcgcctggagaggatattacttgcaaaggaaaggattcgttttgtgattaagaaacatgagcttctgaattcaacacgtgaagatttacagcttgataagccagcttcaggagtaaaggaagaatggtatgccagaatcactaaattaagaaagatggtggatcagcttttctgcaaaaaatttgcggaagccttggggagcactgaagccaaggctgtaccgtaccaaaaatttgaggcacacccgaatgatctgtacgtggaaggactgccagaaaacattcctttccgaagtccctcatggtatggaatcccaaggctggaaaaaatcattcaagtgggcaatcgaattaaatttgttattaaaagaccagaacttctgactcacagtaccactgaagttactcagccaagaacgaatacaccagctcaagctcttggactcaccgaggcagtaaaagtaccatatcctgtgtttgaatcaaacccggagttcttgtatgtggaaggcttgccagaggggattcccttccgaagccctacctggtttggaattccacgacttgaaaggatcgtccgcgggagtaataaaatcaagttcgttgttaaaaaacctgaactagttatttcctacttgcctcctgggatggctagtaaaataaacactaaagctttgcagtcccccaaaagaccacgaagtcctgggagtaattcaaaggttcctgaaattgaggtcaccgtggaaggccctaataacaacaatcctcaaacctcagctgttcgaaccccgacccagactaacggttctaacgttcccttcaagccacgagggagagagttttcctttgaggcctggaatgccaaaatcacggacctaaaacagaaagttgaaaatctcttcaatgagaaatgtggggaagctcttggccttaaacaagctgtgaaggtgccgttcgcgttatttgagtctttcccggaagacttttatgtggaaggcttacctgagggtgtgccattccgaagaccatcgacttttggcattccgaggctggagaagatactcagaaacaaagccaaaattaagttcatcattaaaaagcccgaaatgtttgagacggcgattaaggagagcacctcctctaagagccctcccagaaaaataaattcatcacccaatgttaatactactgcatcaggtgttgaagaccttaacatcattcaggtgacaattccagatgatgataatgaaagactctcgaaagttgaaaaagctagacagctaagagaacaagtgaatgacctctttagtcggaaatttggtgaagctattggtatgggttttcctgtgaaagttccctacaggaaaatcacaattaaccctggctgtgtggtggttgatggcatgcccccgggggtgtccttcaaagcccccagctacctggaaatcagctccatgagaaggatcttagactctgccgagtttatcaaattcacggtcattaggtaagtgagagtttcctgcttagtcacaggagcgaatctggagctcatgaggctgactcttctaaaatgcagccacaggtagtcatcgaatccggcttcctatgctgtgcaatcaacaaatcaaaataacttgtgtcatcattagaatgtcagatgtgcttctacgaactaagctgactcttttaattctttggcaaagggttggcaaactaggactgtttgccaaattcaggctgcctcctatttttagagtcttcctgaaacacagctacacccgtattatccatggctgctttcctgtcacagtgagtaagtagctgggactgagaaggcatggcctccaaagtctaaaatatttactctctagcactttgtagaaaaaccttagctaggcacagtggctaacgcctgtaatcccagcattttgggaggccaaggcaggcagatcacctgaggtcaggagttccagaccagcctggccaacatggtgaaatcccatctctacaaaaataaaacagttagctgggcatgatggcgggtgcctgtaatcccagctactcgggaggctgaggcaggatagtcgcttgaacccaggaggtggaggttgcaatgagccaagatcatgccactgcactccagcctggacgacagagtgagactccatcacaagaaaaaaagaactttgtcaacctctgtcttagggcgccttgtcacaggcttcgggtcagacggattcaaccttgcatcagccatttgttagccaggtcactctgttctttgtctgtaaatgagattgatcgttgttcccactgagagtgtcagctccttcccgtagagcaggcatgatgattgtactcacctctgacaccattgtgagtgccacattccttcccacgtccttgtcactgtaagagatgcccacctgagcaccaaccccaggttatcttcccctttgtcttccagccccccagaaacagctacgactcaacctacccaatcatttcatcatcagattgccactgtctctagttcaggtctcttgggactggcactcagaaatctcataataaatcctcttgaggcttctcatacactcgtcttcttccaatcttctttccctcaaaatctcatattttggttccacttcacccaccgtcattctccatatcactcccaggagttaggcaaaaagccccttccgttcttccgtatgttaaacttagaatcactctgttccctgctctgcgtttctattttttgtttttcctccatttactagtagcttaacactttctaacagtgttcttattattgatacgtatctatctcttccataagcttataaggtcacggataatacttctcattgtagtacgtaaatgacgtgggctagatatgagttgaataaacagttatacctgtaaattcttacagagtgaaaataaattgttatactttacaatttgtttctctctttagaccatttccaggacttgtgattaataaccgtgagtattttgtgaagtgttttgtttttgttttttcctggggtctgacgtgtgtgcgtgtgagtgtgtatacatgcttaacgtatatcacgttacttcacctatgtcagtaaccaggccaaatacttgttttagccctcagtaaaaacaccaggcacttcctagttgtaaaattattcaagcttcttaacttcctatcctcgatgcacttaatcataaaatggtaataatagcaccgattttgggggagtcgttccagtagatggaaagcatctggaacaggtgtcagcaagctcctgccgacgtgtatgcataaagttttattgaaaccaccatcgtgtccatttgtttatggcagaactgagagatggcagcagcaagtgtgtgcctgcaaaacctaaaatatttactaattggctctgcaagaaaagagtttgcatccccctaacctagaacagtgtctagcctctagtatgtgtttagcctacagtatgtgctcagcgaatacaatctatatttattactgcttttatgactgttataattactgtgcttggatttcgttacaaagtaagtcacaatgtgcctgcttctgttagtatttcagcacagtgcctggcacacatggggctctcaaatattgctgagcgagtgaacaaatgtcctttcaattccttaacgttgatgtcattttcaatagtattttgagccaaacttaattttgcgagtgtgttttgttttcttaactttattattaaaaatgtataaaagtgaggccaggcgtggtggctcacgcctgtaatcccagcagtttgggaggctgaggcaggcggatcagttgaggttgggagttggagaccagcccgtccaacatggtgaaagcctgtctctactaaaaatacaaaaatcagctgggtgtggtggcgcgtgcctgtaatcccagctactcaggaggctgaggcaggagagttgcttgaatcctagaggtggaggttgcagtgagctgagatcgtgccattgcactccagcctgggcaacaagagcaaaactctgtcccaataaataaataaataaaatgttctcttttgttcctgttcttgtgcggtagtgtggtatagagttttatggtaattactgtgaattagtgattctgagggacatatcagaactctgaggtttgtttccttctcatcttgagggaaacagcaaatgtatgttaaaatgcttttccaagggaacaacacatccttacattatttaaaccaatctgcttcattttcagagctggttgatcagagtgagtcagaaggccccgtgatacaagaatcagctgaaccaagccagttggaagttccagccacagaagaaataaaagagactgatggaagctctcagatcaagcaagaaccagaccccacgtggtagacctcttccctcctaggcttaaagtatcagtggttgagaagagcttttcggacctgttactaccccaagctgtgtaatatacttgtataacagaaataccttctatacaaacctttttttctacttttagatagaaatgtctactttttcagcagttctgtgaattaaagagcagagtgactgtgggtctggaatggctggtgtacttgggaatgtactatcaggattttacagcaatgctgggaaatgacagggaaaatgacaggaatgaatctcaccagattttttatgtactcagcagagccttgagttacggtgtttattttccaatcaagtgaagatatctcctacttctcctactggaacatctcagcttctgcagtgaagaaaaattcctgtgatagttcagttctttagtttttctatttgaaaaaaaaaaatcatttaaatgatcctttgttcacggctctccttaatgactgagtgaacagttcctatctgtatatttgactaaaccttttcctaagctatctctcatggttcctatgtttttttatcataattaaaagcaaaaccatctggatcacctaacagtcagaggtcagtatctcagcgtgtgaattatagaggaaatacagagagaacctcttccacttttacttttcgtccaaataaaatgcatggtgtaccagaagttgaagatcgggttgaggattggggctagctcgatgacactaaggccccaacatcgcgggacctgctgtggcgcggattcttaggaacgctgttctagccggccccctctccaggggtcgccgtggccggcattatttcctagttcttcttgtaaccctgaggtgccagcgcggggagtgaggaggggtcagggggctaaggatgcaacctctgacgttctgcgccttcctaggagagtcttacatgtgttgagatttcacaagcaatgcgagttgtaaaataccagctctacaagaagctaggctctgtgacggcatagttttcagtagctttatcacaatattcacaatggagaattatatgacatggtagcagaaataggcccttttatgtgttgcttctattttacctcaaattgtagatatagggtaatcaataaaatccatccatgcctttcacacactaagt

SEQ ID NO: 5093 - protein, 897 aa, Homo sapiens; identical to SEQ ID NO: 4087

SEQ ID NO: 5094 - DNA, 7744 bp, Homo sapiens
gggtcttgttctgtctcccaagctggagtgcagtggtgtggtcataggtcactgcagcgtcgaactcctaggctcaagtgatcctcttgcctcaggctcctgagtagctgggacaacaggcgtgtaccacacctggatactttttaaatttttggtagagaagggatctcactctattgccaagctggtgtcgaactcttggtcttaagcagccctcccacgtcagcatcccaaagtgttgggatttcagagggatcatggcccaagttgcaatgtccaccctccccgttgaagatgaggagtcctcggagagcaggatggtggtgacattcctcatgtcagctctcgagtccatgtgtaaagaactggccaagtccaaagccgaagtggcctgcattgcagtgtatgaaacagacgtgtttgtcgtcggaactgaaagaggacgtgcttttgtcaataccagaaaggattttcaaaaagattttgtaaaatattgtgttgaagaagaagaaaaagctgcagagatgcataaaatgaaatctacaacccaggcaaatcggatgagtgtagatgctgtagaaattgaaacactcagaaaaacagttgaggactatttctgcttttgctatgggaaagctttaggcaaatccacagtggtacctgtaccatatgagaagatgctgcgagaccagtcggctgtggtagtgcaggggcttccggaaggtgttgcctttaaacaccccgagaactatgatcttgcaaccctgaaatggattttggagaacaaagcagggatttcattcatcattaagagaccttttttagagccaaagaagcatgtaggtggtcgtgtgatggtaacagatgctgacaggtcaatactatctccaggtggaagttgtggccccatcaaagtgaaaactgaacccacagaagattctggcatttccctggaaatggcagctgtgacagtaaaggaagaatcagaagatcctgattattatcaatataacattcaaggaagccaccattcttcagagggcaatgaaggcacagaaatggaagtaccagcagaagattctactcaacatgtcccttcagaaacaagtgaggaccctgaagttgaggtgactattgaagatgatgattattctccaccgtctaagagaccaaaggccaatgagctaccgcagccaccagtcccggaacccgccaatgctgggaagcggaaagtgagggagttcaacttcgagaaatggaatgctcgcatcactgatctacgtaaacaagttgaagaattgtttgaaaggaaatatgctcaagccataaaagccaaaggtccggtgacgatcccgtaccctcttttccagtctcatgttgaagatctttatgtagaaggacttcctgaaggaattccttttagaaggccatctacttacggaattcctcgcctggagaggatattacttgcaaaggaaaggattcgttttgtgattaagaaacatgagcttctgaattcaacacgtgaagatttacagcttgataagccagcttcaggagtaaaggaagaatggtatgccagaatcactaaattaagaaagatggtggatcagcttttctgcaaaaaatttgcggaagccttggggagcactgaagccaaggctgtaccgtaccaaaaatttgaggcacacccgaatgatctgtacgtggaaggactgccagaaaacattcctttccgaagtccctcatggtatggaatcccaaggctggaaaaaatcattcaagtgggcaatcgaattaaatttgttattaaaagaccagaacttctgactcacagtaccactgaagttactcagccaagaacgaatacaccagtcaaagaagattggaatgtcagaattaccaagctacggaagcaagtggaagagatttttaatttgaaatttgctcaagctcttggactcaccgaggcagtaaaagtaccatatcctgtgtttgaatcaaacccggagttcttgaaaggatcgtccgcgggagtaataaaatcaagttcgttgttaaaaaacctgaactagttatttcctacttgcctcctgggatggctagtaaaataaacactaaagctttgcagtcccccaaaagaccacgaagtcctgggagtaattcaaaggttcctgaaattgaggtcaccgtggaaggccctaataacaacaatcctcaaacctcagctgttcgaaccccgacccagactaacggttctaacgttcccttcaagccacgagggagagagttttcctttgaggcctggaatgccaaaatcacggacctaaaacagaaagttgaaaatctcttcaatgagaaatgtggggaagctcttggccttaaacaagctgtgaaggtgccgttcgcgttatttgagtctttcccggaagacttttatgtggaaggcttacctgagggtgtgccattccgaagaccatcgacttttggcattccgaggctggagaagatactcagaaacaaagccaaaattaagttcatcattaaaaagcccgaaatgtttgagacggcgattaaggagagcacctcctctaagagccctcccagaaaaataaattcatcacccaatgttaatactactgcatcaggtgttgaagaccttaacatcattcaggtgacaattccagatgatgataatgaaagactctcgaaagttgaaaaagctagacagctaagagaacaagtgaatgacctctttagtcggaaatttggtgaagctattggtatgggttttcctgtgaaagttccctacaggaaaatcacaattaaccctggctgtgtggtggttgatggcatgcccccgggggtgtccttcaaagcccccagctacctggaaatcagctccatgagaaggatcttagactctgccgagtttatcaaattcacggtcattaggtaagtgagagtttcctgcttagtcacaggagcgaatctggagctcatgaggctgactcttctaaaatgcagccacaggtagtcatcgaatccggcttcctatgctgtgcaatcaacaaatcaaaataacttgtgtcatcattagaatgtcagatgtgcttctacgaactaagctgactcttttaattctttggcaaagggttggcaaactaggactgtttgccaaattcaggctgcctcctatttttagagtcttcctgaaacacagctacacccgtattatccatggctgctttcctgtcacagtgagtaagtagctgggactgagaaggcatggcctccaaagtctaaaatatttactctctagcactttgtagaaaaaccttagctaggcacagtggctaacgcctgtaatcccagcattttgggaggccaaggcaggcagatcacctgaggtcaggagttccagaccagcctggccaacatggtgaaatcccatctctacaaaaataaaacagttagctgggcatgatggcgggtgcctgtaatcccagctactcgggaggctgaggcaggatagtcgcttgaacccaggaggtggaggttgcaatgagccaagatcatgccactgcactccagcctggacgacagagtgagactccatcacaagaaaaaaagaactttgtcaacctctgtcttagggcgccttgtcacaggcttcgggtcagacggattcaaccttgcatcagccatttgttagccaggtcactctgttctttgtctgtaaatgagattgatcgttgttcccactgagagtgtcagctccttcccgtagagcaggcatgatgattgtactcacctctgacaccattgtgagtgccacattccttcccacgtccttgtcactgtaagagatgcccacctgagcaccaaccccaggttatcttcccctttgtcttccagccccccagaaacagctacgactcaacctacccaatcatttcatcatcagattgccactgtctctagttcaggtctcttgggactggcactcagaaatctcataataaatcctcttgaggcttctcatacactcgtcttcttccaatcttctttccctcaaaatctcatattttggttccacttcacccaccgtcattctccatatcactcccaggagttaggcaaaaagccccttccgttcttccgtatgttaaacttagaatcactctgttccctgctctgcgtttctattttttgtttttcctccatttactagtagcttaacactttctaacagtgttcttattattgatacgtatctatctcttccataagcttataaggtcacggataatacttctcattgtagtacgtaaatgacgtgggctagatatgagttgaataaacagttatacctgtaaattcttacagagtgaaaataaattgttatactttacaatttgtttctctctttagaccatttccaggacttgtgattaataaccgtgagtattttgtgaagtgttttgtttttgttttttcctggggtctgacgtgtgtgcgtgtgagtgtgtatacatgcttaacgtatatcacgttacttcacctatgtcagtaaccaggccaaatacttgttttagccctcagtaaaaacaccaggcacttcctagttgtaaaattattcaagcttcttaacttcctatcctcgatgcacttaatcataaaatggtaataatagcaccgattttgggggagtcgttccagtagatggaaagcatctggaacaggtgtcagcaagctcctgccgacgtgtatgcataaagttttattgaaaccaccatcgtgtccatttgtttatggcagaactgagagatggcagcagcaagtgtgtgcctgcaaaacctaaaatatttactaattggctctgcaagaaaagagtttgcatccccctaacctagaacagtgtctagcctctagtatgtgtttagcctacagtatgtgctcagcgaatacaatctatatttattactgcttttatgactgttataattactgtgcttggatttcgttacaaagtaagtcacaatgtgcctgcttctgttagtatttcagcacagtgcctggcacacatggggctctcaaatattgctgagcgagtgaacaaatgtcctttcaattccttaacgttgatgtcattttcaatagtattttgagccaaacttaattttgcgagtgtgttttgttttcttaactttattattaaaaatgtataaaagtgaggccaggcgtggtggctcacgcctgtaatcccagcagtttgggaggctgaggcaggcggatcagttgaggttgggagttggagaccagcccgtccaacatggtgaaagcctgtctctactaaaaatacaaaaatcagctgggtgtggtggcgcgtgcctgtaatcccagctactcaggaggctgaggcaggagagttgcttgaatcctagaggtggaggttgcagtgagctgagatcgtgccattgcactccagcctgggcaacaagagcaaaactctgtcccaataaataaataaataaaatgttctcttttgttcctgttcttgtgcggtagtgtggtatagagttttatggtaattactgtgaattagtgattctgagggacatatcagaactctgaggtttgtttccttctcatcttgagggaaacagcaaatgtatgttaaaatgcttttccaagggaacaacacatccttacattatttaaaccaatctgcttcattttcagagctggttgatcagagtgagtcagaaggccccgtgatacaagaatcagctgaaccaagccagttggaagttccagccacagaagaaataaaagagactgatggaagctctcagatcaagcaagaaccagaccccacgtggtagacctcttccctcctagggtaaatcagcttctgtgtcagggatgctgtgtggtgtccatctgaaccccctgcatacgcgtagctaatgtgatctccccactttcacataagatggtggccctgccttcagggaatgtgggagccaggtgggagccttcccggatatttaagctagaagattctacagggagattctccttggatcaatatatgtctctcagtcaaagatgtaaaagcacttttgccttaaaaagaatgttctgtttctaaatagagtcaacgttgtcctcctcattggaattcactatgagtcagaatcattagactgacttttttttttccatagtaatagtattttgcagagtctcacagagctgcagatcttttgttcatcttgcagagttaacaagtctgatcctgttagtccagatttcttaaatttggccaagttataataggagcagtagcttgagacccgaagtcaggaaactttgacaatggatttttttttttaatccagagacttgtactggaatttgccttaccctgtcagctcatggacttaaggtttcatcccgctttatgagtgcttctgaatccaagtcattgttacctgaatttgcaaattaagttgtgatattcgtgactgttaaattcctgtaattagattaacctctttgcttgcttgtttgttttctctcctattttagcttaaagtatcagtggttgagaagagcttttcggacctgttactaccccaagctgtgtaatatacttgtataacagaaataccttctatacaaacctttttttctacttttagatagaaatgtctactttttcagcagttctgtgaattaaagagcagagtgactgtgggtctggaatggctggtgtacttgggaatgtactatcaggattttacagcaatgctgggaaatgacagggaaaatgacaggaatgaatctcaccagattttttatgtactcagcagagccttgagttacggtgtttattttccaatcaagtgaagatatctcctacttctcctactggaacatctcagcttctgcagtgaagaaaaattcctgtgatagttcagttctttagtttttctatttgaaaaaaaaaaatcatttaaatgatcctttgttcacggctctccttaatgactgagtgaacagttcctatctgtatatttgactaaaccttttcctaagctatctctcatggttcctatgtttttttatcataattaaaagcaaaaccatctggatcacctaacagtcagaggtcagtatctcagcgtgtgaattatagaggaaatacagagagaacctcttccacttttacttttcgtccaaataaaatgcatggtgtaccagaagttgaagatcgggttgaggattggggctagctcgatgacactaaggccccaacatcgcgggacctgctgtggcgcggattcttaggaacgctgttctagccggccccctctccaggggtcgccgtggccggcattatttcctagttcttcttgtaaccctgaggtgccagcgcggggagtgaggaggggtcagggggctaaggatgcaacctctgacgttctgcgccttcctaggagagtcttacatgtgttgagatttcacaagcaatgcgagttgtaaaataccagctctacaagaagctaggctctgtgacggcatagttttcagtagctttatcacaatattcacaatggagaattatatgacatggtagcagaaataggcccttttatgtgttgcttctattttacctcaaattgtagatatagggtaatcaataaaatccatccatgcctttcacacactaagt

SEQ ID NO: 5095 - protein, 605 aa, Homo sapiens; identical to SEQ ID NO: 4221

SEQ ID NO: 5096 - DNA, 4127 bp, Homo sapiens
gggtcttgttctgtctcccaagctggagtgcagtggtgtggtcataggtcactgcagcgtcgaactcctaggctcaagtgatcctcttgcctcaggctcctgagtagctgggacaacaggcgtgtaccacacctggatactttttaaatttttggtagagaagggatctcactctattgccaagctggtgtcgaactcttggtcttaagcagccctcccacgtcagcatcccaaagtgttgggatttcagagggatcatggcccaagttgcaatgtccaccctccccgttgaagatgaggagtcctcggagagcaggatggtggtgacattcctcatgtcagctctcgagtccatgtgtaaagaactggccaagtccaaagccgaagtggcctgcattgcagtgtatgaaacagacgtgtttgtcgtcggaactgaaagaggacgtgcttttgtcaataccagaaaggattttcaaaaagattttgtaaaatattgtgttgaagaagaagaaaaagctgcagagatgcataaaatgaaatctacaacccaggcaaatcggatgagtgtagatgctgtagaaattgaaacactcagaaaaacagttgaggactatttctgcttttgctatgggaaagctttaggcaaatccacagtggtacctgtaccatatgagaagatgctgcgagaccagtcggctgtggtagtgcaggggcttccggaaggtgttgcctttaaacaccccgagaactatgatcttgcaaccctgaaatggattttggagaacaaagcagggatttcattcatcattaagagaccttttttagagccaaagaagcatgtaggtggtcgtgtgatggtaacagatgctgacaggtcaatactatctccaggtggaagttgtggccccatcaaagtgaaaactgaacccacagaagattctggcatttccctggaaatggcagctgtgacagtaaaggaagaatcagaagatcctgattattatcaatataacattcaagcaggcccttctgaaactgatgatgttgatgaaaaacagcccctatcgaagcctttgcaaggaagccaccattcttcagagggcaatgaaggcacagaaatggaagtaccagcagaagatgatgattattctccaccgtctaagagaccaaaggccaatgagctaccgcagccaccagtcccggaacccgccaatgctgggaagcggaaagtgagggagttcaacttcgagaaatggaatgctcgcatcactgatctacgtaaacaagttgaagaattgtttgaaaggaaatatgctcaagccataaaagccaaaggtccggtgacgatcccgtaccctcttttccagtctcatgttgaagatctttatgtagaaggacttcctgaaggaattccttttagaaggccatctacttacggaattcctcgcctggagaggatattacttgcaaaggaaaggattcgttttgtgattaagaaacatgagcttctgaattcaacacgtgaagatttacagcttgataagccagcttcaggagtaaaggaagaatggtatgccagaatcactaaattaagaaagatggtggatcagcttttctgcaaaaaatttgcggaagccttggggagcactgaagccaaggctgtaccgtaccaaaaatttgaggcacacccgaatgatctgtacgtggaaggactgccagaaaacattcctttccgaagtccctcatggtatggaatcccaaggctggaaaaaatcattcaagtgggcaatcgaattaaatttgttattaaaagaccagaacttctgactcacagtaccactgaagttactcagccaagaacgaatacaccagtcaaagaagattggaatgtcagaattaccaagctacggaagcaagtggaagagatttttaatttgaaatttgctcaagctcttggactcaccgaggcagtaaaagtaccatatcctgtgtttgaatcaaacccggagttcttgtatgtggaaggcttgccagaggggattcccttccgaagccctacctggtttggaattccacgacttgaaaggatcgtccgcgggagtaataaaatcaagttcgttgttaaaaaacctgaactagttatttcctacttgcctcctgggatggctagtaaaataaacactaaagctttgcagtcccccaaaagaccacgaagtcctgggagtaattcaaaggttcctgaaattgaggtcaccgtggaaggccctaataacaacaatcctcaaacctcagctgttcgaaccccgacccagactaacggttctaacgttcccttcaagccacgagggagagagttttcctttgaggcctggaatgccaaaatcacggacctaaaacagaaagttgaaaatctcttcaatgagaaatgtggggaagctcttggccttaaacaagctgtgaaggtgccgttcgcgttatttgagtctttcccggaagacttttatgtggaaggcttacctgagggtgtgccattccgaagaccatcgacttttggcattccgaggctggagaagatactcagaaacaaagccaaaattaagttcatcattaaaaagcccgaaatgtttgagacggcgattaaggagagcacctcctctaagagccctcccagaaaaataaattcatcacccaatgttaatactactgcatcaggtgttgaagaccttaacatcattcaggtgacaattccagatgatgataatgaaagactctcgaaagttgaaaaagctagacagctaagagaacaagtgaatgacctctttagtcggaaatttggtgaagctattggtatgggttttcctgtgaaagttccctacaggaaaatcacaattaaccctggctgtgtggtggttgatggcatgcccccgggggtgtccttcaaagcccccagctacctggaaatcagctccatgagaaggatcttagactctgccgagtttatcaaattcacggtcattagaccatttccaggacttgtgattaataaccagctggttgatcagagtgagtcagaaggccccgtgatacaagaatcagctgaaccaagccagttggaagttccagccacagaagaaataaaagagactgatggaagctctcagatcaagcaagaaccagaccccacgtggtagacctcttccctcctaggcttaaagtatcagtggttgagaagagcttttcggacctgttactaccccaagctgtagccttgagttacggtgtttattttccaatcaagtgaagatatctcctacttctcctactggaacatctcagcttctgcagtgaagaaaaattcctgtgatagttcagttctttagtttttctatttgaaaaaaaaaaatcatttaaatgatcctttgttcacggctctccttaatgactgagtgaacagttcctatctgtatatttgactaaaccttttcctaagctatctctcatggttcctatgtttttttatcataattaaaagcaaaaccatctggatcacctaacagtcagaggtcagtatctcagcgtgtgaattatagaggaaatacagagagaacctcttccacttttacttttcgtccaaataaaatgcatggtgtaccagaagttgaagatcgggttgaggattggggctagctcgatgacactaaggccccaacatcgcgggacctgctgtggcgcggattcttaggaacgctgttctagccggccccctctccaggggtcgccgtggccggcattatttcctagttcttcttgtaaccctgaggtgccagcgcggggagtgaggaggggtcagggggctaaggatgcaacctctgacgttctgcgccttcctaggagagtcttacatgtgttgagatttcacaagcaatgcgagttgtaaaataccagctctacaagaagctaggctctgtgacggcatagttttcagtagctttatcacaatattcacaatggagaattatatgacatggtagcagaaataggcccttttatgtgttgcttctattttacctcaaattgtagatatagggtaatcaataaaatccatccatgcctttcacacactaagt

SEQ ID NO: 5097 - protein, 977 aa, Homo sapiens; identical to SEQ ID NO: 472

SEQ ID NO: 5098 - DNA, 4849 bp, Homo sapiens
gggtcttgttctgtctcccaagctggagtgcagtggtgtggtcataggtcactgcagcgtcgaactcctaggctcaagtgatcctcttgcctcaggctcctgagtagctgggacaacaggcgtgtaccacacctggatactttttaaatttttggtagagaagggatctcactctattgccaagctggtgtcgaactcttggtcttaagcagccctcccacgtcagcatcccaaagtgttgggatttcagagggatcatggcccaagttgcaatgtccaccctccccgttgaagatgaggagtcctcggagagcaggatggtggtgacattcctcatgtcagctctcgagtccatgtgtaaagaactggccaagtccaaagccgaagtggcctgcattgcagtgtatgaaacagacgtgtttgtcgtcggaactgaaagaggacgtgcttttgtcaataccagaaaggattttcaaaaagattttgtaaaatattgtgttgaagaagaagaaaaagctgcagagatgcataaaatgaaatctacaacccaggcaaatcggatgagtgtagatgctgtagaaattgaaacactcagaaaaacagttgaggactatttctgcttttgctatgggaaagctttaggcaaatccacagtggtacctgtaccatatgagaagatgctgcgagaccagtcggctgtggtagtgcaggggcttccggaaggtgttgcctttaaacaccccgagaactatgatcttgcaaccctgaaatggattttggagaacaaagcagggatttcattcatcattaagagaccttttttagagccaaagaagcatgtaggtggtcgtgtgatggtaacagatgctgacaggtcaatactatctccaggtggaagttgtggccccatcaaagtgaaaactgaacccacagaagattctggaagccaccattcttcagagggcaatgaaggcacagaaatggaagtaccagcagaagattctactcaacatgtcccttcagaaacaagtgaggaccctgaagttgaggtgactattgaagatgatgattattctccaccgtctaagagaccaaaggccaatgagctaccgcagccaccagtcccggaacccgccaatgctgggaagcggaaagtgagggagttcaacttcgagaaatggaatgctcgcatcactgatctacgtaaacaagttgaagaattgtttgaaaggaaatatgctcaagccataaaagccaaaggtccggtgacgatcccgtaccctcttttccagtctcatgttgaagatctttatgtagaaggacttcctgaaggaattccttttagaaggccatctacttacggaattcctcgcctggagaggatattacttgcaaaggaaaggattcgttttgtgattaagaaacatgagcttctgaattcaacacgtgaagatttacagcttgataagccagcttcaggagtaaaggaagaatggtatgccagaatcactaaattaagaaagatggtggatcagcttttctgcaaaaaatttgcggaagccttggggagcactgaagccaaggctgtaccgtaccaaaaatttgaggcacacccgaatgatctgtacgtggaaggactgccagaaaacattcctttccgaagtccctcatggtatggaatcccaaggctggaaaaaatcattcaagtgggcaatcgaattaaatttgttattaaaagaccagaacttctgactcacagtaccactgaagttactcagccaagaacgaatacaccagctcaagctcttggactcaccgaggcagtaaaagtaccatatcctgtgtttgaatcaaacccggagttcttgtatgtggaaggcttgccagaggggattcccttccgaagccctacctggtttggaattccacgacttgaaaggatcgtccgcgggagtaataaaatcaagttcgttgttaaaaaacctgaactagttatttcctacttgcctcctgggatggctagtaaaataaacactaaagctttgcagtcccccaaaagaccacgaagtcctgggagtaattcaaaggttcctgaaattgaggtcaccgtggaaggccctaataacaacaatcctcaaacctcagctgttcgaaccccgacccagactaacggttctaacgttcccttcaagccacgagggagagagttttcctttgaggcctggaatgccaaaatcacggacctaaaacagaaagttgaaaatctcttcaatgagaaatgtggggaagctcttggccttaaacaagctgtgaaggtgccgttcgcgttatttgagtctttcccggaagacttttatgtggaaggcttacctgagggtgtgccattccgaagaccatcgacttttggcattccgaggctggagaagatactcagaaacaaagccaaaattaagttcatcattaaaaagcccgaaatgtttgagacggcgattaaggagagcacctcctctaagagccctcccagaaaaataaattcatcacccaatgttaatactactgcatcaggtgttgaagaccttaacatcattcaggtgacaattccagatgatgataatgaaagactctcgaaagttgaaaaagctagacagctaagagaacaagtgaatgacctctttagtcggaaatttggtgaagctattggtatgggttttcctgtgaaagttccctacaggaaaatcacaattaaccctggctgtgtggtggttgatggcatgcccccgggggtgtccttcaaagcccccagctacctggaaatcagctccatgagaaggatcttagactctgccgagtttatcaaattcacggtcattagaccatttccaggacttgtgattaataaccagctggttgatcagagtgagtcagaaggccccgtgatacaagaatcagctgaaccaagccagttggaagttccagccacagaaggtaaaaggacctcttccctcctagggtaaatcagcttctgtgtcagggatgctgtgtggtgtccatctgaaccccctgcatacgcgtagctaatgtgatctccccactttcacataagatggtggccctgccttcagggaatgtgggagccaggtgggagccttcccggatatttaagctagaagattctacagggagattctccttggatcaatatatgtctctcagtcaaagatgtaaaagcacttttgccttaaaaagaatgttctgtttctaaatagagtcaacgttgtcctcctcattggaattcactatgagtcagaatcattagactgacttttttttttccatagtaatagtattttgcagagtctcacagagctgcagatcttttgttcatcttgcagagttaacaagtctgatcctgttagtccagatttcttaaatttggccaagttataataggagcagtagcttgagacccgaagtcaggaaactttgacaatggatttttttttttaatccagagacttgtactggaatttgccttaccctgtcagctcatggacttaaggtttcatcccgctttatgagtgcttctgaatccaagtcattgttacctgaatttgcaaattaagttgtgatattcgtgactgttaaattcctgtaattagattaacctctttgcttgcttgtttgttttctctcctattttagcttaaagtatcagtggttgagaagagcttttcggacctgttactaccccaagctgtgtaatatacttgtataacagaaataccttctatacaaacctttttttctacttttagatagaaatgtctactttttcagcagttctgtgaattaaagagcagagtgactgtgggtctggaatggctggtgtacttgggaatgtactatcaggattttacagcaatgctgggaaatgacagggaaaatgacaggaatgaatctcaccagattttttatgtactcagcagagccttgagttacggtgtttattttccaatcaagtgaagatatctcctacttctcctactggaacatctcagcttctgcagtgaagaaaaattcctgtgatagttcagttctttagtttttctatttgaaaaaaaaaaatcatttaaatgatcctttgttcacggctctccttaatgactgagtgaacagttcctatctgtatatttgactaaaccttttcctaagctatctctcatggttcctatgtttttttatcataattaaaagcaaaaccatctggatcacctaacagtcagaggtcagtatctcagcgtgtgaattatagaggaaatacagagagaacctcttccacttttacttttcgtccaaataaaatgcatggtgtaccagaagttgaagatcgggttgaggattggggctagctcgatgacactaaggccccaacatcgcgggacctgctgtggcgcggattcttaggaacgctgttctagccggccccctctccaggggtcgccgtggccggcattatttcctagttcttcttgtaaccctgaggtgccagcgcggggagtgaggaggggtcagggggctaaggatgcaacctctgacgttctgcgccttcctaggagagtcttacatgtgttgagatttcacaagcaatgcgagttgtaaaataccagctctacaagaagctaggctctgtgacggcatagttttcagtagctttatcacaatattcacaatggagaattatatgacatggtagcagaaataggcccttttatgtgttgcttctattttacctcaaattgtagatatagggtaatcaataaaatccatccatgcctttcacacactaagt

SEQ ID NO: 5099 - protein, 918 aa, Homo sapiens; identical to SEQ ID NO: 4197

SEQ ID NO: 5100 - DNA, 4854 bp, Homo sapiens
gggtcttgttctgtctcccaagctggagtgcagtggtgtggtcataggtcactgcagcgtcgaactcctaggctcaagtgatcctcttgcctcaggctcctgagtagctgggacaacaggcgtgtaccacacctggatactttttaaatttttggtagagaagggatctcactctattgccaagctggtgtcgaactcttggtcttaagcagccctcccacgtcagcatcccaaagtgttgggatttcagagggatcatggcccaagttgcaatgtccaccctccccgttgaagatgaggagtcctcggagagcaggatggtggtgacattcctcatgtcagctctcgagtccatgtgtaaagaactggccaagtccaaagccgaagtggcctgcattgcagtgtatgaaacagacgtgtttgtcgtcggaactgaaagaggacgtgcttttgtcaataccagaaaggattttcaaaaagattttgtaaaatattgtgttgaagaagaagaaaaagctgcagagatgcataaaatgaaatctacaacccaggcaaatcggatgagtgtagatgctgtagaaattgaaacactcagaaaaacagttgaggactatttctgcttttgctatgggaaagctttaggcaaatccacagtggtacctgtaccatatgagaagatgctgcgagaccagtcggctgtggtagtgcaggggcttccggaaggtgttgcctttaaacaccccgagaactatgatcttgcaaccctgaaatggattttggagaacaaagcagggatttcattcatcattaagagaccttttttagagccaaagaagcatgtaggtggtcgtgtgatggtaacagatgctgacaggtcaatactatctccaggtggaagttgtggccccatcaaagtgaaaactgaacccacagaagattctggaagccaccattcttcagagggcaatgaaggcacagaaatggaagtaccagcagaagattctactcaacatgtcccttcagaaacaagtgaggaccctgaagttgaggtgactattgaagatgatgattattctccaccgtctaagagaccaaaggccaatgagctaccgcagccaccagtcccggaacccgccaatgctgggaagcggaaagtgagggagttcaacttcgagaaatggaatgctcgcatcactgatctacgtaaacaagttgaagaattgtttgaaaggaaatatgctcaagccataaaagccaaaggtccggtgacgatcccgtaccctcttttccagtctcatgttgaagatctttatgtagaaggacttcctgaaggaattccttttagaaggccatctacttacggaattcctcgcctggagaggatattacttgcaaaggaaaggattcgttttgtgattaagaaacatgagcttctgaattcaacacgtgaagatttacagcttgataagccagcttcaggagtaaaggaagaatggtatgccagaatcactaaattaagaaagatggtggatcagcttttctgcaaaaaatttgcggaagccttggggagcactgaagccaaggctgtaccgtaccaaaaatttgaggcacacccgaatgatctgtacgtggaaggactgccagaaaacattcctttccgaagtccctcatggtatggaatcccaaggctggaaaaaatcattcaagtgggcaatcgaattaaatttgttattaaaagaccagaacttctgactcacagtaccactgaagttactcagccaagaacgaatacaccagtcaaagaagattggaatgtcagaattaccaagctacggaagcaagtggaagagatttttaatttgaaatttgctcaagctcttggactcaccgaggcagtaaaagtaccatatcctgtgtttgaatcaaacccggagttcttgaaaggatcgtccgcgggagtaataaaatcaagttcgttgttaaaaaacctgaactagttatttcctacttgcctcctgggatggctagtaaaataaacactaaagctttgcagtcccccaaaagaccacgaagtcctgggagtaattcaaaggttcctgaaattgaggtcaccgtggaaggccctaataacaacaatcctcaaacctcagctgttcgaaccccgacccagactaacggttctaacgttcccttcaagccacgagggagagagttttcctttgaggcctggaatgccaaaatcacggacctaaaacagaaagttgaaaatctcttcaatgagaaatgtggggaagctcttggccttaaacaagctgtgaaggtgccgttcgcgttatttgagtctttcccggaagacttttatgtggaaggcttacctgagggtgtgccattccgaagaccatcgacttttggcattccgaggctggagaagatactcagaaacaaagccaaaattaagttcatcattaaaaagcccgaaatgtttgagacggcgattaaggagagcacctcctctaagagccctcccagaaaaataaattcatcacccaatgttaatactactgcatcaggtgttgaagaccttaacatcattcaggtgacaattccagatgatgataatgaaagactctcgaaagttgaaaaagctagacagctaagagaacaagtgaatgacctctttagtcggaaatttggtgaagctattggtatgggttttcctgtgaaagttccctacaggaaaatcacaattaaccctggctgtgtggtggttgatggcatgcccccgggggtgtccttcaaagcccccagctacctggaaatcagctccatgagaaggatcttagactctgccgagtttatcaaattcacggtcattagaccatttccaggacttgtgattaataaccagctggttgatcagagtgagtcagaaggccccgtgatacaagaatcagctgaaccaagccagttggaagttccagccacagaaggtaaaaggacctcttccctcctagggtaaatcagcttctgtgtcagggatgctgtgtggtgtccatctgaaccccctgcatacgcgtagctaatgtgatctccccactttcacataagatggtggccctgccttcagggaatgtgggagccaggtgggagccttcccggatatttaagctagaagattctacagggagattctccttggatcaatatatgtctctcagtcaaagatgtaaaagcacttttgccttaaaaagaatgttctgtttctaaatagagtcaacgttgtcctcctcattggaattcactatgagtcagaatcattagactgacttttttttttccatagtaatagtattttgcagagtctcacagagctgcagatcttttgttcatcttgcagagttaacaagtctgatcctgttagtccagatttcttaaatttggccaagttataataggagcagtagcttgagacccgaagtcaggaaactttgacaatggatttttttttttaatccagagacttgtactggaatttgccttaccctgtcagctcatggacttaaggtttcatcccgctttatgagtgcttctgaatccaagtcattgttacctgaatttgcaaattaagttgtgatattcgtgactgttaaattcctgtaattagattaacctctttgcttgcttgtttgttttctctcctattttagcttaaagtatcagtggttgagaagagcttttcggacctgttactaccccaagctgtgtaatatacttgtataacagaaataccttctatacaaacctttttttctacttttagatagaaatgtctactttttcagcagttctgtgaattaaagagcagagtgactgtgggtctggaatggctggtgtacttgggaatgtactatcaggattttacagcaatgctgggaaatgacagggaaaatgacaggaatgaatctcaccagattttttatgtactcagcagagccttgagttacggtgtttattttccaatcaagtgaagatatctcctacttctcctactggaacatctcagcttctgcagtgaagaaaaattcctgtgatagttcagttctttagtttttctatttgaaaaaaaaaaatcatttaaatgatcctttgttcacggctctccttaatgactgagtgaacagttcctatctgtatatttgactaaaccttttcctaagctatctctcatggttcctatgtttttttatcataattaaaagcaaaaccatctggatcacctaacagtcagaggtcagtatctcagcgtgtgaattatagaggaaatacagagagaacctcttccacttttacttttcgtccaaataaaatgcatggtgtaccagaagttgaagatcgggttgaggattggggctagctcgatgacactaaggccccaacatcgcgggacctgctgtggcgcggattcttaggaacgctgttctagccggccccctctccaggggtcgccgtggccggcattatttcctagttcttcttgtaaccctgaggtgccagcgcggggagtgaggaggggtcagggggctaaggatgcaacctctgacgttctgcgccttcctaggagagtcttacatgtgttgagatttcacaagcaatgcgagttgtaaaataccagctctacaagaagctaggctctgtgacggcatagttttcagtagctttatcacaatattcacaatggagaattatatgacatggtagcagaaataggcccttttatgtgttgcttctattttacctcaaattgtagatatagggtaatcaataaaatccatccatgcctttcacacactaagt

SEQ ID NO: 5101 - protein, 579 aa, Homo sapiens; identical to SEQ ID NO: 4111

SEQ ID NO: 5102 - DNA, 7666 bp, Homo sapiens
gggtcttgttctgtctcccaagctggagtgcagtggtgtggtcataggtcactgcagcgtcgaactcctaggctcaagtgatcctcttgcctcaggctcctgagtagctgggacaacaggcgtgtaccacacctggatactttttaaatttttggtagagaagggatctcactctattgccaagctggtgtcgaactcttggtcttaagcagccctcccacgtcagcatcccaaagtgttgggatttcagagggatcatggcccaagttgcaatgtccaccctccccgttgaagatgaggagtcctcggagagcaggatggtggtgacattcctcatgtcagctctcgagtccatgtgtaaagaactggccaagtccaaagccgaagtggcctgcattgcagtgtatgaaacagacgtgtttgtcgtcggaactgaaagaggacgtgcttttgtcaataccagaaaggattttcaaaaagattttgtaaaatattgtgttgaagaagaagaaaaagctgcagagatgcataaaatgaaatctacaacccaggcaaatcggatgagtgtagatgctgtagaaattgaaacactcagaaaaacagttgaggactatttctgcttttgctatgggaaagctttaggcaaatccacagtggtacctgtaccatatgagaagatgctgcgagaccagtcggctgtggtagtgcaggggcttccggaaggtgttgcctttaaacaccccgagaactatgatcttgcaaccctgaaatggattttggagaacaaagcagggatttcattcatcattaagagaccttttttagagccaaagaagcatgtaggtggtcgtgtgatggtaacagatgctgacaggtcaatactatctccaggtggaagttgtggccccatcaaagtgaaaactgaacccacagaagattctggaagccaccattcttcagagggcaatgaaggcacagaaatggaagtaccagcagaagattctactcaacatgtcccttcagaaacaagtgaggaccctgaagttgaggtgactattgaagatgatgattattctccaccgtctaagagaccaaaggccaatgagctaccgcagccaccagtcccggaacccgccaatgctgggaagcggaaagtgagggagttcaacttcgagaaatggaatgctcgcatcactgatctacgtaaacaagttgaagaattgtttgaaaggaaatatgctcaagccataaaagccaaaggtccggtgacgatcccgtaccctcttttccagtctcatgttgaagatctttatgtagaaggacttcctgaaggaattccttttagaaggccatctacttacggaattcctcgcctggagaggatattacttgcaaaggaaaggattcgttttgtgattaagaaacatgagcttctgaattcaacacgtgaagatttacagcttgataagccagcttcaggagtaaaggaagaatggtatgccagaatcactaaattaagaaagatggtggatcagcttttctgcaaaaaatttgcggaagccttggggagcactgaagccaaggctgtaccgtaccaaaaatttgaggcacacccgaatgatctgtacgtggaaggactgccagaaaacattcctttccgaagtccctcatggtatggaatcccaaggctggaaaaaatcattcaagtgggcaatcgaattaaatttgttattaaaagaccagaacttctgactcacagtaccactgaagttactcagccaagaacgaatacaccagtcaaagaagattggaatgtcagaattaccaagctacggaagcaagtggaagagatttttaatttgaaatttgctcaagctcttggactcaccgaggcagtaaaagtaccatatcctgtgtttgaatcaaacccggagttcttgaaaggatcgtccgcgggagtaataaaatcaagttcgttgttaaaaaacctgaactagttatttcctacttgcctcctgggatggctagtaaaataaacactaaagctttgcagtcccccaaaagaccacgaagtcctgggagtaattcaaaggttcctgaaattgaggtcaccgtggaaggccctaataacaacaatcctcaaacctcagctgttcgaaccccgacccagactaacggttctaacgttcccttcaagccacgagggagagagttttcctttgaggcctggaatgccaaaatcacggacctaaaacagaaagttgaaaatctcttcaatgagaaatgtggggaagctcttggccttaaacaagctgtgaaggtgccgttcgcgttatttgagtctttcccggaagacttttatgtggaaggcttacctgagggtgtgccattccgaagaccatcgacttttggcattccgaggctggagaagatactcagaaacaaagccaaaattaagttcatcattaaaaagcccgaaatgtttgagacggcgattaaggagagcacctcctctaagagccctcccagaaaaataaattcatcacccaatgttaatactactgcatcaggtgttgaagaccttaacatcattcaggtgacaattccagatgatgataatgaaagactctcgaaagttgaaaaagctagacagctaagagaacaagtgaatgacctctttagtcggaaatttggtgaagctattggtatgggttttcctgtgaaagttccctacaggaaaatcacaattaaccctggctgtgtggtggttgatggcatgcccccgggggtgtccttcaaagcccccagctacctggaaatcagctccatgagaaggatcttagactctgccgagtttatcaaattcacggtcattaggtaagtgagagtttcctgcttagtcacaggagcgaatctggagctcatgaggctgactcttctaaaatgcagccacaggtagtcatcgaatccggcttcctatgctgtgcaatcaacaaatcaaaataacttgtgtcatcattagaatgtcagatgtgcttctacgaactaagctgactcttttaattctttggcaaagggttggcaaactaggactgtttgccaaattcaggctgcctcctatttttagagtcttcctgaaacacagctacacccgtattatccatggctgctttcctgtcacagtgagtaagtagctgggactgagaaggcatggcctccaaagtctaaaatatttactctctagcactttgtagaaaaaccttagctaggcacagtggctaacgcctgtaatcccagcattttgggaggccaaggcaggcagatcacctgaggtcaggagttccagaccagcctggccaacatggtgaaatcccatctctacaaaaataaaacagttagctgggcatgatggcgggtgcctgtaatcccagctactcgggaggctgaggcaggatagtcgcttgaacccaggaggtggaggttgcaatgagccaagatcatgccactgcactccagcctggacgacagagtgagactccatcacaagaaaaaaagaactttgtcaacctctgtcttagggcgccttgtcacaggcttcgggtcagacggattcaaccttgcatcagccatttgttagccaggtcactctgttctttgtctgtaaatgagattgatcgttgttcccactgagagtgtcagctccttcccgtagagcaggcatgatgattgtactcacctctgacaccattgtgagtgccacattccttcccacgtccttgtcactgtaagagatgcccacctgagcaccaaccccaggttatcttcccctttgtcttccagccccccagaaacagctacgactcaacctacccaatcatttcatcatcagattgccactgtctctagttcaggtctcttgggactggcactcagaaatctcataataaatcctcttgaggcttctcatacactcgtcttcttccaatcttctttccctcaaaatctcatattttggttccacttcacccaccgtcattctccatatcactcccaggagttaggcaaaaagccccttccgttcttccgtatgttaaacttagaatcactctgttccctgctctgcgtttctattttttgtttttcctccatttactagtagcttaacactttctaacagtgttcttattattgatacgtatctatctcttccataagcttataaggtcacggataatacttctcattgtagtacgtaaatgacgtgggctagatatgagttgaataaacagttatacctgtaaattcttacagagtgaaaataaattgttatactttacaatttgtttctctctttagaccatttccaggacttgtgattaataaccgtgagtattttgtgaagtgttttgtttttgttttttcctggggtctgacgtgtgtgcgtgtgagtgtgtatacatgcttaacgtatatcacgttacttcacctatgtcagtaaccaggccaaatacttgttttagccctcagtaaaaacaccaggcacttcctagttgtaaaattattcaagcttcttaacttcctatcctcgatgcacttaatcataaaatggtaataatagcaccgattttgggggagtcgttccagtagatggaaagcatctggaacaggtgtcagcaagctcctgccgacgtgtatgcataaagttttattgaaaccaccatcgtgtccatttgtttatggcagaactgagagatggcagcagcaagtgtgtgcctgcaaaacctaaaatatttactaattggctctgcaagaaaagagtttgcatccccctaacctagaacagtgtctagcctctagtatgtgtttagcctacagtatgtgctcagcgaatacaatctatatttattactgcttttatgactgttataattactgtgcttggatttcgttacaaagtaagtcacaatgtgcctgcttctgttagtatttcagcacagtgcctggcacacatggggctctcaaatattgctgagcgagtgaacaaatgtcctttcaattccttaacgttgatgtcattttcaatagtattttgagccaaacttaattttgcgagtgtgttttgttttcttaactttattattaaaaatgtataaaagtgaggccaggcgtggtggctcacgcctgtaatcccagcagtttgggaggctgaggcaggcggatcagttgaggttgggagttggagaccagcccgtccaacatggtgaaagcctgtctctactaaaaatacaaaaatcagctgggtgtggtggcgcgtgcctgtaatcccagctactcaggaggctgaggcaggagagttgcttgaatcctagaggtggaggttgcagtgagctgagatcgtgccattgcactccagcctgggcaacaagagcaaaactctgtcccaataaataaataaataaaatgttctcttttgttcctgttcttgtgcggtagtgtggtatagagttttatggtaattactgtgaattagtgattctgagggacatatcagaactctgaggtttgtttccttctcatcttgagggaaacagcaaatgtatgttaaaatgcttttccaagggaacaacacatccttacattatttaaaccaatctgcttcattttcagagctggttgatcagagtgagtcagaaggccccgtgatacaagaatcagctgaaccaagccagttggaagttccagccacagaagaaataaaagagactgatggaagctctcagatcaagcaagaaccagaccccacgtggtagacctcttccctcctagggtaaatcagcttctgtgtcagggatgctgtgtggtgtccatctgaaccccctgcatacgcgtagctaatgtgatctccccactttcacataagatggtggccctgccttcagggaatgtgggagccaggtgggagccttcccggatatttaagctagaagattctacagggagattctccttggatcaatatatgtctctcagtcaaagatgtaaaagcacttttgccttaaaaagaatgttctgtttctaaatagagtcaacgttgtcctcctcattggaattcactatgagtcagaatcattagactgacttttttttttccatagtaatagtattttgcagagtctcacagagctgcagatcttttgttcatcttgcagagttaacaagtctgatcctgttagtccagatttcttaaatttggccaagttataataggagcagtagcttgagacccgaagtcaggaaactttgacaatggatttttttttttaatccagagacttgtactggaatttgccttaccctgtcagctcatggacttaaggtttcatcccgctttatgagtgcttctgaatccaagtcattgttacctgaatttgcaaattaagttgtgatattcgtgactgttaaattcctgtaattagattaacctctttgcttgcttgtttgttttctctcctattttagcttaaagtatcagtggttgagaagagcttttcggacctgttactaccccaagctgtgtaatatacttgtataacagaaataccttctatacaaacctttttttctacttttagatagaaatgtctactttttcagcagttctgtgaattaaagagcagagtgactgtgggtctggaatggctggtgtacttgggaatgtactatcaggattttacagcaatgctgggaaatgacagggaaaatgacaggaatgaatctcaccagattttttatgtactcagcagagccttgagttacggtgtttattttccaatcaagtgaagatatctcctacttctcctactggaacatctcagcttctgcagtgaagaaaaattcctgtgatagttcagttctttagtttttctatttgaaaaaaaaaaatcatttaaatgatcctttgttcacggctctccttaatgactgagtgaacagttcctatctgtatatttgactaaaccttttcctaagctatctctcatggttcctatgtttttttatcataattaaaagcaaaaccatctggatcacctaacagtcagaggtcagtatctcagcgtgtgaattatagaggaaatacagagagaacctcttccacttttacttttcgtccaaataaaatgcatggtgtaccagaagttgaagatcgggttgaggattggggctagctcgatgacactaaggccccaacatcgcgggacctgctgtggcgcggattcttaggaacgctgttctagccggccccctctccaggggtcgccgtggccggcattatttcctagttcttcttgtaaccctgaggtgccagcgcggggagtgaggaggggtcagggggctaaggatgcaacctctgacgttctgcgccttcctaggagagtcttacatgtgttgagatttcacaagcaatgcgagttgtaaaataccagctctacaagaagctaggctctgtgacggcatagttttcagtagctttatcacaatattcacaatggagaattatatgacatggtagcagaaataggcccttttatgtgttgcttctattttacctcaaattgtagatatagggtaatcaataaaatccatccatgcctttcacacactaagt

SEQ ID NO: 5103 - protein, 579 aa, Homo sapiens; identical to SEQ ID NO: 4111

SEQ ID NO: 5104 - DNA, 4470 bp, Homo sapiens
gggtcttgttctgtctcccaagctggagtgcagtggtgtggtcataggtcactgcagcgtcgaactcctaggctcaagtgatcctcttgcctcaggctcctgagtagctgggacaacaggcgtgtaccacacctggatactttttaaatttttggtagagaagggatctcactctattgccaagctggtgtcgaactcttggtcttaagcagccctcccacgtcagcatcccaaagtgttgggatttcagagggatcatggcccaagttgcaatgtccaccctccccgttgaagatgaggagtcctcggagagcaggatggtggtgacattcctcatgtcagctctcgagtccatgtgtaaagaactggccaagtccaaagccgaagtggcctgcattgcagtgtatgaaacagacgtgtttgtcgtcggaactgaaagaggacgtgcttttgtcaataccagaaaggattttcaaaaagattttgtaaaatattgtgttgaagaagaagaaaaagctgcagagatgcataaaatgaaatctacaacccaggcaaatcggatgagtgtagatgctgtagaaattgaaacactcagaaaaacagttgaggactatttctgcttttgctatgggaaagctttaggcaaatccacagtggtacctgtaccatatgagaagatgctgcgagaccagtcggctgtggtagtgcaggggcttccggaaggtgttgcctttaaacaccccgagaactatgatcttgcaaccctgaaatggattttggagaacaaagcagggatttcattcatcattaagagaccttttttagagccaaagaagcatgtaggtggtcgtgtgatggtaacagatgctgacaggtcaatactatctccaggtggaagttgtggccccatcaaagtgaaaactgaacccacagaagattctggcatttccctggaaatggcagctgtgacagtaaaggaagaatcagaagatcctgattattatcaatataacattcaaggaagccaccattcttcagagggcaatgaaggcacagaaatggaagtaccagcagaagattctactcaacatgtcccttcagaaacaagtgaggaccctgaagttgaggtgactattgaagatgatgattattctccaccgtctaagagaccaaaggccaatgagctaccgcagccaccagtcccggaacccgccaatgctgggaagcggaaagtgagggagttcaacttcgagaaatggaatgctcgcatcactgatctacgtaaacaagttgaagaattgtttgaaaggaaatatgctcaagccataaaagccaaaggtccggtgacgatcccgtaccctcttttccagtctcatgttgaagatctttatgtagaaggacttcctgaaggaattccttttagaaggccatctacttacggaattcctcgcctggagaggatattacttgcaaaggaaaggattcgttttgtgattaagaaacatgagcttctgaattcaacacgtgaagatttacagcttgataagccagcttcaggagtaaaggaagaatggtatgccagaatcactaaattaagaaagatggtggatcagcttttctgcaaaaaatttgcggaagccttggggagcactgaagccaaggctgtaccgtaccaaaaatttgaggcacacccgaatgatctgtacgtggaaggactgccagaaaacattcctttccgaagtccctcatggtatggaatcccaaggctggaaaaaatcattcaagtgggcaatcgaattaaatttgttattaaaagaccagaacttctgactcacagtaccactgaagttactcagccaagaacgaatacaccagtcaaagaagattggaatgtcagaattaccaagctacggaagcaagtggaagagatttttaatttgaaatttgcttagatttgttgacagcggtttcctggagtgctgtcttgagaacgattctgaggaggctcagcaagaaagagtgtttcagttgattgggtgtgtctgtcatggagaaggaactcaagctcttggactcaccgaggcagtaaaagtaccatatcctgtgtttgaatcaaacccggagttcttgtatgtggaaggcttgccagaggggattcccttccgaagccctacctggtttggaattccacgacttgaaaggatcgtccgcgggagtaataaaatcaagttcgttgttaaaaaacctgaactagttatttcctacttgcctcctgggatggctagtaaaataaacactaaagctttgcagtcccccaaaagaccacgaagtcctgggagtaattcaaaggttcctgaaattgaggtcaccgtggaaggccctaataacaacaatcctcaaacctcagctgttcgaaccccgacccagactaacggttctaacgttcccttcaagccacgagggagagagttttcctttgaggcctggaatgccaaaatcacggacctaaaacagaaagttgaaaatctcttcaatgagaaatgtggggaagctcttggccttaaacaagctgtgaaggtgccgttcgcgttatttgagtctttcccggaagacttttatgtggaaggcttacctgagggtgtgccattccgaagaccatcgacttttggcattccgaggctggagaagatactcagaaacaaagccaaaattaagttcatcattaaaaagcccgaaatgtttgagacggcgattaaggagagcacctcctctaagagccctcccagaaaaataaattcatcacccaatgttaatactactgcatcaggtgttgaagaccttaacatcattcaggtgacaattccagatgatgataatgaaagactctcgaaagttgaaaaagctagacagctaagagaacaagtgaatgacctctttagtcggaaatttggtgaagctattggtatgggttttcctgtgaaagttccctacaggaaaatcacaattaaccctggctgtgtggtggttgatggcatgcccccgggggtgtccttcaaagcccccagctacctggaaatcagctccatgagaaggatcttagactctgccgagtttatcaaattcacggtcattagaccatttccaggacttgtgattaataaccagctggttgatcagagtgagtcagaaggccccgtgatacaagaatcagctgaaccaagccagttggaagttccagccacagaagaaataaaagagactgatggaagctctcagatcaagcaagaaccagaccccacgtggtagacctcttccctcctaggcttaaagtatcagtggttgagaagagcttttcggacctgttactaccccaagctgtgtaatatacttgtataacagaaataccttctatacaaacctttttttctacttttagatagaaatgtctactttttcagcagttctgtgaattaaagagcagagtgactgtgggtctggaatggctggtgtacttgggaatgtactatcaggattttacagcaatgctgggaaatgacagggaaaatgacaggaatgaatctcaccagattttttatgtactcagcagagccttgagttacggtgtttattttccaatcaagtgaagatatctcctacttctcctactggaacatctcagcttctgcagtgaagaaaaattcctgtgatagttcagttctttagtttttctatttgaaaaaaaaaaatcatttaaatgatcctttgttcacggctctccttaatgactgagtgaacagttcctatctgtatatttgactaaaccttttcctaagctatctctcatggttcctatgtttttttatcataattaaaagcaaaaccatctggatcacctaacagtcagaggtcagtatctcagcgtgtgaattatagaggaaatacagagagaacctcttccacttttacttttcgtccaaataaaatgcatggtgtaccagaagttgaagatcgggttgaggattggggctagctcgatgacactaaggccccaacatcgcgggacctgctgtggcgcggattcttaggaacgctgttctagccggccccctctccaggggtcgccgtggccggcattatttcctagttcttcttgtaaccctgaggtgccagcgcggggagtgaggaggggtcagggggctaaggatgcaacctctgacgttctgcgccttcctaggagagtcttacatgtgttgagatttcacaagcaatgcgagttgtaaaataccagctctacaagaagctaggctctgtgacggcatagttttcagtagctttatcacaatattcacaatggagaattatatgacatggtagcagaaataggcccttttatgtgttgcttctattttacctcaaattgtagatatagggtaatcaataaaatccatccatgcctttcacacactaagt

SEQ ID NO: 5105 - protein, 564 aa, Homo sapiens; identical to SEQ ID NO: 4061

SEQ ID NO: 5106 - DNA, 5159 bp, Homo sapiens
gggtcttgttctgtctcccaagctggagtgcagtggtgtggtcataggtcactgcagcgtcgaactcctaggctcaagtgatcctcttgcctcaggctcctgagtagctgggacaacaggcgtgtaccacacctggatactttttaaatttttggtagagaagggatctcactctattgccaagctggtgtcgaactcttggtcttaagcagccctcccacgtcagcatcccaaagtgttgggatttcagagggatcatggcccaagttgcaatgtccaccctccccgttgaagatgaggagtcctcggagagcaggatggtggtgacattcctcatgtcagctctcgagtccatgtgtaaagaactggccaagtccaaagccgaagtggcctgcattgcagtgtatgaaacagacgtgtttgtcgtcggaactgaaagaggacgtgcttttgtcaataccagaaaggattttcaaaaagattttgtaaaatattgtgttgaagaagaagaaaaagctgcagagatgcataaaatgaaatctacaacccaggcaaatcggatgagtgtagatgctgtagaaattgaaacactcagaaaaacagttgaggactatttctgcttttgctatgggaaagctttaggcaaatccacagtggtacctgtaccatatgagaagatgctgcgagaccagtcggctgtggtagtgcaggggcttccggaaggtgttgcctttaaacaccccgagaactatgatcttgcaaccctgaaatggattttggagaacaaagcagggatttcattcatcattaagagaccttttttagagccaaagaagcatgtaggtggtcgtgtgatggtaacagatgctgacaggtcaatactatctccaggtggaagttgtggccccatcaaagtgaaaactgaacccacagaagattctggcatttccctggaaatggcagctgtgacagtaaaggaagaatcagaagatcctgattattatcaatataacattcaagcaggcccttctgaaactgatgatgttgatgaaaaacagcccctatcgaagcctttgcaaggaagccaccattcttcagagggcaatgaaggcacagaaatggaagtaccagcagaagatgatgattattctccaccgtctaagagaccaaaggccaatgagctaccgcagccaccagtcccggaacccgccaatgctgggaagcggaaagtgagggagttcaacttcgagaaatggaatgctcgcatcactgatctacgtaaacaagttgaagaattgtttgaaaggaaatatgctcaagccataaaagccaaaggtccggtgacgatcccgtaccctcttttccagtctcatgttgaagatctttatgtagaaggacttcctgaaggaattccttttagaaggccatctacttacggaattcctcgcctggagaggatattacttgcaaaggaaaggattcgttttgtgattaagaaacatgagcttctgaattcaacacgtgaagatttacagcttgataagccagcttcaggagtaaaggaagaatggtatgccagaatcactaaattaagaaagatggtggatcagcttttctgcaaaaaatttgcggaagccttggggagcactgaagccaaggctgtaccgtaccaaaaatttgaggcacacccgaatgatctgtacgtggaaggactgccagaaaacattcctttccgaagtccctcatggtatggaatcccaaggctggaaaaaatcattcaagtgggcaatcgaattaaatttgttattaaaagaccagaacttctgactcacagtaccactgaagttactcagccaagaacgaatacaccagtcaaagaagattggaatgtcagaattaccaagctacggaagcaagtggaagagatttttaatttgaaatttgcttagatttgttgacagcggtttcctggagtgctgtcttgagaacgattctgaggaggctcagcaagaaagagtgtttcagttgattgggtgtgtctgtcatggagaaggaactcaagctcttggactcaccgaggcagtaaaagtaccatatcctgtgtttgaatcaaacccggagttcttgtatgtggaaggcttgccagaggggattcccttccgaagccctacctggtttggaattccacgacttgaaaggatcgtccgcgggagtaataaaatcaagttcgttgttaaaaaacctgaactagttatttcctacttgcctcctgggatggctagtaaaataaacactaaagctttgcagtcccccaaaagaccacgaagtcctgggagtaattcaaaggttcctgaaattgaggtcaccgtggaaggccctaataacaacaatcctcaaacctcagctgttcgaaccccgacccagactaacggttctaacgttcccttcaagccacgagggagagagttttcctttgaggcctggaatgccaaaatcacggacctaaaacagaaagttgaaaatctcttcaatgagaaatgtggggaagctcttggccttaaacaagctgtgaaggtgccgttcgcgttatttgagtctttcccggaagacttttatgtggaaggcttacctgagggtgtgccattccgaagaccatcgacttttggcattccgaggctggagaagatactcagaaacaaagccaaaattaagttcatcattaaaaagcccgaaatgtttgagacggcgattaaggagagcacctcctctaagagccctcccagaaaaataaattcatcacccaatgttaatactactgcatcaggtgttgaagaccttaacatcattcaggtgacaattccagatgatgataatgaaagactctcgaaagttgaaaaagctagacagctaagagaacaagtgaatgacctctttagtcggaaatttggtgaagctattggtatgggttttcctgtgaaagttccctacaggaaaatcacaattaaccctggctgtgtggtggttgatggcatgcccccgggggtgtccttcaaagcccccagctacctggaaatcagctccatgagaaggatcttagactctgccgagtttatcaaattcacggtcattagaccatttccaggacttgtgattaataaccagctggttgatcagagtgagtcagaaggccccgtgatacaagaatcagctgaaccaagccagttggaagttccagccacagaagaaataaaagagactgatggaagctctcagatcaagcaagaaccagaccccacgtggtagacctcttccctcctagggtaaatcagcttctgtgtcagggatgctgtgtggtgtccatctgaaccccctgcatacgcgtagctaatgtgatctccccactttcacataagatggtggccctgccttcagggaatgtgggagccaggtgggagccttcccggatatttaagctagaagattctacagggagattctccttggatcaatatatgtctctcagtcaaagatgtaaaagcacttttgccttaaaaagaatgttctgtttctaaatagagtcaacgttgtcctcctcattggaattcactatgagtcagaatcattagactgacttttttttttccatagtaatagtattttgcagagtctcacagagctgcagatcttttgttcatcttgcagagttaacaagtctgatcctgttagtccagatttcttaaatttggccaagttataataggagcagtagcttgagacccgaagtcaggaaactttgacaatggatttttttttttaatccagagacttgtactggaatttgccttaccctgtcagctcatggacttaaggtttcatcccgctttatgagtgcttctgaatccaagtcattgttacctgaatttgcaaattaagttgtgatattcgtgactgttaaattcctgtaattagattaacctctttgcttgcttgtttgttttctctcctattttagcttaaagtatcagtggttgagaagagcttttcggacctgttactaccccaagctgtgtaatatacttgtataacagaaataccttctatacaaacctttttttctacttttagatagaaatgtctactttttcagcagttctgtgaattaaagagcagagtgactgtgggtctggaatggctggtgtacttgggaatgtactatcaggattttacagcaatgctgggaaatgacagggaaaatgacaggaatgaatctcaccagattttttatgtactcagcagagccttgagttacggtgtttattttccaatcaagtgaagatatctcctacttctcctactggaacatctcagcttctgcagtgaagaaaaattcctgtgatagttcagttctttagtttttctatttgaaaaaaaaaaatcatttaaatgatcctttgttcacggctctccttaatgactgagtgaacagttcctatctgtatatttgactaaaccttttcctaagctatctctcatggttcctatgtttttttatcataattaaaagcaaaaccatctggatcacctaacagtcagaggtcagtatctcagcgtgtgaattatagaggaaatacagagagaacctcttccacttttacttttcgtccaaataaaatgcatggtgtaccagaagttgaagatcgggttgaggattggggctagctcgatgacactaaggccccaacatcgcgggacctgctgtggcgcggattcttaggaacgctgttctagccggccccctctccaggggtcgccgtggccggcattatttcctagttcttcttgtaaccctgaggtgccagcgcggggagtgaggaggggtcagggggctaaggatgcaacctctgacgttctgcgccttcctaggagagtcttacatgtgttgagatttcacaagcaatgcgagttgtaaaataccagctctacaagaagctaggctctgtgacggcatagttttcagtagctttatcacaatattcacaatggagaattatatgacatggtagcagaaataggcccttttatgtgttgcttctattttacctcaaattgtagatatagggtaatcaataaaatccatccatgcctttcacacactaagt

SEQ ID NO: 5107 - protein, 563 aa, Homo sapiens; identical to SEQ ID NO: 4097

SEQ ID NO: 5108 - DNA, 7739 bp, Homo sapiens
gggtcttgttctgtctcccaagctggagtgcagtggtgtggtcataggtcactgcagcgtcgaactcctaggctcaagtgatcctcttgcctcaggctcctgagtagctgggacaacaggcgtgtaccacacctggatactttttaaatttttggtagagaagggatctcactctattgccaagctggtgtcgaactcttggtcttaagcagccctcccacgtcagcatcccaaagtgttgggatttcagagggatcatggcccaagttgcaatgtccaccctccccgttgaagatgaggagtcctcggagagcaggatggtggtgacattcctcatgtcagctctcgagtccatgtgtaaagaactggccaagtccaaagccgaagtggcctgcattgcagtgtatgaaacagacgtgtttgtcgtcggaactgaaagaggacgtgcttttgtcaataccagaaaggattttcaaaaagattttgtaaaatattgtgttgaagaagaagaaaaagctgcagagatgcataaaatgaaatctacaacccaggcaaatcggatgagtgtagatgctgtagaaattgaaacactcagaaaaacagttgaggactatttctgcttttgctatgggaaagctttaggcaaatccacagtggtacctgtaccatatgagaagatgctgcgagaccagtcggctgtggtagtgcaggggcttccggaaggtgttgcctttaaacaccccgagaactatgatcttgcaaccctgaaatggattttggagaacaaagcagggatttcattcatcattaagagaccttttttagagccaaagaagcatgtaggtggtcgtgtgatggtaacagatgctgacaggtcaatactatctccaggtggaagttgtggccccatcaaagtgaaaactgaacccacagaagattctggcatttccctggaaatggcagctgtgacagtaaaggaagaatcagaagatcctgattattatcaatataacattcaaggaagccaccattcttcagagggcaatgaaggcacagaaatggaagtaccagcagaagattctactcaacatgtcccttcagaaacaagtgaggaccctgaagttgaggtgactattgaagatgatgattattctccaccgtctaagagaccaaaggccaatgagctaccgcagccaccagtcccggaacccgccaatgctgggaagcggaaagtgagggagttcaacttcgagaaatggaatgctcgcatcactgatctacgtaaacaagttgaagaattgtttgaaaggaaatatgctcaagccataaaagccaaaggtccggtgacgatcccgtaccctcttttccagtctcatgttgaagatctttatgtagaaggacttcctgaaggaattccttttagaaggccatctacttacggaattcctcgcctggagaggatattacttgcaaaggaaaggattcgttttgtgattaagaaacatgagcttctgaattcaacacgtgaagatttacagcttgataagccagcttcaggagtaaaggaagaatggtatgccagaatcactaaattaagaaagatggtggatcagcttttctgcaaaaaatttgcggaagccttggggagcactgaagccaaggctgtaccgtaccaaaaatttgaggcacacccgaatgatctgtacgtggaaggactgccagaaaacattcctttccgaagtccctcatggtatggaatcccaaggctggaaaaaatcattcaagtgggcaatcgaattaaatttgttattaaaagaccagaacttctgactcacagtaccactgaagttactcagccaagaacgaatacaccagctcaagctcttggactcaccgaggcagtaaaagtaccatatcctgtgtttgaatcaaacccggagttcttgtatgtggaaggcttgccagaggggattcccttccgaagccctacctggtttggaattccacgacttgaaaggatcgtccgcgggagtaataaaatcaagttcgttgttaaaaaacctgaactagttatttcctacttgcctcctgggatggctagtaaaataaacactaaagctttgcagtcccccaaaagaccacgaagtcctgggagtaattcaaaggttcctgaaattgaggtcaccgtggaaggccctaataacaacaatcctcaaacctcagctgttcgaaccccgacccagactaacggttctaacgttcccttcaagccacgagggagagagttttcctttgaggcctggaatgccaaaatcacggacctaaaacagaaagttgaaaatctcttcaatgagaaatgtggggaagctcttggccttaaacaagctgtgaaggtgccgttcgcgttatttgagtctttcccggaagacttttatgtggaaggcttacctgagggtgtgccattccgaagaccatcgacttttggcattccgaggctggagaagatactcagaaacaaagccaaaattaagttcatcattaaaaagcccgaaatgtttgagacggcgattaaggagagcacctcctctaagagccctcccagaaaaataaattcatcacccaatgttaatactactgcatcaggtgttgaagaccttaacatcattcaggtgacaattccagatgatgataatgaaagactctcgaaagttgaaaaagctagacagctaagagaacaagtgaatgacctctttagtcggaaatttggtgaagctattggtatgggttttcctgtgaaagttccctacaggaaaatcacaattaaccctggctgtgtggtggttgatggcatgcccccgggggtgtccttcaaagcccccagctacctggaaatcagctccatgagaaggatcttagactctgccgagtttatcaaattcacggtcattaggtaagtgagagtttcctgcttagtcacaggagcgaatctggagctcatgaggctgactcttctaaaatgcagccacaggtagtcatcgaatccggcttcctatgctgtgcaatcaacaaatcaaaataacttgtgtcatcattagaatgtcagatgtgcttctacgaactaagctgactcttttaattctttggcaaagggttggcaaactaggactgtttgccaaattcaggctgcctcctatttttagagtcttcctgaaacacagctacacccgtattatccatggctgctttcctgtcacagtgagtaagtagctgggactgagaaggcatggcctccaaagtctaaaatatttactctctagcactttgtagaaaaaccttagctaggcacagtggctaacgcctgtaatcccagcattttgggaggccaaggcaggcagatcacctgaggtcaggagttccagaccagcctggccaacatggtgaaatcccatctctacaaaaataaaacagttagctgggcatgatggcgggtgcctgtaatcccagctactcgggaggctgaggcaggatagtcgcttgaacccaggaggtggaggttgcaatgagccaagatcatgccactgcactccagcctggacgacagagtgagactccatcacaagaaaaaaagaactttgtcaacctctgtcttagggcgccttgtcacaggcttcgggtcagacggattcaaccttgcatcagccatttgttagccaggtcactctgttctttgtctgtaaatgagattgatcgttgttcccactgagagtgtcagctccttcccgtagagcaggcatgatgattgtactcacctctgacaccattgtgagtgccacattccttcccacgtccttgtcactgtaagagatgcccacctgagcaccaaccccaggttatcttcccctttgtcttccagccccccagaaacagctacgactcaacctacccaatcatttcatcatcagattgccactgtctctagttcaggtctcttgggactggcactcagaaatctcataataaatcctcttgaggcttctcatacactcgtcttcttccaatcttctttccctcaaaatctcatattttggttccacttcacccaccgtcattctccatatcactcccaggagttaggcaaaaagccccttccgttcttccgtatgttaaacttagaatcactctgttccctgctctgcgtttctattttttgtttttcctccatttactagtagcttaacactttctaacagtgttcttattattgatacgtatctatctcttccataagcttataaggtcacggataatacttctcattgtagtacgtaaatgacgtgggctagatatgagttgaataaacagttatacctgtaaattcttacagagtgaaaataaattgttatactttacaatttgtttctctctttagaccatttccaggacttgtgattaataaccgtgagtattttgtgaagtgttttgtttttgttttttcctggggtctgacgtgtgtgcgtgtgagtgtgtatacatgcttaacgtatatcacgttacttcacctatgtcagtaaccaggccaaatacttgttttagccctcagtaaaaacaccaggcacttcctagttgtaaaattattcaagcttcttaacttcctatcctcgatgcacttaatcataaaatggtaataatagcaccgattttgggggagtcgttccagtagatggaaagcatctggaacaggtgtcagcaagctcctgccgacgtgtatgcataaagttttattgaaaccaccatcgtgtccatttgtttatggcagaactgagagatggcagcagcaagtgtgtgcctgcaaaacctaaaatatttactaattggctctgcaagaaaagagtttgcatccccctaacctagaacagtgtctagcctctagtatgtgtttagcctacagtatgtgctcagcgaatacaatctatatttattactgcttttatgactgttataattactgtgcttggatttcgttacaaagtaagtcacaatgtgcctgcttctgttagtatttcagcacagtgcctggcacacatggggctctcaaatattgctgagcgagtgaacaaatgtcctttcaattccttaacgttgatgtcattttcaatagtattttgagccaaacttaattttgcgagtgtgttttgttttcttaactttattattaaaaatgtataaaagtgaggccaggcgtggtggctcacgcctgtaatcccagcagtttgggaggctgaggcaggcggatcagttgaggttgggagttggagaccagcccgtccaacatggtgaaagcctgtctctactaaaaatacaaaaatcagctgggtgtggtggcgcgtgcctgtaatcccagctactcaggaggctgaggcaggagagttgcttgaatcctagaggtggaggttgcagtgagctgagatcgtgccattgcactccagcctgggcaacaagagcaaaactctgtcccaataaataaataaataaaatgttctcttttgttcctgttcttgtgcggtagtgtggtatagagttttatggtaattactgtgaattagtgattctgagggacatatcagaactctgaggtttgtttccttctcatcttgagggaaacagcaaatgtatgttaaaatgcttttccaagggaacaacacatccttacattatttaaaccaatctgcttcattttcagagctggttgatcagagtgagtcagaaggccccgtgatacaagaatcagctgaaccaagccagttggaagttccagccacagaagaaataaaagagactgatggaagctctcagatcaagcaagaaccagaccccacgtggtagacctcttccctcctagggtaaatcagcttctgtgtcagggatgctgtgtggtgtccatctgaaccccctgcatacgcgtagctaatgtgatctccccactttcacataagatggtggccctgccttcagggaatgtgggagccaggtgggagccttcccggatatttaagctagaagattctacagggagattctccttggatcaatatatgtctctcagtcaaagatgtaaaagcacttttgccttaaaaagaatgttctgtttctaaatagagtcaacgttgtcctcctcattggaattcactatgagtcagaatcattagactgacttttttttttccatagtaatagtattttgcagagtctcacagagctgcagatcttttgttcatcttgcagagttaacaagtctgatcctgttagtccagatttcttaaatttggccaagttataataggagcagtagcttgagacccgaagtcaggaaactttgacaatggatttttttttttaatccagagacttgtactggaatttgccttaccctgtcagctcatggacttaaggtttcatcccgctttatgagtgcttctgaatccaagtcattgttacctgaatttgcaaattaagttgtgatattcgtgactgttaaattcctgtaattagattaacctctttgcttgcttgtttgttttctctcctattttagcttaaagtatcagtggttgagaagagcttttcggacctgttactaccccaagctgtgtaatatacttgtataacagaaataccttctatacaaacctttttttctacttttagatagaaatgtctactttttcagcagttctgtgaattaaagagcagagtgactgtgggtctggaatggctggtgtacttgggaatgtactatcaggattttacagcaatgctgggaaatgacagggaaaatgacaggaatgaatctcaccagattttttatgtactcagcagagccttgagttacggtgtttattttccaatcaagtgaagatatctcctacttctcctactggaacatctcagcttctgcagtgaagaaaaattcctgtgatagttcagttctttagtttttctatttgaaaaaaaaaaatcatttaaatgatcctttgttcacggctctccttaatgactgagtgaacagttcctatctgtatatttgactaaaccttttcctaagctatctctcatggttcctatgtttttttatcataattaaaagcaaaaccatctggatcacctaacagtcagaggtcagtatctcagcgtgtgaattatagaggaaatacagagagaacctcttccacttttacttttcgtccaaataaaatgcatggtgtaccagaagttgaagatcgggttgaggattggggctagctcgatgacactaaggccccaacatcgcgggacctgctgtggcgcggattcttaggaacgctgttctagccggccccctctccaggggtcgccgtggccggcattatttcctagttcttcttgtaaccctgaggtgccagcgcggggagtgaggaggggtcagggggctaaggatgcaacctctgacgttctgcgccttcctaggagagtcttacatgtgttgagatttcacaagcaatgcgagttgtaaaataccagctctacaagaagctaggctctgtgacggcatagttttcagtagctttatcacaatattcacaatggagaattatatgacatggtagcagaaataggcccttttatgtgttgcttctattttacctcaaattgtagatatagggtaatcaataaaatccatccatgcctttcacacactaagt

SEQ ID NO: 5109 - protein, 898 aa, Homo sapiens; identical to SEQ ID NO: 4367

SEQ ID NO: 5110 - DNA, 4067 bp, Homo sapiens
gggtcttgttctgtctcccaagctggagtgcagtggtgtggtcataggtcactgcagcgtcgaactcctaggctcaagtgatcctcttgcctcaggctcctgagtagctgggacaacaggcgtgtaccacacctggatactttttaaatttttggtagagaagggatctcactctattgccaagctggtgtcgaactcttggtcttaagcagccctcccacgtcagcatcccaaagtgttgggatttcagagggatcatggcccaagttgcaatgtccaccctccccgttgaagatgaggagtcctcggagagcaggatggtggtgacattcctcatgtcagctctcgagtccatgtgtaaagaactggccaagtccaaagccgaagtggcctgcattgcagtgtatgaaacagacgtgtttgtcgtcggaactgaaagaggacgtgcttttgtcaataccagaaaggattttcaaaaagattttgtaaaatattgtgttgaagaagaagaaaaagctgcagagatgcataaaatgaaatctacaacccaggcaaatcggatgagtgtagatgctgtagaaattgaaacactcagaaaaacagttgaggactatttctgcttttgctatgggaaagctttaggcaaatccacagtggtacctgtaccatatgagaagatgctgcgagaccagtcggctgtggtagtgcaggggcttccggaaggtgttgcctttaaacaccccgagaactatgatcttgcaaccctgaaatggattttggagaacaaagcagggatttcattcatcattaagagaccttttttagagccaaagaagcatgtaggtggtcgtgtgatggtaacagatgctgacaggtcaatactatctccaggtggaagttgtggccccatcaaagtgaaaactgaacccacagaagattctggcatttccctggaaatggcagctgtgacagtaaaggaagaatcagaagatcctgattattatcaatataacattcaagcaggcccttctgaaactgatgatgttgatgaaaaacagcccctatcgaagcctttgcaaggaagccaccattcttcagagggcaatgaaggcacagaaatggaagtaccagcagaagattctactcaacatgtcccttcagaaacaagtgaggaccctgaagttgaggtgactattgaagatgatgattattctccaccgtctaagagaccaaaggccaatgagctaccgcagccaccagtcccggaacccgccaatgctgggaagcggaaagtgagggagttcaacttcgagaaatggaatgctcgcatcactgatctacgtaaacaagttgaagaattgtttgaaaggaaatatgctcaagccataaaagccaaaggtccggtgacgatcccgtaccctcttttccagtctcatgttgaagatctttatgtagaaggacttcctgaaggaattccttttagaaggccatctacttacggaattcctcgcctggagaggatattacttgcaaaggaaaggattcgttttgtgattaagaaacatgagcttctgaattcaacacgtgaagatttacagcttgataagccagcttcaggagtaaaggaagaatggtatgccagaatcactaaattaagaaagatggtggatcagcttttctgcaaaaaatttgcggaagccttggggagcactgaagccaaggctgtaccgtaccaaaaatttgaggcacacccgaatgatctgtacgtggaaggactgccagaaaacattcctttccgaagtccctcatggtatggaatcccaaggctggaaaaaatcattcaagtgggcaatcgaattaaatttgttattaaaagaccagaacttctgactcacagtaccactgaagttactcagccaagaacgaatacaccagtcaaagaagattggaatgtcagaattaccaagctacggaagcaagtggaagagatttttaatttgaaatttgctcaagctcttggactcaccgaggcagtaaaagtaccatatcctgtgtttgaatcaaacccggagttcttgaaaggatcgtccgcgggagtaataaaatcaagttcgttgttaaaaaacctgaactagttatttcctacttgcctcctgggatggctagtaaaataaacactaaagctttgcagtcccccaaaagaccacgaagtcctgggagtaattcaaaggttcctgaaattgaggtcaccgtggaaggccctaataacaacaatcctcaaacctcagctgttcgaaccccgacccagactaacggttctaacgttcccttcaagccacgagggagagagttttcctttgaggcctggaatgccaaaatcacggacctaaaacagaaagttgaaaatctcttcaatgagaaatgtggggaagctcttggccttaaacaagctgtgaaggtgccgttcgcgttatttgagtctttcccggaagacttttatgtggaaggcttacctgagggtgtgccattccgaagaccatcgacttttggcattccgaggctggagaagatactcagaaacaaagccaaaattaagttcatcattaaaaagcccgaaatgtttgagacggcgattaaggagagcacctcctctaagagccctcccagaaaaataaattcatcacccaatgttaatactactgcatcaggtgttgaagaccttaacatcattcaggtgacaattccagatgatgataatgaaagactctcgaaagttgaaaaagctagacagctaagagaacaagtgaatgacctctttagtcggaaatttggtgaagctattggtatgggttttcctgtgaaagttccctacaggaaaatcacaattaaccctggctgtgtggtggttgatggcatgcccccgggggtgtccttcaaagcccccagctacctggaaatcagctccatgagaaggatcttagactctgccgagtttatcaaattcacggtcattagaccatttccaggacttgtgattaataaccagctggttgatcagagtgagtcagaaggccccgtgatacaagaatcagctgaaccaagccagttggaagttccagccacagaagaaataaaagagactgatggaagctctcagatcaagcaagaaccagaccccacgtggtagacctcttccctcctaggagccttgagttacggtgtttattttccaatcaagtgaagatatctcctacttctcctactggaacatctcagcttctgcagtgaagaaaaattcctgtgatagttcagttctttagtttttctatttgaaaaaaaaaaatcatttaaatgatcctttgttcacggctctccttaatgactgagtgaacagttcctatctgtatatttgactaaaccttttcctaagctatctctcatggttcctatgtttttttatcataattaaaagcaaaaccatctggatcacctaacagtcagaggtcagtatctcagcgtgtgaattatagaggaaatacagagagaacctcttccacttttacttttcgtccaaataaaatgcatggtgtaccagaagttgaagatcgggttgaggattggggctagctcgatgacactaaggccccaacatcgcgggacctgctgtggcgcggattcttaggaacgctgttctagccggccccctctccaggggtcgccgtggccggcattatttcctagttcttcttgtaaccctgaggtgccagcgcggggagtgaggaggggtcagggggctaaggatgcaacctctgacgttctgcgccttcctaggagagtcttacatgtgttgagatttcacaagcaatgcgagttgtaaaataccagctctacaagaagctaggctctgtgacggcatagttttcagtagctttatcacaatattcacaatggagaattatatgacatggtagcagaaataggcccttttatgtgttgcttctattttacctcaaattgtagatatagggtaatcaataaaatccatccatgcctttcacacactaagt

SEQ ID NO: 5111 - protein, 625 aa, Homo sapiens; identical to SEQ ID NO: 4033

SEQ ID NO: 5112 - DNA, 4060 bp, Homo sapiens
gggtcttgttctgtctcccaagctggagtgcagtggtgtggtcataggtcactgcagcgtcgaactcctaggctcaagtgatcctcttgcctcaggctcctgagtagctgggacaacaggcgtgtaccacacctggatactttttaaatttttggtagagaagggatctcactctattgccaagctggtgtcgaactcttggtcttaagcagccctcccacgtcagcatcccaaagtgttgggatttcagagggatcatggcccaagttgcaatgtccaccctccccgttgaagatgaggagtcctcggagagcaggatggtggtgacattcctcatgtcagctctcgagtccatgtgtaaagaactggccaagtccaaagccgaagtggcctgcattgcagtgtatgaaacagacgtgtttgtcgtcggaactgaaagaggacgtgcttttgtcaataccagaaaggattttcaaaaagattttgtaaaatattgtgttgaagaagaagaaaaagctgcagagatgcataaaatgaaatctacaacccaggcaaatcggatgagtgtagatgctgtagaaattgaaacactcagaaaaacagttgaggactatttctgcttttgctatgggaaagctttaggcaaatccacagtggtacctgtaccatatgagaagatgctgcgagaccagtcggctgtggtagtgcaggggcttccggaaggtgttgcctttaaacaccccgagaactatgatcttgcaaccctgaaatggattttggagaacaaagcagggatttcattcatcattaagagaccttttttagagccaaagaagcatgtaggtggtcgtgtgatggtaacagatgctgacaggtcaatactatctccaggtggaagttgtggccccatcaaagtgaaaactgaacccacagaagattctggcatttccctggaaatggcagctgtgacagtaaaggaagaatcagaagatcctgattattatcaatataacattcaagcaggcccttctgaaactgatgatgttgatgaaaaacagcccctatcgaagcctttgcaaggaagccaccattcttcagagggcaatgaaggcacagaaatggaagtaccagcagaagatgatgattattctccaccgtctaagagaccaaaggccaatgagctaccgcagccaccagtcccggaacccgccaatgctgggaagcggaaagtgagggagttcaacttcgagaaatggaatgctcgcatcactgatctacgtaaacaagttgaagaattgtttgaaaggaaatatgctcaagccataaaagccaaaggtccggtgacgatcccgtaccctcttttccagtctcatgttgaagatctttatgtagaaggacttcctgaaggaattccttttagaaggccatctacttacggaattcctcgcctggagaggatattacttgcaaaggaaaggattcgttttgtgattaagaaacatgagcttctgaattcaacacgtgaagatttacagcttgataagccagcttcaggagtaaaggaagaatggtatgccagaatcactaaattaagaaagatggtggatcagcttttctgcaaaaaatttgcggaagccttggggagcactgaagccaaggctgtaccgtaccaaaaatttgaggcacacccgaatgatctgtacgtggaaggactgccagaaaacattcctttccgaagtccctcatggtatggaatcccaaggctggaaaaaatcattcaagtgggcaatcgaattaaatttgttattaaaagaccagaacttctgactcacagtaccactgaagttactcagccaagaacgaatacaccagtcaaagaagattggaatgtcagaattaccaagctacggaagcaagtggaagagatttttaatttgaaatttgctcaagctcttggactcaccgaggcagtaaaagtaccatatcctgtgtttgaatcaaacccggagttcttgaaaggatcgtccgcgggagtaataaaatcaagttcgttgttaaaaaacctgaactagttatttcctacttgcctcctgggatggctagtaaaataaacactaaagctttgcagtcccccaaaagaccacgaagtcctgggagtaattcaaaggttcctgaaattgaggtcaccgtggaaggccctaataacaacaatcctcaaacctcagctgttcgaaccccgacccagactaacggttctaacgttcccttcaagccacgagggagagagttttcctttgaggcctggaatgccaaaatcacggacctaaaacagaaagttgaaaatctcttcaatgagaaatgtggggaagctcttggccttaaacaagctgtgaaggtgccgttcgcgttatttgagtctttcccggaagacttttatgtggaaggcttacctgagggtgtgccattccgaagaccatcgacttttggcattccgaggctggagaagatactcagaaacaaagccaaaattaagttcatcattaaaaagcccgaaatgtttgagacggcgattaaggagagcacctcctctaagagccctcccagaaaaataaattcatcacccaatgttaatactactgcatcaggtgttgaagaccttaacatcattcaggtgacaattccagatgatgataatgaaagactctcgaaagttgaaaaagctagacagctaagagaacaagtgaatgacctctttagtcggaaatttggtgaagctattggtatgggttttcctgtgaaagttccctacaggaaaatcacaattaaccctggctgtgtggtggttgatggcatgcccccgggggtgtccttcaaagcccccagctacctggaaatcagctccatgagaaggatcttagactctgccgagtttatcaaattcacggtcattagaccatttccaggacttgtgattaataaccagctggttgatcagagtgagtcagaaggccccgtgatacaagaatcagctgaaccaagccagttggaagttccagccacagaagaaataaaagagactgatggaagctctcagatcaagcaagaaccagaccccacgtggtagacctcttccctcctaggcttaaagtatcagtggttgagaagagcttttcggacctgttactaccccaagctgtagccttgagttacggtgtttattttccaatcaagtgaagatatctcctacttctcctactggaacatctcagcttctgcagtgaagaaaaattcctgtgatagttcagttctttagtttttctatttgaaaaaaaaaaatcatttaaatgatcctttgttcacggctctccttaatgactgagtgaacagttcctatctgtatatttgactaaaccttttcctaagctatctctcatggttcctatgtttttttatcataattaaaagcaaaaccatctggatcacctaacagtcagaggtcagtatctcagcgtgtgaattatagaggaaatacagagagaacctcttccacttttacttttcgtccaaataaaatgcatggtgtaccagaagttgaagatcgggttgaggattggggctagctcgatgacactaaggccccaacatcgcgggacctgctgtggcgcggattcttaggaacgctgttctagccggccccctctccaggggtcgccgtggccggcattatttcctagttcttcttgtaaccctgaggtgccagcgcggggagtgaggaggggtcagggggctaaggatgcaacctctgacgttctgcgccttcctaggagagtcttacatgtgttgagatttcacaagcaatgcgagttgtaaaataccagctctacaagaagctaggctctgtgacggcatagttttcagtagctttatcacaatattcacaatggagaattatatgacatggtagcagaaataggcccttttatgtgttgcttctattttacctcaaattgtagatatagggtaatcaataaaatccatccatgcctttcacacactaagt

SEQ ID NO: 5113 - protein, 604 aa, Homo sapiens; identical to SEQ ID NO: 4117

SEQ ID NO: 5114 - DNA, 4108 bp, Homo sapiens
gggtcttgttctgtctcccaagctggagtgcagtggtgtggtcataggtcactgcagcgtcgaactcctaggctcaagtgatcctcttgcctcaggctcctgagtagctgggacaacaggcgtgtaccacacctggatactttttaaatttttggtagagaagggatctcactctattgccaagctggtgtcgaactcttggtcttaagcagccctcccacgtcagcatcccaaagtgttgggatttcagagggatcatggcccaagttgcaatgtccaccctccccgttgaagatgaggagtcctcggagagcaggatggtggtgacattcctcatgtcagctctcgagtccatgtgtaaagaactggccaagtccaaagccgaagtggcctgcattgcagtgtatgaaacagacgtgtttgtcgtcggaactgaaagaggacgtgcttttgtcaataccagaaaggattttcaaaaagattttgtaaaatattgtgttgaagaagaagaaaaagctgcagagatgcataaaatgaaatctacaacccaggcaaatcggatgagtgtagatgctgtagaaattgaaacactcagaaaaacagttgaggactatttctgcttttgctatgggaaagctttaggcaaatccacagtggtacctgtaccatatgagaagatgctgcgagaccagtcggctgtggtagtgcaggggcttccggaaggtgttgcctttaaacaccccgagaactatgatcttgcaaccctgaaatggattttggagaacaaagcagggatttcattcatcattaagagaccttttttagagccaaagaagcatgtaggtggtcgtgtgatggtaacagatgctgacaggtcaatactatctccaggtggaagttgtggccccatcaaagtgaaaactgaacccacagaagattctggaagccaccattcttcagagggcaatgaaggcacagaaatggaagtaccagcagaagattctactcaacatgtcccttcagaaacaagtgaggaccctgaagttgaggtgactattgaagatgatgattattctccaccgtctaagagaccaaaggccaatgagctaccgcagccaccagtcccggaacccgccaatgctgggaagcggaaagtgagggagttcaacttcgagaaatggaatgctcgcatcactgatctacgtaaacaagttgaagaattgtttgaaaggaaatatgctcaagccataaaagccaaaggtccggtgacgatcccgtaccctcttttccagtctcatgttgaagatctttatgtagaaggacttcctgaaggaattccttttagaaggccatctacttacggaattcctcgcctggagaggatattacttgcaaaggaaaggattcgttttgtgattaagaaacatgagcttctgaattcaacacgtgaagatttacagcttgataagccagcttcaggagtaaaggaagaatggtatgccagaatcactaaattaagaaagatggtggatcagcttttctgcaaaaaatttgcggaagccttggggagcactgaagccaaggctgtaccgtaccaaaaatttgaggcacacccgaatgatctgtacgtggaaggactgccagaaaacattcctttccgaagtccctcatggtatggaatcccaaggctggaaaaaatcattcaagtgggcaatcgaattaaatttgttattaaaagaccagaacttctgactcacagtaccactgaagttactcagccaagaacgaatacaccagtcaaagaagattggaatgtcagaattaccaagctacggaagcaagtggaagagatttttaatttgaaatttgcttagatttgttgacagcggtttcctggagtgctgtcttgagaacgattctgaggaggctcagcaagaaagagtgtttcagttgattgggtgtgtctgtcatggagaaggaactcaagctcttggactcaccgaggcagtaaaagtaccatatcctgtgtttgaatcaaacccggagttcttgtatgtggaaggcttgccagaggggattcccttccgaagccctacctggtttggaattccacgacttgaaaggatcgtccgcgggagtaataaaatcaagttcgttgttaaaaaacctgaactagttatttcctacttgcctcctgggatggctagtaaaataaacactaaagctttgcagtcccccaaaagaccacgaagtcctgggagtaattcaaaggttcctgaaattgaggtcaccgtggaaggccctaataacaacaatcctcaaacctcagctgttcgaaccccgacccagactaacggttctaacgttcccttcaagccacgagggagagagttttcctttgaggcctggaatgccaaaatcacggacctaaaacagaaagttgaaaatctcttcaatgagaaatgtggggaagctcttggccttaaacaagctgtgaaggtgccgttcgcgttatttgagtctttcccggaagacttttatgtggaaggcttacctgagggtgtgccattccgaagaccatcgacttttggcattccgaggctggagaagatactcagaaacaaagccaaaattaagttcatcattaaaaagcccgaaatgtttgagacggcgattaaggagagcacctcctctaagagccctcccagaaaaataaattcatcacccaatgttaatactactgcatcaggtgttgaagaccttaacatcattcaggtgacaattccagatgatgataatgaaagactctcgaaagttgaaaaagctagacagctaagagaacaagtgaatgacctctttagtcggaaatttggtgaagctattggtatgggttttcctgtgaaagttccctacaggaaaatcacaattaaccctggctgtgtggtggttgatggcatgcccccgggggtgtccttcaaagcccccagctacctggaaatcagctccatgagaaggatcttagactctgccgagtttatcaaattcacggtcattagaccatttccaggacttgtgattaataaccagctggttgatcagagtgagtcagaaggccccgtgatacaagaatcagctgaaccaagccagttggaagttccagccacagaagaaataaaagagactgatggaagctctcagatcaagcaagaaccagaccccacgtggtagacctcttccctcctaggagccttgagttacggtgtttattttccaatcaagtgaagatatctcctacttctcctactggaacatctcagcttctgcagtgaagaaaaattcctgtgatagttcagttctttagtttttctatttgaaaaaaaaaaatcatttaaatgatcctttgttcacggctctccttaatgactgagtgaacagttcctatctgtatatttgactaaaccttttcctaagctatctctcatggttcctatgtttttttatcataattaaaagcaaaaccatctggatcacctaacagtcagaggtcagtatctcagcgtgtgaattatagaggaaatacagagagaacctcttccacttttacttttcgtccaaataaaatgcatggtgtaccagaagttgaagatcgggttgaggattggggctagctcgatgacactaaggccccaacatcgcgggacctgctgtggcgcggattcttaggaacgctgttctagccggccccctctccaggggtcgccgtggccggcattatttcctagttcttcttgtaaccctgaggtgccagcgcggggagtgaggaggggtcagggggctaaggatgcaacctctgacgttctgcgccttcctaggagagtcttacatgtgttgagatttcacaagcaatgcgagttgtaaaataccagctctacaagaagctaggctctgtgacggcatagttttcagtagctttatcacaatattcacaatggagaattatatgacatggtagcagaaataggcccttttatgtgttgcttctattttacctcaaattgtagatatagggtaatcaataaaatccatccatgcctttcacacactaagt

SEQ ID NO: 5115 - protein, 538 aa, Homo sapiens; identical to SEQ ID NO: 4183

SEQ ID NO: 5116 - DNA, 7041 bp, Homo sapiens
gggtcttgttctgtctcccaagctggagtgcagtggtgtggtcataggtcactgcagcgtcgaactcctaggctcaagtgatcctcttgcctcaggctcctgagtagctgggacaacaggcgtgtaccacacctggatactttttaaatttttggtagagaagggatctcactctattgccaagctggtgtcgaactcttggtcttaagcagccctcccacgtcagcatcccaaagtgttgggatttcagagggatcatggcccaagttgcaatgtccaccctccccgttgaagatgaggagtcctcggagagcaggatggtggtgacattcctcatgtcagctctcgagtccatgtgtaaagaactggccaagtccaaagccgaagtggcctgcattgcagtgtatgaaacagacgtgtttgtcgtcggaactgaaagaggacgtgcttttgtcaataccagaaaggattttcaaaaagattttgtaaaatattgtgttgaagaagaagaaaaagctgcagagatgcataaaatgaaatctacaacccaggcaaatcggatgagtgtagatgctgtagaaattgaaacactcagaaaaacagttgaggactatttctgcttttgctatgggaaagctttaggcaaatccacagtggtacctgtaccatatgagaagatgctgcgagaccagtcggctgtggtagtgcaggggcttccggaaggtgttgcctttaaacaccccgagaactatgatcttgcaaccctgaaatggattttggagaacaaagcagggatttcattcatcattaagagaccttttttagagccaaagaagcatgtaggtggtcgtgtgatggtaacagatgctgacaggtcaatactatctccaggtggaagttgtggccccatcaaagtgaaaactgaacccacagaagattctggaagccaccattcttcagagggcaatgaaggcacagaaatggaagtaccagcagaagattctactcaacatgtcccttcagaaacaagtgaggaccctgaagttgaggtgactattgaagatgatgattattctccaccgtctaagagaccaaaggccaatgagctaccgcagccaccagtcccggaacccgccaatgctgggaagcggaaagtgagggagttcaacttcgagaaatggaatgctcgcatcactgatctacgtaaacaagttgaagaattgtttgaaaggaaatatgctcaagccataaaagccaaaggtccggtgacgatcccgtaccctcttttccagtctcatgttgaagatctttatgtagaaggacttcctgaaggaattccttttagaaggccatctacttacggaattcctcgcctggagaggatattacttgcaaaggaaaggattcgttttgtgattaagaaacatgagcttctgaattcaacacgtgaagatttacagcttgataagccagcttcaggagtaaaggaagaatggtatgccagaatcactaaattaagaaagatggtggatcagcttttctgcaaaaaatttgcggaagccttggggagcactgaagccaaggctgtaccgtaccaaaaatttgaggcacacccgaatgatctgtacgtggaaggactgccagaaaacattcctttccgaagtccctcatggtatggaatcccaaggctggaaaaaatcattcaagtgggcaatcgaattaaatttgttattaaaagaccagaacttctgactcacagtaccactgaagttactcagccaagaacgaatacaccagtcaaagaagattggaatgtcagaattaccaagctacggaagcaagtggaagagatttttaatttgaaatttgctcaagctcttggactcaccgaggcagtaaaagtaccatatcctgtgtttgaatcaaacccggagttcttgtatgtggaaggcttgccagaggggattcccttccgaagccctacctggtttggaattccacgacttgaaaggatcgtccgcgggagtaataaaatcaagttcgttgttaaaaaacctgaactagttatttcctacttgcctcctgggatggctagtaaaataaacactaaagctttgcagtcccccaaaagaccacgaagtcctgggagtaattcaaaggttcctgaaattgaggtcaccgtggaaggccctaataacaacaatcctcaaacctcagctgttcgaaccccgacccagactaacggttctaacgttcccttcaagccacgagggagagagttttcctttgaggcctggaatgccaaaatcacggacctaaaacagaaagttgaaaatctcttcaatgagaaatgtggggaagctcttggccttaaacaagctgtgaaggtgccgttcgcgttatttgagtctttcccggaagacttttatgtggaaggcttacctgagggtgtgccattccgaagaccatcgacttttggcattccgaggctggagaagatactcagaaacaaagccaaaattaagttcatcattaaaaagcccgaaatgtttgagacggcgattaaggagagcacctcctctaagagccctcccagaaaaataaattcatcacccaatgttaatactactgcatcaggtgttgaagaccttaacatcattcaggtgacaattccagatgatgataatgaaagactctcgaaagttgaaaaagctagacagctaagagaacaagtgaatgacctctttagtcggaaatttggtgaagctattggtatgggttttcctgtgaaagttccctacaggaaaatcacaattaaccctggctgtgtggtggttgatggcatgcccccgggggtgtccttcaaagcccccagctacctggaaatcagctccatgagaaggatcttagactctgccgagtttatcaaattcacggtcattaggtaagtgagagtttcctgcttagtcacaggagcgaatctggagctcatgaggctgactcttctaaaatgcagccacaggtagtcatcgaatccggcttcctatgctgtgcaatcaacaaatcaaaataacttgtgtcatcattagaatgtcagatgtgcttctacgaactaagctgactcttttaattctttggcaaagggttggcaaactaggactgtttgccaaattcaggctgcctcctatttttagagtcttcctgaaacacagctacacccgtattatccatggctgctttcctgtcacagtgagtaagtagctgggactgagaaggcatggcctccaaagtctaaaatatttactctctagcactttgtagaaaaaccttagctaggcacagtggctaacgcctgtaatcccagcattttgggaggccaaggcaggcagatcacctgaggtcaggagttccagaccagcctggccaacatggtgaaatcccatctctacaaaaataaaacagttagctgggcatgatggcgggtgcctgtaatcccagctactcgggaggctgaggcaggatagtcgcttgaacccaggaggtggaggttgcaatgagccaagatcatgccactgcactccagcctggacgacagagtgagactccatcacaagaaaaaaagaactttgtcaacctctgtcttagggcgccttgtcacaggcttcgggtcagacggattcaaccttgcatcagccatttgttagccaggtcactctgttctttgtctgtaaatgagattgatcgttgttcccactgagagtgtcagctccttcccgtagagcaggcatgatgattgtactcacctctgacaccattgtgagtgccacattccttcccacgtccttgtcactgtaagagatgcccacctgagcaccaaccccaggttatcttcccctttgtcttccagccccccagaaacagctacgactcaacctacccaatcatttcatcatcagattgccactgtctctagttcaggtctcttgggactggcactcagaaatctcataataaatcctcttgaggcttctcatacactcgtcttcttccaatcttctttccctcaaaatctcatattttggttccacttcacccaccgtcattctccatatcactcccaggagttaggcaaaaagccccttccgttcttccgtatgttaaacttagaatcactctgttccctgctctgcgtttctattttttgtttttcctccatttactagtagcttaacactttctaacagtgttcttattattgatacgtatctatctcttccataagcttataaggtcacggataatacttctcattgtagtacgtaaatgacgtgggctagatatgagttgaataaacagttatacctgtaaattcttacagagtgaaaataaattgttatactttacaatttgtttctctctttagaccatttccaggacttgtgattaataaccgtgagtattttgtgaagtgttttgtttttgttttttcctggggtctgacgtgtgtgcgtgtgagtgtgtatacatgcttaacgtatatcacgttacttcacctatgtcagtaaccaggccaaatacttgttttagccctcagtaaaaacaccaggcacttcctagttgtaaaattattcaagcttcttaacttcctatcctcgatgcacttaatcataaaatggtaataatagcaccgattttgggggagtcgttccagtagatggaaagcatctggaacaggtgtcagcaagctcctgccgacgtgtatgcataaagttttattgaaaccaccatcgtgtccatttgtttatggcagaactgagagatggcagcagcaagtgtgtgcctgcaaaacctaaaatatttactaattggctctgcaagaaaagagtttgcatccccctaacctagaacagtgtctagcctctagtatgtgtttagcctacagtatgtgctcagcgaatacaatctatatttattactgcttttatgactgttataattactgtgcttggatttcgttacaaagtaagtcacaatgtgcctgcttctgttagtatttcagcacagtgcctggcacacatggggctctcaaatattgctgagcgagtgaacaaatgtcctttcaattccttaacgttgatgtcattttcaatagtattttgagccaaacttaattttgcgagtgtgttttgttttcttaactttattattaaaaatgtataaaagtgaggccaggcgtggtggctcacgcctgtaatcccagcagtttgggaggctgaggcaggcggatcagttgaggttgggagttggagaccagcccgtccaacatggtgaaagcctgtctctactaaaaatacaaaaatcagctgggtgtggtggcgcgtgcctgtaatcccagctactcaggaggctgaggcaggagagttgcttgaatcctagaggtggaggttgcagtgagctgagatcgtgccattgcactccagcctgggcaacaagagcaaaactctgtcccaataaataaataaataaaatgttctcttttgttcctgttcttgtgcggtagtgtggtatagagttttatggtaattactgtgaattagtgattctgagggacatatcagaactctgaggtttgtttccttctcatcttgagggaaacagcaaatgtatgttaaaatgcttttccaagggaacaacacatccttacattatttaaaccaatctgcttcattttcagagctggttgatcagagtgagtcagaaggccccgtgatacaagaatcagctgaaccaagccagttggaagttccagccacagaagaaataaaagagactgatggaagctctcagatcaagcaagaaccagaccccacgtggtagacctcttccctcctaggcttaaagtatcagtggttgagaagagcttttcggacctgttactaccccaagctgtgtaatatacttgtataacagaaataccttctatacaaacctttttttctacttttagatagaaatgtctactttttcagcagttctgtgaattaaagagcagagtgactgtgggtctggaatggctggtgtacttgggaatgtactatcaggattttacagcaatgctgggaaatgacagggaaaatgacaggaatgaatctcaccagattttttatgtactcagcagagccttgagttacggtgtttattttccaatcaagtgaagatatctcctacttctcctactggaacatctcagcttctgcagtgaagaaaaattcctgtgatagttcagttctttagtttttctatttgaaaaaaaaaaatcatttaaatgatcctttgttcacggctctccttaatgactgagtgaacagttcctatctgtatatttgactaaaccttttcctaagctatctctcatggttcctatgtttttttatcataattaaaagcaaaaccatctggatcacctaacagtcagaggtcagtatctcagcgtgtgaattatagaggaaatacagagagaacctcttccacttttacttttcgtccaaataaaatgcatggtgtaccagaagttgaagatcgggttgaggattggggctagctcgatgacactaaggccccaacatcgcgggacctgctgtggcgcggattcttaggaacgctgttctagccggccccctctccaggggtcgccgtggccggcattatttcctagttcttcttgtaaccctgaggtgccagcgcggggagtgaggaggggtcagggggctaaggatgcaacctctgacgttctgcgccttcctaggagagtcttacatgtgttgagatttcacaagcaatgcgagttgtaaaataccagctctacaagaagctaggctctgtgacggcatagttttcagtagctttatcacaatattcacaatggagaattatatgacatggtagcagaaataggcccttttatgtgttgcttctattttacctcaaattgtagatatagggtaatcaataaaatccatccatgcctttcacacactaagt

SEQ ID NO: 5117 - protein, 896 aa, Homo sapiens; identical to SEQ ID NO: 4433

SEQ ID NO: 5118 - DNA, 4058 bp, Homo sapiens
gggtcttgttctgtctcccaagctggagtgcagtggtgtggtcataggtcactgcagcgtcgaactcctaggctcaagtgatcctcttgcctcaggctcctgagtagctgggacaacaggcgtgtaccacacctggatactttttaaatttttggtagagaagggatctcactctattgccaagctggtgtcgaactcttggtcttaagcagccctcccacgtcagcatcccaaagtgttgggatttcagagggatcatggcccaagttgcaatgtccaccctccccgttgaagatgaggagtcctcggagagcaggatggtggtgacattcctcatgtcagctctcgagtccatgtgtaaagaactggccaagtccaaagccgaagtggcctgcattgcagtgtatgaaacagacgtgtttgtcgtcggaactgaaagaggacgtgcttttgtcaataccagaaaggattttcaaaaagattttgtaaaatattgtgttgaagaagaagaaaaagctgcagagatgcataaaatgaaatctacaacccaggcaaatcggatgagtgtagatgctgtagaaattgaaacactcagaaaaacagttgaggactatttctgcttttgctatgggaaagctttaggcaaatccacagtggtacctgtaccatatgagaagatgctgcgagaccagtcggctgtggtagtgcaggggcttccggaaggtgttgcctttaaacaccccgagaactatgatcttgcaaccctgaaatggattttggagaacaaagcagggatttcattcatcattaagagaccttttttagagccaaagaagcatgtaggtggtcgtgtgatggtaacagatgctgacaggtcaatactatctccaggtggaagttgtggccccatcaaagtgaaaactgaacccacagaagattctggcatttccctggaaatggcagctgtgacagtaaaggaagaatcagaagatcctgattattatcaatataacattcaaggaagccaccattcttcagagggcaatgaaggcacagaaatggaagtaccagcagaagattctactcaacatgtcccttcagaaacaagtgaggaccctgaagttgaggtgactattgaagatgatgattattctccaccgtctaagagaccaaaggccaatgagctaccgcagccaccagtcccggaacccgccaatgctgggaagcggaaagtgagggagttcaacttcgagaaatggaatgctcgcatcactgatctacgtaaacaagttgaagaattgtttgaaaggaaatatgctcaagccataaaagccaaaggtccggtgacgatcccgtaccctcttttccagtctcatgttgaagatctttatgtagaaggacttcctgaaggaattccttttagaaggccatctacttacggaattcctcgcctggagaggatattacttgcaaaggaaaggattcgttttgtgattaagaaacatgagcttctgaattcaacacgtgaagatttacagcttgataagccagcttcaggagtaaaggaagaatggtatgccagaatcactaaattaagaaagatggtggatcagcttttctgcaaaaaatttgcggaagccttggggagcactgaagccaaggctgtaccgtaccaaaaatttgaggcacacccgaatgatctgtacgtggaaggactgccagaaaacattcctttccgaagtccctcatggtatggaatcccaaggctggaaaaaatcattcaagtgggcaatcgaattaaatttgttattaaaagaccagaacttctgactcacagtaccactgaagttactcagccaagaacgaatacaccagctcaagctcttggactcaccgaggcagtaaaagtaccatatcctgtgtttgaatcaaacccggagttcttgtatgtggaaggcttgccagaggggattcccttccgaagccctacctggtttggaattccacgacttgaaaggatcgtccgcgggagtaataaaatcaagttcgttgttaaaaaacctgaactagttatttcctacttgcctcctgggatggctagtaaaataaacactaaagctttgcagtcccccaaaagaccacgaagtcctgggagtaattcaaaggttcctgaaattgaggtcaccgtggaaggccctaataacaacaatcctcaaacctcagctgttcgaaccccgacccagactaacggttctaacgttcccttcaagccacgagggagagagttttcctttgaggcctggaatgccaaaatcacggacctaaaacagaaagttgaaaatctcttcaatgagaaatgtggggaagctcttggccttaaacaagctgtgaaggtgccgttcgcgttatttgagtctttcccggaagacttttatgtggaaggcttacctgagggtgtgccattccgaagaccatcgacttttggcattccgaggctggagaagatactcagaaacaaagccaaaattaagttcatcattaaaaagcccgaaatgtttgagacggcgattaaggagagcacctcctctaagagccctcccagaaaaataaattcatcacccaatgttaatactactgcatcaggtgttgaagaccttaacatcattcaggtgacaattccagatgatgataatgaaagactctcgaaagttgaaaaagctagacagctaagagaacaagtgaatgacctctttagtcggaaatttggtgaagctattggtatgggttttcctgtgaaagttccctacaggaaaatcacaattaaccctggctgtgtggtggttgatggcatgcccccgggggtgtccttcaaagcccccagctacctggaaatcagctccatgagaaggatcttagactctgccgagtttatcaaattcacggtcattagaccatttccaggacttgtgattaataaccagctggttgatcagagtgagtcagaaggccccgtgatacaagaatcagctgaaccaagccagttggaagttccagccacagaagaaataaaagagactgatggaagctctcagatcaagcaagaaccagaccccacgtggtagacctcttccctcctaggcttaaagtatcagtggttgagaagagcttttcggacctgttactaccccaagctgtagccttgagttacggtgtttattttccaatcaagtgaagatatctcctacttctcctactggaacatctcagcttctgcagtgaagaaaaattcctgtgatagttcagttctttagtttttctatttgaaaaaaaaaaatcatttaaatgatcctttgttcacggctctccttaatgactgagtgaacagttcctatctgtatatttgactaaaccttttcctaagctatctctcatggttcctatgtttttttatcataattaaaagcaaaaccatctggatcacctaacagtcagaggtcagtatctcagcgtgtgaattatagaggaaatacagagagaacctcttccacttttacttttcgtccaaataaaatgcatggtgtaccagaagttgaagatcgggttgaggattggggctagctcgatgacactaaggccccaacatcgcgggacctgctgtggcgcggattcttaggaacgctgttctagccggccccctctccaggggtcgccgtggccggcattatttcctagttcttcttgtaaccctgaggtgccagcgcggggagtgaggaggggtcagggggctaaggatgcaacctctgacgttctgcgccttcctaggagagtcttacatgtgttgagatttcacaagcaatgcgagttgtaaaataccagctctacaagaagctaggctctgtgacggcatagttttcagtagctttatcacaatattcacaatggagaattatatgacatggtagcagaaataggcccttttatgtgttgcttctattttacctcaaattgtagatatagggtaatcaataaaatccatccatgcctttcacacactaagt

SEQ ID NO: 5119 - protein, 954 aa, Homo sapiens; identical to SEQ ID NO: 4155

SEQ ID NO: 5120 - DNA, 7741 bp, Homo sapiens
gggtcttgttctgtctcccaagctggagtgcagtggtgtggtcataggtcactgcagcgtcgaactcctaggctcaagtgatcctcttgcctcaggctcctgagtagctgggacaacaggcgtgtaccacacctggatactttttaaatttttggtagagaagggatctcactctattgccaagctggtgtcgaactcttggtcttaagcagccctcccacgtcagcatcccaaagtgttgggatttcagagggatcatggcccaagttgcaatgtccaccctccccgttgaagatgaggagtcctcggagagcaggatggtggtgacattcctcatgtcagctctcgagtccatgtgtaaagaactggccaagtccaaagccgaagtggcctgcattgcagtgtatgaaacagacgtgtttgtcgtcggaactgaaagaggacgtgcttttgtcaataccagaaaggattttcaaaaagattttgtaaaatattgtgttgaagaagaagaaaaagctgcagagatgcataaaatgaaatctacaacccaggcaaatcggatgagtgtagatgctgtagaaattgaaacactcagaaaaacagttgaggactatttctgcttttgctatgggaaagctttaggcaaatccacagtggtacctgtaccatatgagaagatgctgcgagaccagtcggctgtggtagtgcaggggcttccggaaggtgttgcctttaaacaccccgagaactatgatcttgcaaccctgaaatggattttggagaacaaagcagggatttcattcatcattaagagaccttttttagagccaaagaagcatgtaggtggtcgtgtgatggtaacagatgctgacaggtcaatactatctccaggtggaagttgtggccccatcaaagtgaaaactgaacccacagaagattctggcatttccctggaaatggcagctgtgacagtaaaggaagaatcagaagatcctgattattatcaatataacattcaagcaggcccttctgaaactgatgatgttgatgaaaaacagcccctatcgaagcctttgcaaggaagccaccattcttcagagggcaatgaaggcacagaaatggaagtaccagcagaagatgatgattattctccaccgtctaagagaccaaaggccaatgagctaccgcagccaccagtcccggaacccgccaatgctgggaagcggaaagtgagggagttcaacttcgagaaatggaatgctcgcatcactgatctacgtaaacaagttgaagaattgtttgaaaggaaatatgctcaagccataaaagccaaaggtccggtgacgatcccgtaccctcttttccagtctcatgttgaagatctttatgtagaaggacttcctgaaggaattccttttagaaggccatctacttacggaattcctcgcctggagaggatattacttgcaaaggaaaggattcgttttgtgattaagaaacatgagcttctgaattcaacacgtgaagatttacagcttgataagccagcttcaggagtaaaggaagaatggtatgccagaatcactaaattaagaaagatggtggatcagcttttctgcaaaaaatttgcggaagccttggggagcactgaagccaaggctgtaccgtaccaaaaatttgaggcacacccgaatgatctgtacgtggaaggactgccagaaaacattcctttccgaagtccctcatggtatggaatcccaaggctggaaaaaatcattcaagtgggcaatcgaattaaatttgttattaaaagaccagaacttctgactcacagtaccactgaagttactcagccaagaacgaatacaccagtcaaagaagattggaatgtcagaattaccaagctacggaagcaagtggaagagatttttaatttgaaatttgctcaagctcttggactcaccgaggcagtaaaagtaccatatcctgtgtttgaatcaaacccggagttcttgaaaggatcgtccgcgggagtaataaaatcaagttcgttgttaaaaaacctgaactagttatttcctacttgcctcctgggatggctagtaaaataaacactaaagctttgcagtcccccaaaagaccacgaagtcctgggagtaattcaaaggttcctgaaattgaggtcaccgtggaaggccctaataacaacaatcctcaaacctcagctgttcgaaccccgacccagactaacggttctaacgttcccttcaagccacgagggagagagttttcctttgaggcctggaatgccaaaatcacggacctaaaacagaaagttgaaaatctcttcaatgagaaatgtggggaagctcttggccttaaacaagctgtgaaggtgccgttcgcgttatttgagtctttcccggaagacttttatgtggaaggcttacctgagggtgtgccattccgaagaccatcgacttttggcattccgaggctggagaagatactcagaaacaaagccaaaattaagttcatcattaaaaagcccgaaatgtttgagacggcgattaaggagagcacctcctctaagagccctcccagaaaaataaattcatcacccaatgttaatactactgcatcaggtgttgaagaccttaacatcattcaggtgacaattccagatgatgataatgaaagactctcgaaagttgaaaaagctagacagctaagagaacaagtgaatgacctctttagtcggaaatttggtgaagctattggtatgggttttcctgtgaaagttccctacaggaaaatcacaattaaccctggctgtgtggtggttgatggcatgcccccgggggtgtccttcaaagcccccagctacctggaaatcagctccatgagaaggatcttagactctgccgagtttatcaaattcacggtcattaggtaagtgagagtttcctgcttagtcacaggagcgaatctggagctcatgaggctgactcttctaaaatgcagccacaggtagtcatcgaatccggcttcctatgctgtgcaatcaacaaatcaaaataacttgtgtcatcattagaatgtcagatgtgcttctacgaactaagctgactcttttaattctttggcaaagggttggcaaactaggactgtttgccaaattcaggctgcctcctatttttagagtcttcctgaaacacagctacacccgtattatccatggctgctttcctgtcacagtgagtaagtagctgggactgagaaggcatggcctccaaagtctaaaatatttactctctagcactttgtagaaaaaccttagctaggcacagtggctaacgcctgtaatcccagcattttgggaggccaaggcaggcagatcacctgaggtcaggagttccagaccagcctggccaacatggtgaaatcccatctctacaaaaataaaacagttagctgggcatgatggcgggtgcctgtaatcccagctactcgggaggctgaggcaggatagtcgcttgaacccaggaggtggaggttgcaatgagccaagatcatgccactgcactccagcctggacgacagagtgagactccatcacaagaaaaaaagaactttgtcaacctctgtcttagggcgccttgtcacaggcttcgggtcagacggattcaaccttgcatcagccatttgttagccaggtcactctgttctttgtctgtaaatgagattgatcgttgttcccactgagagtgtcagctccttcccgtagagcaggcatgatgattgtactcacctctgacaccattgtgagtgccacattccttcccacgtccttgtcactgtaagagatgcccacctgagcaccaaccccaggttatcttcccctttgtcttccagccccccagaaacagctacgactcaacctacccaatcatttcatcatcagattgccactgtctctagttcaggtctcttgggactggcactcagaaatctcataataaatcctcttgaggcttctcatacactcgtcttcttccaatcttctttccctcaaaatctcatattttggttccacttcacccaccgtcattctccatatcactcccaggagttaggcaaaaagccccttccgttcttccgtatgttaaacttagaatcactctgttccctgctctgcgtttctattttttgtttttcctccatttactagtagcttaacactttctaacagtgttcttattattgatacgtatctatctcttccataagcttataaggtcacggataatacttctcattgtagtacgtaaatgacgtgggctagatatgagttgaataaacagttatacctgtaaattcttacagagtgaaaataaattgttatactttacaatttgtttctctctttagaccatttccaggacttgtgattaataaccgtgagtattttgtgaagtgttttgtttttgttttttcctggggtctgacgtgtgtgcgtgtgagtgtgtatacatgcttaacgtatatcacgttacttcacctatgtcagtaaccaggccaaatacttgttttagccctcagtaaaaacaccaggcacttcctagttgtaaaattattcaagcttcttaacttcctatcctcgatgcacttaatcataaaatggtaataatagcaccgattttgggggagtcgttccagtagatggaaagcatctggaacaggtgtcagcaagctcctgccgacgtgtatgcataaagttttattgaaaccaccatcgtgtccatttgtttatggcagaactgagagatggcagcagcaagtgtgtgcctgcaaaacctaaaatatttactaattggctctgcaagaaaagagtttgcatccccctaacctagaacagtgtctagcctctagtatgtgtttagcctacagtatgtgctcagcgaatacaatctatatttattactgcttttatgactgttataattactgtgcttggatttcgttacaaagtaagtcacaatgtgcctgcttctgttagtatttcagcacagtgcctggcacacatggggctctcaaatattgctgagcgagtgaacaaatgtcctttcaattccttaacgttgatgtcattttcaatagtattttgagccaaacttaattttgcgagtgtgttttgttttcttaactttattattaaaaatgtataaaagtgaggccaggcgtggtggctcacgcctgtaatcccagcagtttgggaggctgaggcaggcggatcagttgaggttgggagttggagaccagcccgtccaacatggtgaaagcctgtctctactaaaaatacaaaaatcagctgggtgtggtggcgcgtgcctgtaatcccagctactcaggaggctgaggcaggagagttgcttgaatcctagaggtggaggttgcagtgagctgagatcgtgccattgcactccagcctgggcaacaagagcaaaactctgtcccaataaataaataaataaaatgttctcttttgttcctgttcttgtgcggtagtgtggtatagagttttatggtaattactgtgaattagtgattctgagggacatatcagaactctgaggtttgtttccttctcatcttgagggaaacagcaaatgtatgttaaaatgcttttccaagggaacaacacatccttacattatttaaaccaatctgcttcattttcagagctggttgatcagagtgagtcagaaggccccgtgatacaagaatcagctgaaccaagccagttggaagttccagccacagaagaaataaaagagactgatggaagctctcagatcaagcaagaaccagaccccacgtggtagacctcttccctcctagggtaaatcagcttctgtgtcagggatgctgtgtggtgtccatctgaaccccctgcatacgcgtagctaatgtgatctccccactttcacataagatggtggccctgccttcagggaatgtgggagccaggtgggagccttcccggatatttaagctagaagattctacagggagattctccttggatcaatatatgtctctcagtcaaagatgtaaaagcacttttgccttaaaaagaatgttctgtttctaaatagagtcaacgttgtcctcctcattggaattcactatgagtcagaatcattagactgacttttttttttccatagtaatagtattttgcagagtctcacagagctgcagatcttttgttcatcttgcagagttaacaagtctgatcctgttagtccagatttcttaaatttggccaagttataataggagcagtagcttgagacccgaagtcaggaaactttgacaatggatttttttttttaatccagagacttgtactggaatttgccttaccctgtcagctcatggacttaaggtttcatcccgctttatgagtgcttctgaatccaagtcattgttacctgaatttgcaaattaagttgtgatattcgtgactgttaaattcctgtaattagattaacctctttgcttgcttgtttgttttctctcctattttagcttaaagtatcagtggttgagaagagcttttcggacctgttactaccccaagctgtgtaatatacttgtataacagaaataccttctatacaaacctttttttctacttttagatagaaatgtctactttttcagcagttctgtgaattaaagagcagagtgactgtgggtctggaatggctggtgtacttgggaatgtactatcaggattttacagcaatgctgggaaatgacagggaaaatgacaggaatgaatctcaccagattttttatgtactcagcagagccttgagttacggtgtttattttccaatcaagtgaagatatctcctacttctcctactggaacatctcagcttctgcagtgaagaaaaattcctgtgatagttcagttctttagtttttctatttgaaaaaaaaaaatcatttaaatgatcctttgttcacggctctccttaatgactgagtgaacagttcctatctgtatatttgactaaaccttttcctaagctatctctcatggttcctatgtttttttatcataattaaaagcaaaaccatctggatcacctaacagtcagaggtcagtatctcagcgtgtgaattatagaggaaatacagagagaacctcttccacttttacttttcgtccaaataaaatgcatggtgtaccagaagttgaagatcgggttgaggattggggctagctcgatgacactaaggccccaacatcgcgggacctgctgtggcgcggattcttaggaacgctgttctagccggccccctctccaggggtcgccgtggccggcattatttcctagttcttcttgtaaccctgaggtgccagcgcggggagtgaggaggggtcagggggctaaggatgcaacctctgacgttctgcgccttcctaggagagtcttacatgtgttgagatttcacaagcaatgcgagttgtaaaataccagctctacaagaagctaggctctgtgacggcatagttttcagtagctttatcacaatattcacaatggagaattatatgacatggtagcagaaataggcccttttatgtgttgcttctattttacctcaaattgtagatatagggtaatcaataaaatccatccatgcctttcacacactaagt

SEQ ID NO: 5121 - protein, 604 aa, Homo sapiens; identical to SEQ ID NO: 4117

SEQ ID NO: 5122 - DNA, 5099 bp, Homo sapiens
gggtcttgttctgtctcccaagctggagtgcagtggtgtggtcataggtcactgcagcgtcgaactcctaggctcaagtgatcctcttgcctcaggctcctgagtagctgggacaacaggcgtgtaccacacctggatactttttaaatttttggtagagaagggatctcactctattgccaagctggtgtcgaactcttggtcttaagcagccctcccacgtcagcatcccaaagtgttgggatttcagagggatcatggcccaagttgcaatgtccaccctccccgttgaagatgaggagtcctcggagagcaggatggtggtgacattcctcatgtcagctctcgagtccatgtgtaaagaactggccaagtccaaagccgaagtggcctgcattgcagtgtatgaaacagacgtgtttgtcgtcggaactgaaagaggacgtgcttttgtcaataccagaaaggattttcaaaaagattttgtaaaatattgtgttgaagaagaagaaaaagctgcagagatgcataaaatgaaatctacaacccaggcaaatcggatgagtgtagatgctgtagaaattgaaacactcagaaaaacagttgaggactatttctgcttttgctatgggaaagctttaggcaaatccacagtggtacctgtaccatatgagaagatgctgcgagaccagtcggctgtggtagtgcaggggcttccggaaggtgttgcctttaaacaccccgagaactatgatcttgcaaccctgaaatggattttggagaacaaagcagggatttcattcatcattaagagaccttttttagagccaaagaagcatgtaggtggtcgtgtgatggtaacagatgctgacaggtcaatactatctccaggtggaagttgtggccccatcaaagtgaaaactgaacccacagaagattctggcatttccctggaaatggcagctgtgacagtaaaggaagaatcagaagatcctgattattatcaatataacattcaaggaagccaccattcttcagagggcaatgaaggcacagaaatggaagtaccagcagaagatgatgattattctccaccgtctaagagaccaaaggccaatgagctaccgcagccaccagtcccggaacccgccaatgctgggaagcggaaagtgagggagttcaacttcgagaaatggaatgctcgcatcactgatctacgtaaacaagttgaagaattgtttgaaaggaaatatgctcaagccataaaagccaaaggtccggtgacgatcccgtaccctcttttccagtctcatgttgaagatctttatgtagaaggacttcctgaaggaattccttttagaaggccatctacttacggaattcctcgcctggagaggatattacttgcaaaggaaaggattcgttttgtgattaagaaacatgagcttctgaattcaacacgtgaagatttacagcttgataagccagcttcaggagtaaaggaagaatggtatgccagaatcactaaattaagaaagatggtggatcagcttttctgcaaaaaatttgcggaagccttggggagcactgaagccaaggctgtaccgtaccaaaaatttgaggcacacccgaatgatctgtacgtggaaggactgccagaaaacattcctttccgaagtccctcatggtatggaatcccaaggctggaaaaaatcattcaagtgggcaatcgaattaaatttgttattaaaagaccagaacttctgactcacagtaccactgaagttactcagccaagaacgaatacaccagtcaaagaagattggaatgtcagaattaccaagctacggaagcaagtggaagagatttttaatttgaaatttgcttagatttgttgacagcggtttcctggagtgctgtcttgagaacgattctgaggaggctcagcaagaaagagtgtttcagttgattgggtgtgtctgtcatggagaaggaactcaagctcttggactcaccgaggcagtaaaagtaccatatcctgtgtttgaatcaaacccggagttcttgtatgtggaaggcttgccagaggggattcccttccgaagccctacctggtttggaattccacgacttgaaaggatcgtccgcgggagtaataaaatcaagttcgttgttaaaaaacctgaactagttatttcctacttgcctcctgggatggctagtaaaataaacactaaagctttgcagtcccccaaaagaccacgaagtcctgggagtaattcaaaggttcctgaaattgaggtcaccgtggaaggccctaataacaacaatcctcaaacctcagctgttcgaaccccgacccagactaacggttctaacgttcccttcaagccacgagggagagagttttcctttgaggcctggaatgccaaaatcacggacctaaaacagaaagttgaaaatctcttcaatgagaaatgtggggaagctcttggccttaaacaagctgtgaaggtgccgttcgcgttatttgagtctttcccggaagacttttatgtggaaggcttacctgagggtgtgccattccgaagaccatcgacttttggcattccgaggctggagaagatactcagaaacaaagccaaaattaagttcatcattaaaaagcccgaaatgtttgagacggcgattaaggagagcacctcctctaagagccctcccagaaaaataaattcatcacccaatgttaatactactgcatcaggtgttgaagaccttaacatcattcaggtgacaattccagatgatgataatgaaagactctcgaaagttgaaaaagctagacagctaagagaacaagtgaatgacctctttagtcggaaatttggtgaagctattggtatgggttttcctgtgaaagttccctacaggaaaatcacaattaaccctggctgtgtggtggttgatggcatgcccccgggggtgtccttcaaagcccccagctacctggaaatcagctccatgagaaggatcttagactctgccgagtttatcaaattcacggtcattagaccatttccaggacttgtgattaataaccagctggttgatcagagtgagtcagaaggccccgtgatacaagaatcagctgaaccaagccagttggaagttccagccacagaagaaataaaagagactgatggaagctctcagatcaagcaagaaccagaccccacgtggtagacctcttccctcctagggtaaatcagcttctgtgtcagggatgctgtgtggtgtccatctgaaccccctgcatacgcgtagctaatgtgatctccccactttcacataagatggtggccctgccttcagggaatgtgggagccaggtgggagccttcccggatatttaagctagaagattctacagggagattctccttggatcaatatatgtctctcagtcaaagatgtaaaagcacttttgccttaaaaagaatgttctgtttctaaatagagtcaacgttgtcctcctcattggaattcactatgagtcagaatcattagactgacttttttttttccatagtaatagtattttgcagagtctcacagagctgcagatcttttgttcatcttgcagagttaacaagtctgatcctgttagtccagatttcttaaatttggccaagttataataggagcagtagcttgagacccgaagtcaggaaactttgacaatggatttttttttttaatccagagacttgtactggaatttgccttaccctgtcagctcatggacttaaggtttcatcccgctttatgagtgcttctgaatccaagtcattgttacctgaatttgcaaattaagttgtgatattcgtgactgttaaattcctgtaattagattaacctctttgcttgcttgtttgttttctctcctattttagcttaaagtatcagtggttgagaagagcttttcggacctgttactaccccaagctgtgtaatatacttgtataacagaaataccttctatacaaacctttttttctacttttagatagaaatgtctactttttcagcagttctgtgaattaaagagcagagtgactgtgggtctggaatggctggtgtacttgggaatgtactatcaggattttacagcaatgctgggaaatgacagggaaaatgacaggaatgaatctcaccagattttttatgtactcagcagagccttgagttacggtgtttattttccaatcaagtgaagatatctcctacttctcctactggaacatctcagcttctgcagtgaagaaaaattcctgtgatagttcagttctttagtttttctatttgaaaaaaaaaaatcatttaaatgatcctttgttcacggctctccttaatgactgagtgaacagttcctatctgtatatttgactaaaccttttcctaagctatctctcatggttcctatgtttttttatcataattaaaagcaaaaccatctggatcacctaacagtcagaggtcagtatctcagcgtgtgaattatagaggaaatacagagagaacctcttccacttttacttttcgtccaaataaaatgcatggtgtaccagaagttgaagatcgggttgaggattggggctagctcgatgacactaaggccccaacatcgcgggacctgctgtggcgcggattcttaggaacgctgttctagccggccccctctccaggggtcgccgtggccggcattatttcctagttcttcttgtaaccctgaggtgccagcgcggggagtgaggaggggtcagggggctaaggatgcaacctctgacgttctgcgccttcctaggagagtcttacatgtgttgagatttcacaagcaatgcgagttgtaaaataccagctctacaagaagctaggctctgtgacggcatagttttcagtagctttatcacaatattcacaatggagaattatatgacatggtagcagaaataggcccttttatgtgttgcttctattttacctcaaattgtagatatagggtaatcaataaaatccatccatgcctttcacacactaagt

SEQ ID NO: 5123 - protein, 543 aa, Homo sapiens; identical to SEQ ID NO: 4195

SEQ ID NO: 5124 - DNA, 7681 bp, Homo sapiens
gggtcttgttctgtctcccaagctggagtgcagtggtgtggtcataggtcactgcagcgtcgaactcctaggctcaagtgatcctcttgcctcaggctcctgagtagctgggacaacaggcgtgtaccacacctggatactttttaaatttttggtagagaagggatctcactctattgccaagctggtgtcgaactcttggtcttaagcagccctcccacgtcagcatcccaaagtgttgggatttcagagggatcatggcccaagttgcaatgtccaccctccccgttgaagatgaggagtcctcggagagcaggatggtggtgacattcctcatgtcagctctcgagtccatgtgtaaagaactggccaagtccaaagccgaagtggcctgcattgcagtgtatgaaacagacgtgtttgtcgtcggaactgaaagaggacgtgcttttgtcaataccagaaaggattttcaaaaagattttgtaaaatattgtgttgaagaagaagaaaaagctgcagagatgcataaaatgaaatctacaacccaggcaaatcggatgagtgtagatgctgtagaaattgaaacactcagaaaaacagttgaggactatttctgcttttgctatgggaaagctttaggcaaatccacagtggtacctgtaccatatgagaagatgctgcgagaccagtcggctgtggtagtgcaggggcttccggaaggtgttgcctttaaacaccccgagaactatgatcttgcaaccctgaaatggattttggagaacaaagcagggatttcattcatcattaagagaccttttttagagccaaagaagcatgtaggtggtcgtgtgatggtaacagatgctgacaggtcaatactatctccaggtggaagttgtggccccatcaaagtgaaaactgaacccacagaagattctggcatttccctggaaatggcagctgtgacagtaaaggaagaatcagaagatcctgattattatcaatataacattcaaggaagccaccattcttcagagggcaatgaaggcacagaaatggaagtaccagcagaagatgatgattattctccaccgtctaagagaccaaaggccaatgagctaccgcagccaccagtcccggaacccgccaatgctgggaagcggaaagtgagggagttcaacttcgagaaatggaatgctcgcatcactgatctacgtaaacaagttgaagaattgtttgaaaggaaatatgctcaagccataaaagccaaaggtccggtgacgatcccgtaccctcttttccagtctcatgttgaagatctttatgtagaaggacttcctgaaggaattccttttagaaggccatctacttacggaattcctcgcctggagaggatattacttgcaaaggaaaggattcgttttgtgattaagaaacatgagcttctgaattcaacacgtgaagatttacagcttgataagccagcttcaggagtaaaggaagaatggtatgccagaatcactaaattaagaaagatggtggatcagcttttctgcaaaaaatttgcggaagccttggggagcactgaagccaaggctgtaccgtaccaaaaatttgaggcacacccgaatgatctgtacgtggaaggactgccagaaaacattcctttccgaagtccctcatggtatggaatcccaaggctggaaaaaatcattcaagtgggcaatcgaattaaatttgttattaaaagaccagaacttctgactcacagtaccactgaagttactcagccaagaacgaatacaccagtcaaagaagattggaatgtcagaattaccaagctacggaagcaagtggaagagatttttaatttgaaatttgctcaagctcttggactcaccgaggcagtaaaagtaccatatcctgtgtttgaatcaaacccggagttcttgaaaggatcgtccgcgggagtaataaaatcaagttcgttgttaaaaaacctgaactagttatttcctacttgcctcctgggatggctagtaaaataaacactaaagctttgcagtcccccaaaagaccacgaagtcctgggagtaattcaaaggttcctgaaattgaggtcaccgtggaaggccctaataacaacaatcctcaaacctcagctgttcgaaccccgacccagactaacggttctaacgttcccttcaagccacgagggagagagttttcctttgaggcctggaatgccaaaatcacggacctaaaacagaaagttgaaaatctcttcaatgagaaatgtggggaagctcttggccttaaacaagctgtgaaggtgccgttcgcgttatttgagtctttcccggaagacttttatgtggaaggcttacctgagggtgtgccattccgaagaccatcgacttttggcattccgaggctggagaagatactcagaaacaaagccaaaattaagttcatcattaaaaagcccgaaatgtttgagacggcgattaaggagagcacctcctctaagagccctcccagaaaaataaattcatcacccaatgttaatactactgcatcaggtgttgaagaccttaacatcattcaggtgacaattccagatgatgataatgaaagactctcgaaagttgaaaaagctagacagctaagagaacaagtgaatgacctctttagtcggaaatttggtgaagctattggtatgggttttcctgtgaaagttccctacaggaaaatcacaattaaccctggctgtgtggtggttgatggcatgcccccgggggtgtccttcaaagcccccagctacctggaaatcagctccatgagaaggatcttagactctgccgagtttatcaaattcacggtcattaggtaagtgagagtttcctgcttagtcacaggagcgaatctggagctcatgaggctgactcttctaaaatgcagccacaggtagtcatcgaatccggcttcctatgctgtgcaatcaacaaatcaaaataacttgtgtcatcattagaatgtcagatgtgcttctacgaactaagctgactcttttaattctttggcaaagggttggcaaactaggactgtttgccaaattcaggctgcctcctatttttagagtcttcctgaaacacagctacacccgtattatccatggctgctttcctgtcacagtgagtaagtagctgggactgagaaggcatggcctccaaagtctaaaatatttactctctagcactttgtagaaaaaccttagctaggcacagtggctaacgcctgtaatcccagcattttgggaggccaaggcaggcagatcacctgaggtcaggagttccagaccagcctggccaacatggtgaaatcccatctctacaaaaataaaacagttagctgggcatgatggcgggtgcctgtaatcccagctactcgggaggctgaggcaggatagtcgcttgaacccaggaggtggaggttgcaatgagccaagatcatgccactgcactccagcctggacgacagagtgagactccatcacaagaaaaaaagaactttgtcaacctctgtcttagggcgccttgtcacaggcttcgggtcagacggattcaaccttgcatcagccatttgttagccaggtcactctgttctttgtctgtaaatgagattgatcgttgttcccactgagagtgtcagctccttcccgtagagcaggcatgatgattgtactcacctctgacaccattgtgagtgccacattccttcccacgtccttgtcactgtaagagatgcccacctgagcaccaaccccaggttatcttcccctttgtcttccagccccccagaaacagctacgactcaacctacccaatcatttcatcatcagattgccactgtctctagttcaggtctcttgggactggcactcagaaatctcataataaatcctcttgaggcttctcatacactcgtcttcttccaatcttctttccctcaaaatctcatattttggttccacttcacccaccgtcattctccatatcactcccaggagttaggcaaaaagccccttccgttcttccgtatgttaaacttagaatcactctgttccctgctctgcgtttctattttttgtttttcctccatttactagtagcttaacactttctaacagtgttcttattattgatacgtatctatctcttccataagcttataaggtcacggataatacttctcattgtagtacgtaaatgacgtgggctagatatgagttgaataaacagttatacctgtaaattcttacagagtgaaaataaattgttatactttacaatttgtttctctctttagaccatttccaggacttgtgattaataaccgtgagtattttgtgaagtgttttgtttttgttttttcctggggtctgacgtgtgtgcgtgtgagtgtgtatacatgcttaacgtatatcacgttacttcacctatgtcagtaaccaggccaaatacttgttttagccctcagtaaaaacaccaggcacttcctagttgtaaaattattcaagcttcttaacttcctatcctcgatgcacttaatcataaaatggtaataatagcaccgattttgggggagtcgttccagtagatggaaagcatctggaacaggtgtcagcaagctcctgccgacgtgtatgcataaagttttattgaaaccaccatcgtgtccatttgtttatggcagaactgagagatggcagcagcaagtgtgtgcctgcaaaacctaaaatatttactaattggctctgcaagaaaagagtttgcatccccctaacctagaacagtgtctagcctctagtatgtgtttagcctacagtatgtgctcagcgaatacaatctatatttattactgcttttatgactgttataattactgtgcttggatttcgttacaaagtaagtcacaatgtgcctgcttctgttagtatttcagcacagtgcctggcacacatggggctctcaaatattgctgagcgagtgaacaaatgtcctttcaattccttaacgttgatgtcattttcaatagtattttgagccaaacttaattttgcgagtgtgttttgttttcttaactttattattaaaaatgtataaaagtgaggccaggcgtggtggctcacgcctgtaatcccagcagtttgggaggctgaggcaggcggatcagttgaggttgggagttggagaccagcccgtccaacatggtgaaagcctgtctctactaaaaatacaaaaatcagctgggtgtggtggcgcgtgcctgtaatcccagctactcaggaggctgaggcaggagagttgcttgaatcctagaggtggaggttgcagtgagctgagatcgtgccattgcactccagcctgggcaacaagagcaaaactctgtcccaataaataaataaataaaatgttctcttttgttcctgttcttgtgcggtagtgtggtatagagttttatggtaattactgtgaattagtgattctgagggacatatcagaactctgaggtttgtttccttctcatcttgagggaaacagcaaatgtatgttaaaatgcttttccaagggaacaacacatccttacattatttaaaccaatctgcttcattttcagagctggttgatcagagtgagtcagaaggccccgtgatacaagaatcagctgaaccaagccagttggaagttccagccacagaagaaataaaagagactgatggaagctctcagatcaagcaagaaccagaccccacgtggtagacctcttccctcctagggtaaatcagcttctgtgtcagggatgctgtgtggtgtccatctgaaccccctgcatacgcgtagctaatgtgatctccccactttcacataagatggtggccctgccttcagggaatgtgggagccaggtgggagccttcccggatatttaagctagaagattctacagggagattctccttggatcaatatatgtctctcagtcaaagatgtaaaagcacttttgccttaaaaagaatgttctgtttctaaatagagtcaacgttgtcctcctcattggaattcactatgagtcagaatcattagactgacttttttttttccatagtaatagtattttgcagagtctcacagagctgcagatcttttgttcatcttgcagagttaacaagtctgatcctgttagtccagatttcttaaatttggccaagttataataggagcagtagcttgagacccgaagtcaggaaactttgacaatggatttttttttttaatccagagacttgtactggaatttgccttaccctgtcagctcatggacttaaggtttcatcccgctttatgagtgcttctgaatccaagtcattgttacctgaatttgcaaattaagttgtgatattcgtgactgttaaattcctgtaattagattaacctctttgcttgcttgtttgttttctctcctattttagcttaaagtatcagtggttgagaagagcttttcggacctgttactaccccaagctgtgtaatatacttgtataacagaaataccttctatacaaacctttttttctacttttagatagaaatgtctactttttcagcagttctgtgaattaaagagcagagtgactgtgggtctggaatggctggtgtacttgggaatgtactatcaggattttacagcaatgctgggaaatgacagggaaaatgacaggaatgaatctcaccagattttttatgtactcagcagagccttgagttacggtgtttattttccaatcaagtgaagatatctcctacttctcctactggaacatctcagcttctgcagtgaagaaaaattcctgtgatagttcagttctttagtttttctatttgaaaaaaaaaaatcatttaaatgatcctttgttcacggctctccttaatgactgagtgaacagttcctatctgtatatttgactaaaccttttcctaagctatctctcatggttcctatgtttttttatcataattaaaagcaaaaccatctggatcacctaacagtcagaggtcagtatctcagcgtgtgaattatagaggaaatacagagagaacctcttccacttttacttttcgtccaaataaaatgcatggtgtaccagaagttgaagatcgggttgaggattggggctagctcgatgacactaaggccccaacatcgcgggacctgctgtggcgcggattcttaggaacgctgttctagccggccccctctccaggggtcgccgtggccggcattatttcctagttcttcttgtaaccctgaggtgccagcgcggggagtgaggaggggtcagggggctaaggatgcaacctctgacgttctgcgccttcctaggagagtcttacatgtgttgagatttcacaagcaatgcgagttgtaaaataccagctctacaagaagctaggctctgtgacggcatagttttcagtagctttatcacaatattcacaatggagaattatatgacatggtagcagaaataggcccttttatgtgttgcttctattttacctcaaattgtagatatagggtaatcaataaaatccatccatgcctttcacacactaagt

SEQ ID NO: 5125 - protein, 584 aa, Homo sapiens; identical to SEQ ID NO: 4173

SEQ ID NO: 5126 - DNA, 4179 bp, Homo sapiens
gggtcttgttctgtctcccaagctggagtgcagtggtgtggtcataggtcactgcagcgtcgaactcctaggctcaagtgatcctcttgcctcaggctcctgagtagctgggacaacaggcgtgtaccacacctggatactttttaaatttttggtagagaagggatctcactctattgccaagctggtgtcgaactcttggtcttaagcagccctcccacgtcagcatcccaaagtgttgggatttcagagggatcatggcccaagttgcaatgtccaccctccccgttgaagatgaggagtcctcggagagcaggatggtggtgacattcctcatgtcagctctcgagtccatgtgtaaagaactggccaagtccaaagccgaagtggcctgcattgcagtgtatgaaacagacgtgtttgtcgtcggaactgaaagaggacgtgcttttgtcaataccagaaaggattttcaaaaagattttgtaaaatattgtgttgaagaagaagaaaaagctgcagagatgcataaaatgaaatctacaacccaggcaaatcggatgagtgtagatgctgtagaaattgaaacactcagaaaaacagttgaggactatttctgcttttgctatgggaaagctttaggcaaatccacagtggtacctgtaccatatgagaagatgctgcgagaccagtcggctgtggtagtgcaggggcttccggaaggtgttgcctttaaacaccccgagaactatgatcttgcaaccctgaaatggattttggagaacaaagcagggatttcattcatcattaagagaccttttttagagccaaagaagcatgtaggtggtcgtgtgatggtaacagatgctgacaggtcaatactatctccaggtggaagttgtggccccatcaaagtgaaaactgaacccacagaagattctggcatttccctggaaatggcagctgtgacagtaaaggaagaatcagaagatcctgattattatcaatataacattcaaggaagccaccattcttcagagggcaatgaaggcacagaaatggaagtaccagcagaagatgatgattattctccaccgtctaagagaccaaaggccaatgagctaccgcagccaccagtcccggaacccgccaatgctgggaagcggaaagtgagggagttcaacttcgagaaatggaatgctcgcatcactgatctacgtaaacaagttgaagaattgtttgaaaggaaatatgctcaagccataaaagccaaaggtccggtgacgatcccgtaccctcttttccagtctcatgttgaagatctttatgtagaaggacttcctgaaggaattccttttagaaggccatctacttacggaattcctcgcctggagaggatattacttgcaaaggaaaggattcgttttgtgattaagaaacatgagcttctgaattcaacacgtgaagatttacagcttgataagccagcttcaggagtaaaggaagaatggtatgccagaatcactaaattaagaaagatggtggatcagcttttctgcaaaaaatttgcggaagccttggggagcactgaagccaaggctgtaccgtaccaaaaatttgaggcacacccgaatgatctgtacgtggaaggactgccagaaaacattcctttccgaagtccctcatggtatggaatcccaaggctggaaaaaatcattcaagtgggcaatcgaattaaatttgttattaaaagaccagaacttctgactcacagtaccactgaagttactcagccaagaacgaatacaccagtcaaagaagattggaatgtcagaattaccaagctacggaagcaagtggaagagatttttaatttgaaatttgcttagatttgttgacagcggtttcctggagtgctgtcttgagaacgattctgaggaggctcagcaagaaagagtgtttcagttgattgggtgtgtctgtcatggagaaggaactcaagctcttggactcaccgaggcagtaaaagtaccatatcctgtgtttgaatcaaacccggagttcttgtatgtggaaggcttgccagaggggattcccttccgaagccctacctggtttggaattccacgacttgaaaggatcgtccgcgggagtaataaaatcaagttcgttgttaaaaaacctgaactagttatttcctacttgcctcctgggatggctagtaaaataaacactaaagctttgcagtcccccaaaagaccacgaagtcctgggagtaattcaaaggttcctgaaattgaggtcaccgtggaaggccctaataacaacaatcctcaaacctcagctgttcgaaccccgacccagactaacggttctaacgttcccttcaagccacgagggagagagttttcctttgaggcctggaatgccaaaatcacggacctaaaacagaaagttgaaaatctcttcaatgagaaatgtggggaagctcttggccttaaacaagctgtgaaggtgccgttcgcgttatttgagtctttcccggaagacttttatgtggaaggcttacctgagggtgtgccattccgaagaccatcgacttttggcattccgaggctggagaagatactcagaaacaaagccaaaattaagttcatcattaaaaagcccgaaatgtttgagacggcgattaaggagagcacctcctctaagagccctcccagaaaaataaattcatcacccaatgttaatactactgcatcaggtgttgaagaccttaacatcattcaggtgacaattccagatgatgataatgaaagactctcgaaagttgaaaaagctagacagctaagagaacaagtgaatgacctctttagtcggaaatttggtgaagctattggtatgggttttcctgtgaaagttccctacaggaaaatcacaattaaccctggctgtgtggtggttgatggcatgcccccgggggtgtccttcaaagcccccagctacctggaaatcagctccatgagaaggatcttagactctgccgagtttatcaaattcacggtcattagaccatttccaggacttgtgattaataaccagctggttgatcagagtgagtcagaaggccccgtgatacaagaatcagctgaaccaagccagttggaagttccagccacagaagaaataaaagagactgatggaagctctcagatcaagcaagaaccagaccccacgtggtagacctcttccctcctaggcttaaagtatcagtggttgagaagagcttttcggacctgttactaccccaagctgtagccttgagttacggtgtttattttccaatcaagtgaagatatctcctacttctcctactggaacatctcagcttctgcagtgaagaaaaattcctgtgatagttcagttctttagtttttctatttgaaaaaaaaaaatcatttaaatgatcctttgttcacggctctccttaatgactgagtgaacagttcctatctgtatatttgactaaaccttttcctaagctatctctcatggttcctatgtttttttatcataattaaaagcaaaaccatctggatcacctaacagtcagaggtcagtatctcagcgtgtgaattatagaggaaatacagagagaacctcttccacttttacttttcgtccaaataaaatgcatggtgtaccagaagttgaagatcgggttgaggattggggctagctcgatgacactaaggccccaacatcgcgggacctgctgtggcgcggattcttaggaacgctgttctagccggccccctctccaggggtcgccgtggccggcattatttcctagttcttcttgtaaccctgaggtgccagcgcggggagtgaggaggggtcagggggctaaggatgcaacctctgacgttctgcgccttcctaggagagtcttacatgtgttgagatttcacaagcaatgcgagttgtaaaataccagctctacaagaagctaggctctgtgacggcatagttttcagtagctttatcacaatattcacaatggagaattatatgacatggtagcagaaataggcccttttatgtgttgcttctattttacctcaaattgtagatatagggtaatcaataaaatccatccatgcctttcacacactaagt

SEQ ID NO: 5127 - protein, 543 aa, Homo sapiens; identical to SEQ ID NO: 4195

SEQ ID NO: 5128 - DNA, 4074 bp, Homo sapiens
gggtcttgttctgtctcccaagctggagtgcagtggtgtggtcataggtcactgcagcgtcgaactcctaggctcaagtgatcctcttgcctcaggctcctgagtagctgggacaacaggcgtgtaccacacctggatactttttaaatttttggtagagaagggatctcactctattgccaagctggtgtcgaactcttggtcttaagcagccctcccacgtcagcatcccaaagtgttgggatttcagagggatcatggcccaagttgcaatgtccaccctccccgttgaagatgaggagtcctcggagagcaggatggtggtgacattcctcatgtcagctctcgagtccatgtgtaaagaactggccaagtccaaagccgaagtggcctgcattgcagtgtatgaaacagacgtgtttgtcgtcggaactgaaagaggacgtgcttttgtcaataccagaaaggattttcaaaaagattttgtaaaatattgtgttgaagaagaagaaaaagctgcagagatgcataaaatgaaatctacaacccaggcaaatcggatgagtgtagatgctgtagaaattgaaacactcagaaaaacagttgaggactatttctgcttttgctatgggaaagctttaggcaaatccacagtggtacctgtaccatatgagaagatgctgcgagaccagtcggctgtggtagtgcaggggcttccggaaggtgttgcctttaaacaccccgagaactatgatcttgcaaccctgaaatggattttggagaacaaagcagggatttcattcatcattaagagaccttttttagagccaaagaagcatgtaggtggtcgtgtgatggtaacagatgctgacaggtcaatactatctccaggtggaagttgtggccccatcaaagtgaaaactgaacccacagaagattctggcatttccctggaaatggcagctgtgacagtaaaggaagaatcagaagatcctgattattatcaatataacattcaaggaagccaccattcttcagagggcaatgaaggcacagaaatggaagtaccagcagaagattctactcaacatgtcccttcagaaacaagtgaggaccctgaagttgaggtgactattgaagatgatgattattctccaccgtctaagagaccaaaggccaatgagctaccgcagccaccagtcccggaacccgccaatgctgggaagcggaaagtgagggagttcaacttcgagaaatggaatgctcgcatcactgatctacgtaaacaagttgaagaattgtttgaaaggaaatatgctcaagccataaaagccaaaggtccggtgacgatcccgtaccctcttttccagtctcatgttgaagatctttatgtagaaggacttcctgaaggaattccttttagaaggccatctacttacggaattcctcgcctggagaggatattacttgcaaaggaaaggattcgttttgtgattaagaaacatgagcttctgaattcaacacgtgaagatttacagcttgataagccagcttcaggagtaaaggaagaatggtatgccagaatcactaaattaagaaagatggtggatcagcttttctgcaaaaaatttgcggaagccttggggagcactgaagccaaggctgtaccgtaccaaaaatttgaggcacacccgaatgatctgtacgtggaaggactgccagaaaacattcctttccgaagtccctcatggtatggaatcccaaggctggaaaaaatcattcaagtgggcaatcgaattaaatttgttattaaaagaccagaacttctgactcacagtaccactgaagttactcagccaagaacgaatacaccagtcaaagaagattggaatgtcagaattaccaagctacggaagcaagtggaagagatttttaatttgaaatttgctcaagctcttggactcaccgaggcagtaaaagtaccatatcctgtgtttgaatcaaacccggagttcttgtatgtggaaggcttgccagaggggattcccttccgaagccctacctggtttggaattccacgacttgaaaggatcgtccgcgggagtaataaaatcaagttcgttgttaaaaaacctgaactagttatttcctacttgcctcctgggatggctagtaaaataaacactaaagctttgcagtcccccaaaagaccacgaagtcctgggagtaattcaaaggttcctgaaattgaggtcaccgtggaaggccctaataacaacaatcctcaaacctcagctgttcgaaccccgacccagactaacggttctaacgttcccttcaagccacgagggagagagttttcctttgaggcctggaatgccaaaatcacggacctaaaacagaaagttgaaaatctcttcaatgagaaatgtggggaagctcttggccttaaacaagctgtgaaggtgccgttcgcgttatttgagtctttcccggaagacttttatgtggaaggcttacctgagggtgtgccattccgaagaccatcgacttttggcattccgaggctggagaagatactcagaaacaaagccaaaattaagttcatcattaaaaagcccgaaatgtttgagacggcgattaaggagagcacctcctctaagagccctcccagaaaaataaattcatcacccaatgttaatactactgcatcaggtgttgaagaccttaacatcattcaggtgacaattccagatgatgataatgaaagactctcgaaagttgaaaaagctagacagctaagagaacaagtgaatgacctctttagtcggaaatttggtgaagctattggtatgggttttcctgtgaaagttccctacaggaaaatcacaattaaccctggctgtgtggtggttgatggcatgcccccgggggtgtccttcaaagcccccagctacctggaaatcagctccatgagaaggatcttagactctgccgagtttatcaaattcacggtcattagaccatttccaggacttgtgattaataaccagctggttgatcagagtgagtcagaaggccccgtgatacaagaatcagctgaaccaagccagttggaagttccagccacagaagaaataaaagagactgatggaagctctcagatcaagcaagaaccagaccccacgtggtagacctcttccctcctaggagccttgagttacggtgtttattttccaatcaagtgaagatatctcctacttctcctactggaacatctcagcttctgcagtgaagaaaaattcctgtgatagttcagttctttagtttttctatttgaaaaaaaaaaatcatttaaatgatcctttgttcacggctctccttaatgactgagtgaacagttcctatctgtatatttgactaaaccttttcctaagctatctctcatggttcctatgtttttttatcataattaaaagcaaaaccatctggatcacctaacagtcagaggtcagtatctcagcgtgtgaattatagaggaaatacagagagaacctcttccacttttacttttcgtccaaataaaatgcatggtgtaccagaagttgaagatcgggttgaggattggggctagctcgatgacactaaggccccaacatcgcgggacctgctgtggcgcggattcttaggaacgctgttctagccggccccctctccaggggtcgccgtggccggcattatttcctagttcttcttgtaaccctgaggtgccagcgcggggagtgaggaggggtcagggggctaaggatgcaacctctgacgttctgcgccttcctaggagagtcttacatgtgttgagatttcacaagcaatgcgagttgtaaaataccagctctacaagaagctaggctctgtgacggcatagttttcagtagctttatcacaatattcacaatggagaattatatgacatggtagcagaaataggcccttttatgtgttgcttctattttacctcaaattgtagatatagggtaatcaataaaatccatccatgcctttcacacactaagt

SEQ ID NO: 5129 - protein, 978 aa, Homo sapiens; identical to SEQ ID NO: 470

SEQ ID NO: 5130 - DNA, 6989 bp, Homo sapiens
gggtcttgttctgtctcccaagctggagtgcagtggtgtggtcataggtcactgcagcgtcgaactcctaggctcaagtgatcctcttgcctcaggctcctgagtagctgggacaacaggcgtgtaccacacctggatactttttaaatttttggtagagaagggatctcactctattgccaagctggtgtcgaactcttggtcttaagcagccctcccacgtcagcatcccaaagtgttgggatttcagagggatcatggcccaagttgcaatgtccaccctccccgttgaagatgaggagtcctcggagagcaggatggtggtgacattcctcatgtcagctctcgagtccatgtgtaaagaactggccaagtccaaagccgaagtggcctgcattgcagtgtatgaaacagacgtgtttgtcgtcggaactgaaagaggacgtgcttttgtcaataccagaaaggattttcaaaaagattttgtaaaatattgtgttgaagaagaagaaaaagctgcagagatgcataaaatgaaatctacaacccaggcaaatcggatgagtgtagatgctgtagaaattgaaacactcagaaaaacagttgaggactatttctgcttttgctatgggaaagctttaggcaaatccacagtggtacctgtaccatatgagaagatgctgcgagaccagtcggctgtggtagtgcaggggcttccggaaggtgttgcctttaaacaccccgagaactatgatcttgcaaccctgaaatggattttggagaacaaagcagggatttcattcatcattaagagaccttttttagagccaaagaagcatgtaggtggtcgtgtgatggtaacagatgctgacaggtcaatactatctccaggtggaagttgtggccccatcaaagtgaaaactgaacccacagaagattctggcatttccctggaaatggcagctgtgacagtaaaggaagaatcagaagatcctgattattatcaatataacattcaaggaagccaccattcttcagagggcaatgaaggcacagaaatggaagtaccagcagaagatgatgattattctccaccgtctaagagaccaaaggccaatgagctaccgcagccaccagtcccggaacccgccaatgctgggaagcggaaagtgagggagttcaacttcgagaaatggaatgctcgcatcactgatctacgtaaacaagttgaagaattgtttgaaaggaaatatgctcaagccataaaagccaaaggtccggtgacgatcccgtaccctcttttccagtctcatgttgaagatctttatgtagaaggacttcctgaaggaattccttttagaaggccatctacttacggaattcctcgcctggagaggatattacttgcaaaggaaaggattcgttttgtgattaagaaacatgagcttctgaattcaacacgtgaagatttacagcttgataagccagcttcaggagtaaaggaagaatggtatgccagaatcactaaattaagaaagatggtggatcagcttttctgcaaaaaatttgcggaagccttggggagcactgaagccaaggctgtaccgtaccaaaaatttgaggcacacccgaatgatctgtacgtggaaggactgccagaaaacattcctttccgaagtccctcatggtatggaatcccaaggctggaaaaaatcattcaagtgggcaatcgaattaaatttgttattaaaagaccagaacttctgactcacagtaccactgaagttactcagccaagaacgaatacaccagtcaaagaagattggaatgtcagaattaccaagctacggaagcaagtggaagagatttttaatttgaaatttgctcaagctcttggactcaccgaggcagtaaaagtaccatatcctgtgtttgaatcaaacccggagttcttgaaaggatcgtccgcgggagtaataaaatcaagttcgttgttaaaaaacctgaactagttatttcctacttgcctcctgggatggctagtaaaataaacactaaagctttgcagtcccccaaaagaccacgaagtcctgggagtaattcaaaggttcctgaaattgaggtcaccgtggaaggccctaataacaacaatcctcaaacctcagctgttcgaaccccgacccagactaacggttctaacgttcccttcaagccacgagggagagagttttcctttgaggcctggaatgccaaaatcacggacctaaaacagaaagttgaaaatctcttcaatgagaaatgtggggaagctcttggccttaaacaagctgtgaaggtgccgttcgcgttatttgagtctttcccggaagacttttatgtggaaggcttacctgagggtgtgccattccgaagaccatcgacttttggcattccgaggctggagaagatactcagaaacaaagccaaaattaagttcatcattaaaaagcccgaaatgtttgagacggcgattaaggagagcacctcctctaagagccctcccagaaaaataaattcatcacccaatgttaatactactgcatcaggtgttgaagaccttaacatcattcaggtgacaattccagatgatgataatgaaagactctcgaaagttgaaaaagctagacagctaagagaacaagtgaatgacctctttagtcggaaatttggtgaagctattggtatgggttttcctgtgaaagttccctacaggaaaatcacaattaaccctggctgtgtggtggttgatggcatgcccccgggggtgtccttcaaagcccccagctacctggaaatcagctccatgagaaggatcttagactctgccgagtttatcaaattcacggtcattaggtaagtgagagtttcctgcttagtcacaggagcgaatctggagctcatgaggctgactcttctaaaatgcagccacaggtagtcatcgaatccggcttcctatgctgtgcaatcaacaaatcaaaataacttgtgtcatcattagaatgtcagatgtgcttctacgaactaagctgactcttttaattctttggcaaagggttggcaaactaggactgtttgccaaattcaggctgcctcctatttttagagtcttcctgaaacacagctacacccgtattatccatggctgctttcctgtcacagtgagtaagtagctgggactgagaaggcatggcctccaaagtctaaaatatttactctctagcactttgtagaaaaaccttagctaggcacagtggctaacgcctgtaatcccagcattttgggaggccaaggcaggcagatcacctgaggtcaggagttccagaccagcctggccaacatggtgaaatcccatctctacaaaaataaaacagttagctgggcatgatggcgggtgcctgtaatcccagctactcgggaggctgaggcaggatagtcgcttgaacccaggaggtggaggttgcaatgagccaagatcatgccactgcactccagcctggacgacagagtgagactccatcacaagaaaaaaagaactttgtcaacctctgtcttagggcgccttgtcacaggcttcgggtcagacggattcaaccttgcatcagccatttgttagccaggtcactctgttctttgtctgtaaatgagattgatcgttgttcccactgagagtgtcagctccttcccgtagagcaggcatgatgattgtactcacctctgacaccattgtgagtgccacattccttcccacgtccttgtcactgtaagagatgcccacctgagcaccaaccccaggttatcttcccctttgtcttccagccccccagaaacagctacgactcaacctacccaatcatttcatcatcagattgccactgtctctagttcaggtctcttgggactggcactcagaaatctcataataaatcctcttgaggcttctcatacactcgtcttcttccaatcttctttccctcaaaatctcatattttggttccacttcacccaccgtcattctccatatcactcccaggagttaggcaaaaagccccttccgttcttccgtatgttaaacttagaatcactctgttccctgctctgcgtttctattttttgtttttcctccatttactagtagcttaacactttctaacagtgttcttattattgatacgtatctatctcttccataagcttataaggtcacggataatacttctcattgtagtacgtaaatgacgtgggctagatatgagttgaataaacagttatacctgtaaattcttacagagtgaaaataaattgttatactttacaatttgtttctctctttagaccatttccaggacttgtgattaataaccgtgagtattttgtgaagtgttttgtttttgttttttcctggggtctgacgtgtgtgcgtgtgagtgtgtatacatgcttaacgtatatcacgttacttcacctatgtcagtaaccaggccaaatacttgttttagccctcagtaaaaacaccaggcacttcctagttgtaaaattattcaagcttcttaacttcctatcctcgatgcacttaatcataaaatggtaataatagcaccgattttgggggagtcgttccagtagatggaaagcatctggaacaggtgtcagcaagctcctgccgacgtgtatgcataaagttttattgaaaccaccatcgtgtccatttgtttatggcagaactgagagatggcagcagcaagtgtgtgcctgcaaaacctaaaatatttactaattggctctgcaagaaaagagtttgcatccccctaacctagaacagtgtctagcctctagtatgtgtttagcctacagtatgtgctcagcgaatacaatctatatttattactgcttttatgactgttataattactgtgcttggatttcgttacaaagtaagtcacaatgtgcctgcttctgttagtatttcagcacagtgcctggcacacatggggctctcaaatattgctgagcgagtgaacaaatgtcctttcaattccttaacgttgatgtcattttcaatagtattttgagccaaacttaattttgcgagtgtgttttgttttcttaactttattattaaaaatgtataaaagtgaggccaggcgtggtggctcacgcctgtaatcccagcagtttgggaggctgaggcaggcggatcagttgaggttgggagttggagaccagcccgtccaacatggtgaaagcctgtctctactaaaaatacaaaaatcagctgggtgtggtggcgcgtgcctgtaatcccagctactcaggaggctgaggcaggagagttgcttgaatcctagaggtggaggttgcagtgagctgagatcgtgccattgcactccagcctgggcaacaagagcaaaactctgtcccaataaataaataaataaaatgttctcttttgttcctgttcttgtgcggtagtgtggtatagagttttatggtaattactgtgaattagtgattctgagggacatatcagaactctgaggtttgtttccttctcatcttgagggaaacagcaaatgtatgttaaaatgcttttccaagggaacaacacatccttacattatttaaaccaatctgcttcattttcagagctggttgatcagagtgagtcagaaggccccgtgatacaagaatcagctgaaccaagccagttggaagttccagccacagaagaaataaaagagactgatggaagctctcagatcaagcaagaaccagaccccacgtggtagacctcttccctcctaggcttaaagtatcagtggttgagaagagcttttcggacctgttactaccccaagctgtgtaatatacttgtataacagaaataccttctatacaaacctttttttctacttttagatagaaatgtctactttttcagcagttctgtgaattaaagagcagagtgactgtgggtctggaatggctggtgtacttgggaatgtactatcaggattttacagcaatgctgggaaatgacagggaaaatgacaggaatgaatctcaccagattttttatgtactcagcagagccttgagttacggtgtttattttccaatcaagtgaagatatctcctacttctcctactggaacatctcagcttctgcagtgaagaaaaattcctgtgatagttcagttctttagtttttctatttgaaaaaaaaaaatcatttaaatgatcctttgttcacggctctccttaatgactgagtgaacagttcctatctgtatatttgactaaaccttttcctaagctatctctcatggttcctatgtttttttatcataattaaaagcaaaaccatctggatcacctaacagtcagaggtcagtatctcagcgtgtgaattatagaggaaatacagagagaacctcttccacttttacttttcgtccaaataaaatgcatggtgtaccagaagttgaagatcgggttgaggattggggctagctcgatgacactaaggccccaacatcgcgggacctgctgtggcgcggattcttaggaacgctgttctagccggccccctctccaggggtcgccgtggccggcattatttcctagttcttcttgtaaccctgaggtgccagcgcggggagtgaggaggggtcagggggctaaggatgcaacctctgacgttctgcgccttcctaggagagtcttacatgtgttgagatttcacaagcaatgcgagttgtaaaataccagctctacaagaagctaggctctgtgacggcatagttttcagtagctttatcacaatattcacaatggagaattatatgacatggtagcagaaataggcccttttatgtgttgcttctattttacctcaaattgtagatatagggtaatcaataaaatccatccatgcctttcacacactaagt

SEQ ID NO: 5131 - protein, 584 aa, Homo sapiens; identical to SEQ ID NO: 4173

SEQ ID NO: 5132 - DNA, 5222 bp, Homo sapiens
gggtcttgttctgtctcccaagctggagtgcagtggtgtggtcataggtcactgcagcgtcgaactcctaggctcaagtgatcctcttgcctcaggctcctgagtagctgggacaacaggcgtgtaccacacctggatactttttaaatttttggtagagaagggatctcactctattgccaagctggtgtcgaactcttggtcttaagcagccctcccacgtcagcatcccaaagtgttgggatttcagagggatcatggcccaagttgcaatgtccaccctccccgttgaagatgaggagtcctcggagagcaggatggtggtgacattcctcatgtcagctctcgagtccatgtgtaaagaactggccaagtccaaagccgaagtggcctgcattgcagtgtatgaaacagacgtgtttgtcgtcggaactgaaagaggacgtgcttttgtcaataccagaaaggattttcaaaaagattttgtaaaatattgtgttgaagaagaagaaaaagctgcagagatgcataaaatgaaatctacaacccaggcaaatcggatgagtgtagatgctgtagaaattgaaacactcagaaaaacagttgaggactatttctgcttttgctatgggaaagctttaggcaaatccacagtggtacctgtaccatatgagaagatgctgcgagaccagtcggctgtggtagtgcaggggcttccggaaggtgttgcctttaaacaccccgagaactatgatcttgcaaccctgaaatggattttggagaacaaagcagggatttcattcatcattaagagaccttttttagagccaaagaagcatgtaggtggtcgtgtgatggtaacagatgctgacaggtcaatactatctccaggtggaagttgtggccccatcaaagtgaaaactgaacccacagaagattctggcatttccctggaaatggcagctgtgacagtaaaggaagaatcagaagatcctgattattatcaatataacattcaagcaggcccttctgaaactgatgatgttgatgaaaaacagcccctatcgaagcctttgcaaggaagccaccattcttcagagggcaatgaaggcacagaaatggaagtaccagcagaagattctactcaacatgtcccttcagaaacaagtgaggaccctgaagttgaggtgactattgaagatgatgattattctccaccgtctaagagaccaaaggccaatgagctaccgcagccaccagtcccggaacccgccaatgctgggaagcggaaagtgagggagttcaacttcgagaaatggaatgctcgcatcactgatctacgtaaacaagttgaagaattgtttgaaaggaaatatgctcaagccataaaagccaaaggtccggtgacgatcccgtaccctcttttccagtctcatgttgaagatctttatgtagaaggacttcctgaaggaattccttttagaaggccatctacttacggaattcctcgcctggagaggatattacttgcaaaggaaaggattcgttttgtgattaagaaacatgagcttctgaattcaacacgtgaagatttacagcttgataagccagcttcaggagtaaaggaagaatggtatgccagaatcactaaattaagaaagatggtggatcagcttttctgcaaaaaatttgcggaagccttggggagcactgaagccaaggctgtaccgtaccaaaaatttgaggcacacccgaatgatctgtacgtggaaggactgccagaaaacattcctttccgaagtccctcatggtatggaatcccaaggctggaaaaaatcattcaagtgggcaatcgaattaaatttgttattaaaagaccagaacttctgactcacagtaccactgaagttactcagccaagaacgaatacaccagtcaaagaagattggaatgtcagaattaccaagctacggaagcaagtggaagagatttttaatttgaaatttgcttagatttgttgacagcggtttcctggagtgctgtcttgagaacgattctgaggaggctcagcaagaaagagtgtttcagttgattgggtgtgtctgtcatggagaaggaactcaagctcttggactcaccgaggcagtaaaagtaccatatcctgtgtttgaatcaaacccggagttcttgtatgtggaaggcttgccagaggggattcccttccgaagccctacctggtttggaattccacgacttgaaaggatcgtccgcgggagtaataaaatcaagttcgttgttaaaaaacctgaactagttatttcctacttgcctcctgggatggctagtaaaataaacactaaagctttgcagtcccccaaaagaccacgaagtcctgggagtaattcaaaggttcctgaaattgaggtcaccgtggaaggccctaataacaacaatcctcaaacctcagctgttcgaaccccgacccagactaacggttctaacgttcccttcaagccacgagggagagagttttcctttgaggcctggaatgccaaaatcacggacctaaaacagaaagttgaaaatctcttcaatgagaaatgtggggaagctcttggccttaaacaagctgtgaaggtgccgttcgcgttatttgagtctttcccggaagacttttatgtggaaggcttacctgagggtgtgccattccgaagaccatcgacttttggcattccgaggctggagaagatactcagaaacaaagccaaaattaagttcatcattaaaaagcccgaaatgtttgagacggcgattaaggagagcacctcctctaagagccctcccagaaaaataaattcatcacccaatgttaatactactgcatcaggtgttgaagaccttaacatcattcaggtgacaattccagatgatgataatgaaagactctcgaaagttgaaaaagctagacagctaagagaacaagtgaatgacctctttagtcggaaatttggtgaagctattggtatgggttttcctgtgaaagttccctacaggaaaatcacaattaaccctggctgtgtggtggttgatggcatgcccccgggggtgtccttcaaagcccccagctacctggaaatcagctccatgagaaggatcttagactctgccgagtttatcaaattcacggtcattagaccatttccaggacttgtgattaataaccagctggttgatcagagtgagtcagaaggccccgtgatacaagaatcagctgaaccaagccagttggaagttccagccacagaagaaataaaagagactgatggaagctctcagatcaagcaagaaccagaccccacgtggtagacctcttccctcctagggtaaatcagcttctgtgtcagggatgctgtgtggtgtccatctgaaccccctgcatacgcgtagctaatgtgatctccccactttcacataagatggtggccctgccttcagggaatgtgggagccaggtgggagccttcccggatatttaagctagaagattctacagggagattctccttggatcaatatatgtctctcagtcaaagatgtaaaagcacttttgccttaaaaagaatgttctgtttctaaatagagtcaacgttgtcctcctcattggaattcactatgagtcagaatcattagactgacttttttttttccatagtaatagtattttgcagagtctcacagagctgcagatcttttgttcatcttgcagagttaacaagtctgatcctgttagtccagatttcttaaatttggccaagttataataggagcagtagcttgagacccgaagtcaggaaactttgacaatggatttttttttttaatccagagacttgtactggaatttgccttaccctgtcagctcatggacttaaggtttcatcccgctttatgagtgcttctgaatccaagtcattgttacctgaatttgcaaattaagttgtgatattcgtgactgttaaattcctgtaattagattaacctctttgcttgcttgtttgttttctctcctattttagcttaaagtatcagtggttgagaagagcttttcggacctgttactaccccaagctgtgtaatatacttgtataacagaaataccttctatacaaacctttttttctacttttagatagaaatgtctactttttcagcagttctgtgaattaaagagcagagtgactgtgggtctggaatggctggtgtacttgggaatgtactatcaggattttacagcaatgctgggaaatgacagggaaaatgacaggaatgaatctcaccagattttttatgtactcagcagagccttgagttacggtgtttattttccaatcaagtgaagatatctcctacttctcctactggaacatctcagcttctgcagtgaagaaaaattcctgtgatagttcagttctttagtttttctatttgaaaaaaaaaaatcatttaaatgatcctttgttcacggctctccttaatgactgagtgaacagttcctatctgtatatttgactaaaccttttcctaagctatctctcatggttcctatgtttttttatcataattaaaagcaaaaccatctggatcacctaacagtcagaggtcagtatctcagcgtgtgaattatagaggaaatacagagagaacctcttccacttttacttttcgtccaaataaaatgcatggtgtaccagaagttgaagatcgggttgaggattggggctagctcgatgacactaaggccccaacatcgcgggacctgctgtggcgcggattcttaggaacgctgttctagccggccccctctccaggggtcgccgtggccggcattatttcctagttcttcttgtaaccctgaggtgccagcgcggggagtgaggaggggtcagggggctaaggatgcaacctctgacgttctgcgccttcctaggagagtcttacatgtgttgagatttcacaagcaatgcgagttgtaaaataccagctctacaagaagctaggctctgtgacggcatagttttcagtagctttatcacaatattcacaatggagaattatatgacatggtagcagaaataggcccttttatgtgttgcttctattttacctcaaattgtagatatagggtaatcaataaaatccatccatgcctttcacacactaagt

SEQ ID NO: 5133 - protein, 584 aa, Homo sapiens; identical to SEQ ID NO: 4053

SEQ ID NO: 5134 - DNA, 3995 bp, Homo sapiens
gggtcttgttctgtctcccaagctggagtgcagtggtgtggtcataggtcactgcagcgtcgaactcctaggctcaagtgatcctcttgcctcaggctcctgagtagctgggacaacaggcgtgtaccacacctggatactttttaaatttttggtagagaagggatctcactctattgccaagctggtgtcgaactcttggtcttaagcagccctcccacgtcagcatcccaaagtgttgggatttcagagggatcatggcccaagttgcaatgtccaccctccccgttgaagatgaggagtcctcggagagcaggatggtggtgacattcctcatgtcagctctcgagtccatgtgtaaagaactggccaagtccaaagccgaagtggcctgcattgcagtgtatgaaacagacgtgtttgtcgtcggaactgaaagaggacgtgcttttgtcaataccagaaaggattttcaaaaagattttgtaaaatattgtgttgaagaagaagaaaaagctgcagagatgcataaaatgaaatctacaacccaggcaaatcggatgagtgtagatgctgtagaaattgaaacactcagaaaaacagttgaggactatttctgcttttgctatgggaaagctttaggcaaatccacagtggtacctgtaccatatgagaagatgctgcgagaccagtcggctgtggtagtgcaggggcttccggaaggtgttgcctttaaacaccccgagaactatgatcttgcaaccctgaaatggattttggagaacaaagcagggatttcattcatcattaagagaccttttttagagccaaagaagcatgtaggtggtcgtgtgatggtaacagatgctgacaggtcaatactatctccaggtggaagttgtggccccatcaaagtgaaaactgaacccacagaagattctggcatttccctggaaatggcagctgtgacagtaaaggaagaatcagaagatcctgattattatcaatataacattcaaggaagccaccattcttcagagggcaatgaaggcacagaaatggaagtaccagcagaagatgatgattattctccaccgtctaagagaccaaaggccaatgagctaccgcagccaccagtcccggaacccgccaatgctgggaagcggaaagtgagggagttcaacttcgagaaatggaatgctcgcatcactgatctacgtaaacaagttgaagaattgtttgaaaggaaatatgctcaagccataaaagccaaaggtccggtgacgatcccgtaccctcttttccagtctcatgttgaagatctttatgtagaaggacttcctgaaggaattccttttagaaggccatctacttacggaattcctcgcctggagaggatattacttgcaaaggaaaggattcgttttgtgattaagaaacatgagcttctgaattcaacacgtgaagatttacagcttgataagccagcttcaggagtaaaggaagaatggtatgccagaatcactaaattaagaaagatggtggatcagcttttctgcaaaaaatttgcggaagccttggggagcactgaagccaaggctgtaccgtaccaaaaatttgaggcacacccgaatgatctgtacgtggaaggactgccagaaaacattcctttccgaagtccctcatggtatggaatcccaaggctggaaaaaatcattcaagtgggcaatcgaattaaatttgttattaaaagaccagaacttctgactcacagtaccactgaagttactcagccaagaacgaatacaccagctcaagctcttggactcaccgaggcagtaaaagtaccatatcctgtgtttgaatcaaacccggagttcttgtatgtggaaggcttgccagaggggattcccttccgaagccctacctggtttggaattccacgacttgaaaggatcgtccgcgggagtaataaaatcaagttcgttgttaaaaaacctgaactagttatttcctacttgcctcctgggatggctagtaaaataaacactaaagctttgcagtcccccaaaagaccacgaagtcctgggagtaattcaaaggttcctgaaattgaggtcaccgtggaaggccctaataacaacaatcctcaaacctcagctgttcgaaccccgacccagactaacggttctaacgttcccttcaagccacgagggagagagttttcctttgaggcctggaatgccaaaatcacggacctaaaacagaaagttgaaaatctcttcaatgagaaatgtggggaagctcttggccttaaacaagctgtgaaggtgccgttcgcgttatttgagtctttcccggaagacttttatgtggaaggcttacctgagggtgtgccattccgaagaccatcgacttttggcattccgaggctggagaagatactcagaaacaaagccaaaattaagttcatcattaaaaagcccgaaatgtttgagacggcgattaaggagagcacctcctctaagagccctcccagaaaaataaattcatcacccaatgttaatactactgcatcaggtgttgaagaccttaacatcattcaggtgacaattccagatgatgataatgaaagactctcgaaagttgaaaaagctagacagctaagagaacaagtgaatgacctctttagtcggaaatttggtgaagctattggtatgggttttcctgtgaaagttccctacaggaaaatcacaattaaccctggctgtgtggtggttgatggcatgcccccgggggtgtccttcaaagcccccagctacctggaaatcagctccatgagaaggatcttagactctgccgagtttatcaaattcacggtcattagaccatttccaggacttgtgattaataaccagctggttgatcagagtgagtcagaaggccccgtgatacaagaatcagctgaaccaagccagttggaagttccagccacagaagaaataaaagagactgatggaagctctcagatcaagcaagaaccagaccccacgtggtagacctcttccctcctaggcttaaagtatcagtggttgagaagagcttttcggacctgttactaccccaagctgtagccttgagttacggtgtttattttccaatcaagtgaagatatctcctacttctcctactggaacatctcagcttctgcagtgaagaaaaattcctgtgatagttcagttctttagtttttctatttgaaaaaaaaaaatcatttaaatgatcctttgttcacggctctccttaatgactgagtgaacagttcctatctgtatatttgactaaaccttttcctaagctatctctcatggttcctatgtttttttatcataattaaaagcaaaaccatctggatcacctaacagtcagaggtcagtatctcagcgtgtgaattatagaggaaatacagagagaacctcttccacttttacttttcgtccaaataaaatgcatggtgtaccagaagttgaagatcgggttgaggattggggctagctcgatgacactaaggccccaacatcgcgggacctgctgtggcgcggattcttaggaacgctgttctagccggccccctctccaggggtcgccgtggccggcattatttcctagttcttcttgtaaccctgaggtgccagcgcggggagtgaggaggggtcagggggctaaggatgcaacctctgacgttctgcgccttcctaggagagtcttacatgtgttgagatttcacaagcaatgcgagttgtaaaataccagctctacaagaagctaggctctgtgacggcatagttttcagtagctttatcacaatattcacaatggagaattatatgacatggtagcagaaataggcccttttatgtgttgcttctattttacctcaaattgtagatatagggtaatcaataaaatccatccatgcctttcacacactaagt

SEQ ID NO: 5135 - protein, 933 aa, Homo sapiens; identical to SEQ ID NO: 4067

SEQ ID NO: 5136 - DNA, 7179 bp, Homo sapiens
gggtcttgttctgtctcccaagctggagtgcagtggtgtggtcataggtcactgcagcgtcgaactcctaggctcaagtgatcctcttgcctcaggctcctgagtagctgggacaacaggcgtgtaccacacctggatactttttaaatttttggtagagaagggatctcactctattgccaagctggtgtcgaactcttggtcttaagcagccctcccacgtcagcatcccaaagtgttgggatttcagagggatcatggcccaagttgcaatgtccaccctccccgttgaagatgaggagtcctcggagagcaggatggtggtgacattcctcatgtcagctctcgagtccatgtgtaaagaactggccaagtccaaagccgaagtggcctgcattgcagtgtatgaaacagacgtgtttgtcgtcggaactgaaagaggacgtgcttttgtcaataccagaaaggattttcaaaaagattttgtaaaatattgtgttgaagaagaagaaaaagctgcagagatgcataaaatgaaatctacaacccaggcaaatcggatgagtgtagatgctgtagaaattgaaacactcagaaaaacagttgaggactatttctgcttttgctatgggaaagctttaggcaaatccacagtggtacctgtaccatatgagaagatgctgcgagaccagtcggctgtggtagtgcaggggcttccggaaggtgttgcctttaaacaccccgagaactatgatcttgcaaccctgaaatggattttggagaacaaagcagggatttcattcatcattaagagaccttttttagagccaaagaagcatgtaggtggtcgtgtgatggtaacagatgctgacaggtcaatactatctccaggtggaagttgtggccccatcaaagtgaaaactgaacccacagaagattctggcatttccctggaaatggcagctgtgacagtaaaggaagaatcagaagatcctgattattatcaatataacattcaagcaggcccttctgaaactgatgatgttgatgaaaaacagcccctatcgaagcctttgcaaggaagccaccattcttcagagggcaatgaaggcacagaaatggaagtaccagcagaagattctactcaacatgtcccttcagaaacaagtgaggaccctgaagttgaggtgactattgaagatgatgattattctccaccgtctaagagaccaaaggccaatgagctaccgcagccaccagtcccggaacccgccaatgctgggaagcggaaagtgagggagttcaacttcgagaaatggaatgctcgcatcactgatctacgtaaacaagttgaagaattgtttgaaaggaaatatgctcaagccataaaagccaaaggtccggtgacgatcccgtaccctcttttccagtctcatgttgaagatctttatgtagaaggacttcctgaaggaattccttttagaaggccatctacttacggaattcctcgcctggagaggatattacttgcaaaggaaaggattcgttttgtgattaagaaacatgagcttctgaattcaacacgtgaagatttacagcttgataagccagcttcaggagtaaaggaagaatggtatgccagaatcactaaattaagaaagatggtggatcagcttttctgcaaaaaatttgcggaagccttggggagcactgaagccaaggctgtaccgtaccaaaaatttgaggcacacccgaatgatctgtacgtggaaggactgccagaaaacattcctttccgaagtccctcatggtatggaatcccaaggctggaaaaaatcattcaagtgggcaatcgaattaaatttgttattaaaagaccagaacttctgactcacagtaccactgaagttactcagccaagaacgaatacaccagtcaaagaagattggaatgtcagaattaccaagctacggaagcaagtggaagagatttttaatttgaaatttgctcaagctcttggactcaccgaggcagtaaaagtaccatatcctgtgtttgaatcaaacccggagttcttgtatgtggaaggcttgccagaggggattcccttccgaagccctacctggtttggaattccacgacttgaaaggatcgtccgcgggagtaataaaatcaagttcgttgttaaaaaacctgaactagttatttcctacttgcctcctgggatggctagtaaaataaacactaaagctttgcagtcccccaaaagaccacgaagtcctgggagtaattcaaaggttcctgaaattgaggtcaccgtggaaggccctaataacaacaatcctcaaacctcagctgttcgaaccccgacccagactaacggttctaacgttcccttcaagccacgagggagagagttttcctttgaggcctggaatgccaaaatcacggacctaaaacagaaagttgaaaatctcttcaatgagaaatgtggggaagctcttggccttaaacaagctgtgaaggtgccgttcgcgttatttgagtctttcccggaagacttttatgtggaaggcttacctgagggtgtgccattccgaagaccatcgacttttggcattccgaggctggagaagatactcagaaacaaagccaaaattaagttcatcattaaaaagcccgaaatgtttgagacggcgattaaggagagcacctcctctaagagccctcccagaaaaataaattcatcacccaatgttaatactactgcatcaggtgttgaagaccttaacatcattcaggtgacaattccagatgatgataatgaaagactctcgaaagttgaaaaagctagacagctaagagaacaagtgaatgacctctttagtcggaaatttggtgaagctattggtatgggttttcctgtgaaagttccctacaggaaaatcacaattaaccctggctgtgtggtggttgatggcatgcccccgggggtgtccttcaaagcccccagctacctggaaatcagctccatgagaaggatcttagactctgccgagtttatcaaattcacggtcattaggtaagtgagagtttcctgcttagtcacaggagcgaatctggagctcatgaggctgactcttctaaaatgcagccacaggtagtcatcgaatccggcttcctatgctgtgcaatcaacaaatcaaaataacttgtgtcatcattagaatgtcagatgtgcttctacgaactaagctgactcttttaattctttggcaaagggttggcaaactaggactgtttgccaaattcaggctgcctcctatttttagagtcttcctgaaacacagctacacccgtattatccatggctgctttcctgtcacagtgagtaagtagctgggactgagaaggcatggcctccaaagtctaaaatatttactctctagcactttgtagaaaaaccttagctaggcacagtggctaacgcctgtaatcccagcattttgggaggccaaggcaggcagatcacctgaggtcaggagttccagaccagcctggccaacatggtgaaatcccatctctacaaaaataaaacagttagctgggcatgatggcgggtgcctgtaatcccagctactcgggaggctgaggcaggatagtcgcttgaacccaggaggtggaggttgcaatgagccaagatcatgccactgcactccagcctggacgacagagtgagactccatcacaagaaaaaaagaactttgtcaacctctgtcttagggcgccttgtcacaggcttcgggtcagacggattcaaccttgcatcagccatttgttagccaggtcactctgttctttgtctgtaaatgagattgatcgttgttcccactgagagtgtcagctccttcccgtagagcaggcatgatgattgtactcacctctgacaccattgtgagtgccacattccttcccacgtccttgtcactgtaagagatgcccacctgagcaccaaccccaggttatcttcccctttgtcttccagccccccagaaacagctacgactcaacctacccaatcatttcatcatcagattgccactgtctctagttcaggtctcttgggactggcactcagaaatctcataataaatcctcttgaggcttctcatacactcgtcttcttccaatcttctttccctcaaaatctcatattttggttccacttcacccaccgtcattctccatatcactcccaggagttaggcaaaaagccccttccgttcttccgtatgttaaacttagaatcactctgttccctgctctgcgtttctattttttgtttttcctccatttactagtagcttaacactttctaacagtgttcttattattgatacgtatctatctcttccataagcttataaggtcacggataatacttctcattgtagtacgtaaatgacgtgggctagatatgagttgaataaacagttatacctgtaaattcttacagagtgaaaataaattgttatactttacaatttgtttctctctttagaccatttccaggacttgtgattaataaccgtgagtattttgtgaagtgttttgtttttgttttttcctggggtctgacgtgtgtgcgtgtgagtgtgtatacatgcttaacgtatatcacgttacttcacctatgtcagtaaccaggccaaatacttgttttagccctcagtaaaaacaccaggcacttcctagttgtaaaattattcaagcttcttaacttcctatcctcgatgcacttaatcataaaatggtaataatagcaccgattttgggggagtcgttccagtagatggaaagcatctggaacaggtgtcagcaagctcctgccgacgtgtatgcataaagttttattgaaaccaccatcgtgtccatttgtttatggcagaactgagagatggcagcagcaagtgtgtgcctgcaaaacctaaaatatttactaattggctctgcaagaaaagagtttgcatccccctaacctagaacagtgtctagcctctagtatgtgtttagcctacagtatgtgctcagcgaatacaatctatatttattactgcttttatgactgttataattactgtgcttggatttcgttacaaagtaagtcacaatgtgcctgcttctgttagtatttcagcacagtgcctggcacacatggggctctcaaatattgctgagcgagtgaacaaatgtcctttcaattccttaacgttgatgtcattttcaatagtattttgagccaaacttaattttgcgagtgtgttttgttttcttaactttattattaaaaatgtataaaagtgaggccaggcgtggtggctcacgcctgtaatcccagcagtttgggaggctgaggcaggcggatcagttgaggttgggagttggagaccagcccgtccaacatggtgaaagcctgtctctactaaaaatacaaaaatcagctgggtgtggtggcgcgtgcctgtaatcccagctactcaggaggctgaggcaggagagttgcttgaatcctagaggtggaggttgcagtgagctgagatcgtgccattgcactccagcctgggcaacaagagcaaaactctgtcccaataaataaataaataaaatgttctcttttgttcctgttcttgtgcggtagtgtggtatagagttttatggtaattactgtgaattagtgattctgagggacatatcagaactctgaggtttgtttccttctcatcttgagggaaacagcaaatgtatgttaaaatgcttttccaagggaacaacacatccttacattatttaaaccaatctgcttcattttcagagctggttgatcagagtgagtcagaaggccccgtgatacaagaatcagctgaaccaagccagttggaagttccagccacagaagaaataaaagagactgatggaagctctcagatcaagcaagaaccagaccccacgtggtagacctcttccctcctaggcttaaagtatcagtggttgagaagagcttttcggacctgttactaccccaagctgtgtaatatacttgtataacagaaataccttctatacaaacctttttttctacttttagatagaaatgtctactttttcagcagttctgtgaattaaagagcagagtgactgtgggtctggaatggctggtgtacttgggaatgtactatcaggattttacagcaatgctgggaaatgacagggaaaatgacaggaatgaatctcaccagattttttatgtactcagcagagccttgagttacggtgtttattttccaatcaagtgaagatatctcctacttctcctactggaacatctcagcttctgcagtgaagaaaaattcctgtgatagttcagttctttagtttttctatttgaaaaaaaaaaatcatttaaatgatcctttgttcacggctctccttaatgactgagtgaacagttcctatctgtatatttgactaaaccttttcctaagctatctctcatggttcctatgtttttttatcataattaaaagcaaaaccatctggatcacctaacagtcagaggtcagtatctcagcgtgtgaattatagaggaaatacagagagaacctcttccacttttacttttcgtccaaataaaatgcatggtgtaccagaagttgaagatcgggttgaggattggggctagctcgatgacactaaggccccaacatcgcgggacctgctgtggcgcggattcttaggaacgctgttctagccggccccctctccaggggtcgccgtggccggcattatttcctagttcttcttgtaaccctgaggtgccagcgcggggagtgaggaggggtcagggggctaaggatgcaacctctgacgttctgcgccttcctaggagagtcttacatgtgttgagatttcacaagcaatgcgagttgtaaaataccagctctacaagaagctaggctctgtgacggcatagttttcagtagctttatcacaatattcacaatggagaattatatgacatggtagcagaaataggcccttttatgtgttgcttctattttacctcaaattgtagatatagggtaatcaataaaatccatccatgcctttcacacactaagt

SEQ ID NO: 5137 - protein, 942 aa, Homo sapiens; identical to SEQ ID NO: 4619

SEQ ID NO: 5138 - DNA, 7228 bp, Homo sapiens
gggtcttgttctgtctcccaagctggagtgcagtggtgtggtcataggtcactgcagcgtcgaactcctaggctcaagtgatcctcttgcctcaggctcctgagtagctgggacaacaggcgtgtaccacacctggatactttttaaatttttggtagagaagggatctcactctattgccaagctggtgtcgaactcttggtcttaagcagccctcccacgtcagcatcccaaagtgttgggatttcagagggatcatggcccaagttgcaatgtccaccctccccgttgaagatgaggagtcctcggagagcaggatggtggtgacattcctcatgtcagctctcgagtccatgtgtaaagaactggccaagtccaaagccgaagtggcctgcattgcagtgtatgaaacagacgtgtttgtcgtcggaactgaaagaggacgtgcttttgtcaataccagaaaggattttcaaaaagattttgtaaaatattgtgttgaagaagaagaaaaagctgcagagatgcataaaatgaaatctacaacccaggcaaatcggatgagtgtagatgctgtagaaattgaaacactcagaaaaacagttgaggactatttctgcttttgctatgggaaagctttaggcaaatccacagtggtacctgtaccatatgagaagatgctgcgagaccagtcggctgtggtagtgcaggggcttccggaaggtgttgcctttaaacaccccgagaactatgatcttgcaaccctgaaatggattttggagaacaaagcagggatttcattcatcattaagagaccttttttagagccaaagaagcatgtaggtggtcgtgtgatggtaacagatgctgacaggtcaatactatctccaggtggaagttgtggccccatcaaagtgaaaactgaacccacagaagattctggcatttccctggaaatggcagctgtgacagtaaaggaagaatcagaagatcctgattattatcaatataacattcaagcaggcccttctgaaactgatgatgttgatgaaaaacagcccctatcgaagcctttgcaaggaagccaccattcttcagagggcaatgaaggcacagaaatggaagtaccagcagaagatgatgattattctccaccgtctaagagaccaaaggccaatgagctaccgcagccaccagtcccggaacccgccaatgctgggaagcggaaagtgagggagttcaacttcgagaaatggaatgctcgcatcactgatctacgtaaacaagttgaagaattgtttgaaaggaaatatgctcaagccataaaagccaaaggtccggtgacgatcccgtaccctcttttccagtctcatgttgaagatctttatgtagaaggacttcctgaaggaattccttttagaaggccatctacttacggaattcctcgcctggagaggatattacttgcaaaggaaaggattcgttttgtgattaagaaacatgagcttctgaattcaacacgtgaagatttacagcttgataagccagcttcaggagtaaaggaagaatggtatgccagaatcactaaattaagaaagatggtggatcagcttttctgcaaaaaatttgcggaagccttggggagcactgaagccaaggctgtaccgtaccaaaaatttgaggcacacccgaatgatctgtacgtggaaggactgccagaaaacattcctttccgaagtccctcatggtatggaatcccaaggctggaaaaaatcattcaagtgggcaatcgaattaaatttgttattaaaagaccagaacttctgactcacagtaccactgaagttactcagccaagaacgaatacaccagtcaaagaagattggaatgtcagaattaccaagctacggaagcaagtggaagagatttttaatttgaaatttgcttagatttgttgacagcggtttcctggagtgctgtcttgagaacgattctgaggaggctcagcaagaaagagtgtttcagttgattgggtgtgtctgtcatggagaaggaactcaagctcttggactcaccgaggcagtaaaagtaccatatcctgtgtttgaatcaaacccggagttcttgtatgtggaaggcttgccagaggggattcccttccgaagccctacctggtttggaattccacgacttgaaaggatcgtccgcgggagtaataaaatcaagttcgttgttaaaaaacctgaactagttatttcctacttgcctcctgggatggctagtaaaataaacactaaagctttgcagtcccccaaaagaccacgaagtcctgggagtaattcaaaggttcctgaaattgaggtcaccgtggaaggccctaataacaacaatcctcaaacctcagctgttcgaaccccgacccagactaacggttctaacgttcccttcaagccacgagggagagagttttcctttgaggcctggaatgccaaaatcacggacctaaaacagaaagttgaaaatctcttcaatgagaaatgtggggaagctcttggccttaaacaagctgtgaaggtgccgttcgcgttatttgagtctttcccggaagacttttatgtggaaggcttacctgagggtgtgccattccgaagaccatcgacttttggcattccgaggctggagaagatactcagaaacaaagccaaaattaagttcatcattaaaaagcccgaaatgtttgagacggcgattaaggagagcacctcctctaagagccctcccagaaaaataaattcatcacccaatgttaatactactgcatcaggtgttgaagaccttaacatcattcaggtgacaattccagatgatgataatgaaagactctcgaaagttgaaaaagctagacagctaagagaacaagtgaatgacctctttagtcggaaatttggtgaagctattggtatgggttttcctgtgaaagttccctacaggaaaatcacaattaaccctggctgtgtggtggttgatggcatgcccccgggggtgtccttcaaagcccccagctacctggaaatcagctccatgagaaggatcttagactctgccgagtttatcaaattcacggtcattaggtaagtgagagtttcctgcttagtcacaggagcgaatctggagctcatgaggctgactcttctaaaatgcagccacaggtagtcatcgaatccggcttcctatgctgtgcaatcaacaaatcaaaataacttgtgtcatcattagaatgtcagatgtgcttctacgaactaagctgactcttttaattctttggcaaagggttggcaaactaggactgtttgccaaattcaggctgcctcctatttttagagtcttcctgaaacacagctacacccgtattatccatggctgctttcctgtcacagtgagtaagtagctgggactgagaaggcatggcctccaaagtctaaaatatttactctctagcactttgtagaaaaaccttagctaggcacagtggctaacgcctgtaatcccagcattttgggaggccaaggcaggcagatcacctgaggtcaggagttccagaccagcctggccaacatggtgaaatcccatctctacaaaaataaaacagttagctgggcatgatggcgggtgcctgtaatcccagctactcgggaggctgaggcaggatagtcgcttgaacccaggaggtggaggttgcaatgagccaagatcatgccactgcactccagcctggacgacagagtgagactccatcacaagaaaaaaagaactttgtcaacctctgtcttagggcgccttgtcacaggcttcgggtcagacggattcaaccttgcatcagccatttgttagccaggtcactctgttctttgtctgtaaatgagattgatcgttgttcccactgagagtgtcagctccttcccgtagagcaggcatgatgattgtactcacctctgacaccattgtgagtgccacattccttcccacgtccttgtcactgtaagagatgcccacctgagcaccaaccccaggttatcttcccctttgtcttccagccccccagaaacagctacgactcaacctacccaatcatttcatcatcagattgccactgtctctagttcaggtctcttgggactggcactcagaaatctcataataaatcctcttgaggcttctcatacactcgtcttcttccaatcttctttccctcaaaatctcatattttggttccacttcacccaccgtcattctccatatcactcccaggagttaggcaaaaagccccttccgttcttccgtatgttaaacttagaatcactctgttccctgctctgcgtttctattttttgtttttcctccatttactagtagcttaacactttctaacagtgttcttattattgatacgtatctatctcttccataagcttataaggtcacggataatacttctcattgtagtacgtaaatgacgtgggctagatatgagttgaataaacagttatacctgtaaattcttacagagtgaaaataaattgttatactttacaatttgtttctctctttagaccatttccaggacttgtgattaataaccgtgagtattttgtgaagtgttttgtttttgttttttcctggggtctgacgtgtgtgcgtgtgagtgtgtatacatgcttaacgtatatcacgttacttcacctatgtcagtaaccaggccaaatacttgttttagccctcagtaaaaacaccaggcacttcctagttgtaaaattattcaagcttcttaacttcctatcctcgatgcacttaatcataaaatggtaataatagcaccgattttgggggagtcgttccagtagatggaaagcatctggaacaggtgtcagcaagctcctgccgacgtgtatgcataaagttttattgaaaccaccatcgtgtccatttgtttatggcagaactgagagatggcagcagcaagtgtgtgcctgcaaaacctaaaatatttactaattggctctgcaagaaaagagtttgcatccccctaacctagaacagtgtctagcctctagtatgtgtttagcctacagtatgtgctcagcgaatacaatctatatttattactgcttttatgactgttataattactgtgcttggatttcgttacaaagtaagtcacaatgtgcctgcttctgttagtatttcagcacagtgcctggcacacatggggctctcaaatattgctgagcgagtgaacaaatgtcctttcaattccttaacgttgatgtcattttcaatagtattttgagccaaacttaattttgcgagtgtgttttgttttcttaactttattattaaaaatgtataaaagtgaggccaggcgtggtggctcacgcctgtaatcccagcagtttgggaggctgaggcaggcggatcagttgaggttgggagttggagaccagcccgtccaacatggtgaaagcctgtctctactaaaaatacaaaaatcagctgggtgtggtggcgcgtgcctgtaatcccagctactcaggaggctgaggcaggagagttgcttgaatcctagaggtggaggttgcagtgagctgagatcgtgccattgcactccagcctgggcaacaagagcaaaactctgtcccaataaataaataaataaaatgttctcttttgttcctgttcttgtgcggtagtgtggtatagagttttatggtaattactgtgaattagtgattctgagggacatatcagaactctgaggtttgtttccttctcatcttgagggaaacagcaaatgtatgttaaaatgcttttccaagggaacaacacatccttacattatttaaaccaatctgcttcattttcagagctggttgatcagagtgagtcagaaggccccgtgatacaagaatcagctgaaccaagccagttggaagttccagccacagaagaaataaaagagactgatggaagctctcagatcaagcaagaaccagaccccacgtggtagacctcttccctcctaggcttaaagtatcagtggttgagaagagcttttcggacctgttactaccccaagctgtgtaatatacttgtataacagaaataccttctatacaaacctttttttctacttttagatagaaatgtctactttttcagcagttctgtgaattaaagagcagagtgactgtgggtctggaatggctggtgtacttgggaatgtactatcaggattttacagcaatgctgggaaatgacagggaaaatgacaggaatgaatctcaccagattttttatgtactcagcagagccttgagttacggtgtttattttccaatcaagtgaagatatctcctacttctcctactggaacatctcagcttctgcagtgaagaaaaattcctgtgatagttcagttctttagtttttctatttgaaaaaaaaaaatcatttaaatgatcctttgttcacggctctccttaatgactgagtgaacagttcctatctgtatatttgactaaaccttttcctaagctatctctcatggttcctatgtttttttatcataattaaaagcaaaaccatctggatcacctaacagtcagaggtcagtatctcagcgtgtgaattatagaggaaatacagagagaacctcttccacttttacttttcgtccaaataaaatgcatggtgtaccagaagttgaagatcgggttgaggattggggctagctcgatgacactaaggccccaacatcgcgggacctgctgtggcgcggattcttaggaacgctgttctagccggccccctctccaggggtcgccgtggccggcattatttcctagttcttcttgtaaccctgaggtgccagcgcggggagtgaggaggggtcagggggctaaggatgcaacctctgacgttctgcgccttcctaggagagtcttacatgtgttgagatttcacaagcaatgcgagttgtaaaataccagctctacaagaagctaggctctgtgacggcatagttttcagtagctttatcacaatattcacaatggagaattatatgacatggtagcagaaataggcccttttatgtgttgcttctattttacctcaaattgtagatatagggtaatcaataaaatccatccatgcctttcacacactaagt

SEQ ID NO: 5139 - protein, 563 aa, Homo sapiens; identical to SEQ ID NO: 4097

SEQ ID NO: 5140 - DNA, 7052 bp, Homo sapiens
gggtcttgttctgtctcccaagctggagtgcagtggtgtggtcataggtcactgcagcgtcgaactcctaggctcaagtgatcctcttgcctcaggctcctgagtagctgggacaacaggcgtgtaccacacctggatactttttaaatttttggtagagaagggatctcactctattgccaagctggtgtcgaactcttggtcttaagcagccctcccacgtcagcatcccaaagtgttgggatttcagagggatcatggcccaagttgcaatgtccaccctccccgttgaagatgaggagtcctcggagagcaggatggtggtgacattcctcatgtcagctctcgagtccatgtgtaaagaactggccaagtccaaagccgaagtggcctgcattgcagtgtatgaaacagacgtgtttgtcgtcggaactgaaagaggacgtgcttttgtcaataccagaaaggattttcaaaaagattttgtaaaatattgtgttgaagaagaagaaaaagctgcagagatgcataaaatgaaatctacaacccaggcaaatcggatgagtgtagatgctgtagaaattgaaacactcagaaaaacagttgaggactatttctgcttttgctatgggaaagctttaggcaaatccacagtggtacctgtaccatatgagaagatgctgcgagaccagtcggctgtggtagtgcaggggcttccggaaggtgttgcctttaaacaccccgagaactatgatcttgcaaccctgaaatggattttggagaacaaagcagggatttcattcatcattaagagaccttttttagagccaaagaagcatgtaggtggtcgtgtgatggtaacagatgctgacaggtcaatactatctccaggtggaagttgtggccccatcaaagtgaaaactgaacccacagaagattctggcatttccctggaaatggcagctgtgacagtaaaggaagaatcagaagatcctgattattatcaatataacattcaaggaagccaccattcttcagagggcaatgaaggcacagaaatggaagtaccagcagaagattctactcaacatgtcccttcagaaacaagtgaggaccctgaagttgaggtgactattgaagatgatgattattctccaccgtctaagagaccaaaggccaatgagctaccgcagccaccagtcccggaacccgccaatgctgggaagcggaaagtgagggagttcaacttcgagaaatggaatgctcgcatcactgatctacgtaaacaagttgaagaattgtttgaaaggaaatatgctcaagccataaaagccaaaggtccggtgacgatcccgtaccctcttttccagtctcatgttgaagatctttatgtagaaggacttcctgaaggaattccttttagaaggccatctacttacggaattcctcgcctggagaggatattacttgcaaaggaaaggattcgttttgtgattaagaaacatgagcttctgaattcaacacgtgaagatttacagcttgataagccagcttcaggagtaaaggaagaatggtatgccagaatcactaaattaagaaagatggtggatcagcttttctgcaaaaaatttgcggaagccttggggagcactgaagccaaggctgtaccgtaccaaaaatttgaggcacacccgaatgatctgtacgtggaaggactgccagaaaacattcctttccgaagtccctcatggtatggaatcccaaggctggaaaaaatcattcaagtgggcaatcgaattaaatttgttattaaaagaccagaacttctgactcacagtaccactgaagttactcagccaagaacgaatacaccagtcaaagaagattggaatgtcagaattaccaagctacggaagcaagtggaagagatttttaatttgaaatttgctcaagctcttggactcaccgaggcagtaaaagtaccatatcctgtgtttgaatcaaacccggagttcttgaaaggatcgtccgcgggagtaataaaatcaagttcgttgttaaaaaacctgaactagttatttcctacttgcctcctgggatggctagtaaaataaacactaaagctttgcagtcccccaaaagaccacgaagtcctgggagtaattcaaaggttcctgaaattgaggtcaccgtggaaggccctaataacaacaatcctcaaacctcagctgttcgaaccccgacccagactaacggttctaacgttcccttcaagccacgagggagagagttttcctttgaggcctggaatgccaaaatcacggacctaaaacagaaagttgaaaatctcttcaatgagaaatgtggggaagctcttggccttaaacaagctgtgaaggtgccgttcgcgttatttgagtctttcccggaagacttttatgtggaaggcttacctgagggtgtgccattccgaagaccatcgacttttggcattccgaggctggagaagatactcagaaacaaagccaaaattaagttcatcattaaaaagcccgaaatgtttgagacggcgattaaggagagcacctcctctaagagccctcccagaaaaataaattcatcacccaatgttaatactactgcatcaggtgttgaagaccttaacatcattcaggtgacaattccagatgatgataatgaaagactctcgaaagttgaaaaagctagacagctaagagaacaagtgaatgacctctttagtcggaaatttggtgaagctattggtatgggttttcctgtgaaagttccctacaggaaaatcacaattaaccctggctgtgtggtggttgatggcatgcccccgggggtgtccttcaaagcccccagctacctggaaatcagctccatgagaaggatcttagactctgccgagtttatcaaattcacggtcattaggtaagtgagagtttcctgcttagtcacaggagcgaatctggagctcatgaggctgactcttctaaaatgcagccacaggtagtcatcgaatccggcttcctatgctgtgcaatcaacaaatcaaaataacttgtgtcatcattagaatgtcagatgtgcttctacgaactaagctgactcttttaattctttggcaaagggttggcaaactaggactgtttgccaaattcaggctgcctcctatttttagagtcttcctgaaacacagctacacccgtattatccatggctgctttcctgtcacagtgagtaagtagctgggactgagaaggcatggcctccaaagtctaaaatatttactctctagcactttgtagaaaaaccttagctaggcacagtggctaacgcctgtaatcccagcattttgggaggccaaggcaggcagatcacctgaggtcaggagttccagaccagcctggccaacatggtgaaatcccatctctacaaaaataaaacagttagctgggcatgatggcgggtgcctgtaatcccagctactcgggaggctgaggcaggatagtcgcttgaacccaggaggtggaggttgcaatgagccaagatcatgccactgcactccagcctggacgacagagtgagactccatcacaagaaaaaaagaactttgtcaacctctgtcttagggcgccttgtcacaggcttcgggtcagacggattcaaccttgcatcagccatttgttagccaggtcactctgttctttgtctgtaaatgagattgatcgttgttcccactgagagtgtcagctccttcccgtagagcaggcatgatgattgtactcacctctgacaccattgtgagtgccacattccttcccacgtccttgtcactgtaagagatgcccacctgagcaccaaccccaggttatcttcccctttgtcttccagccccccagaaacagctacgactcaacctacccaatcatttcatcatcagattgccactgtctctagttcaggtctcttgggactggcactcagaaatctcataataaatcctcttgaggcttctcatacactcgtcttcttccaatcttctttccctcaaaatctcatattttggttccacttcacccaccgtcattctccatatcactcccaggagttaggcaaaaagccccttccgttcttccgtatgttaaacttagaatcactctgttccctgctctgcgtttctattttttgtttttcctccatttactagtagcttaacactttctaacagtgttcttattattgatacgtatctatctcttccataagcttataaggtcacggataatacttctcattgtagtacgtaaatgacgtgggctagatatgagttgaataaacagttatacctgtaaattcttacagagtgaaaataaattgttatactttacaatttgtttctctctttagaccatttccaggacttgtgattaataaccgtgagtattttgtgaagtgttttgtttttgttttttcctggggtctgacgtgtgtgcgtgtgagtgtgtatacatgcttaacgtatatcacgttacttcacctatgtcagtaaccaggccaaatacttgttttagccctcagtaaaaacaccaggcacttcctagttgtaaaattattcaagcttcttaacttcctatcctcgatgcacttaatcataaaatggtaataatagcaccgattttgggggagtcgttccagtagatggaaagcatctggaacaggtgtcagcaagctcctgccgacgtgtatgcataaagttttattgaaaccaccatcgtgtccatttgtttatggcagaactgagagatggcagcagcaagtgtgtgcctgcaaaacctaaaatatttactaattggctctgcaagaaaagagtttgcatccccctaacctagaacagtgtctagcctctagtatgtgtttagcctacagtatgtgctcagcgaatacaatctatatttattactgcttttatgactgttataattactgtgcttggatttcgttacaaagtaagtcacaatgtgcctgcttctgttagtatttcagcacagtgcctggcacacatggggctctcaaatattgctgagcgagtgaacaaatgtcctttcaattccttaacgttgatgtcattttcaatagtattttgagccaaacttaattttgcgagtgtgttttgttttcttaactttattattaaaaatgtataaaagtgaggccaggcgtggtggctcacgcctgtaatcccagcagtttgggaggctgaggcaggcggatcagttgaggttgggagttggagaccagcccgtccaacatggtgaaagcctgtctctactaaaaatacaaaaatcagctgggtgtggtggcgcgtgcctgtaatcccagctactcaggaggctgaggcaggagagttgcttgaatcctagaggtggaggttgcagtgagctgagatcgtgccattgcactccagcctgggcaacaagagcaaaactctgtcccaataaataaataaataaaatgttctcttttgttcctgttcttgtgcggtagtgtggtatagagttttatggtaattactgtgaattagtgattctgagggacatatcagaactctgaggtttgtttccttctcatcttgagggaaacagcaaatgtatgttaaaatgcttttccaagggaacaacacatccttacattatttaaaccaatctgcttcattttcagagctggttgatcagagtgagtcagaaggccccgtgatacaagaatcagctgaaccaagccagttggaagttccagccacagaagaaataaaagagactgatggaagctctcagatcaagcaagaaccagaccccacgtggtagacctcttccctcctaggcttaaagtatcagtggttgagaagagcttttcggacctgttactaccccaagctgtgtaatatacttgtataacagaaataccttctatacaaacctttttttctacttttagatagaaatgtctactttttcagcagttctgtgaattaaagagcagagtgactgtgggtctggaatggctggtgtacttgggaatgtactatcaggattttacagcaatgctgggaaatgacagggaaaatgacaggaatgaatctcaccagattttttatgtactcagcagagccttgagttacggtgtttattttccaatcaagtgaagatatctcctacttctcctactggaacatctcagcttctgcagtgaagaaaaattcctgtgatagttcagttctttagtttttctatttgaaaaaaaaaaatcatttaaatgatcctttgttcacggctctccttaatgactgagtgaacagttcctatctgtatatttgactaaaccttttcctaagctatctctcatggttcctatgtttttttatcataattaaaagcaaaaccatctggatcacctaacagtcagaggtcagtatctcagcgtgtgaattatagaggaaatacagagagaacctcttccacttttacttttcgtccaaataaaatgcatggtgtaccagaagttgaagatcgggttgaggattggggctagctcgatgacactaaggccccaacatcgcgggacctgctgtggcgcggattcttaggaacgctgttctagccggccccctctccaggggtcgccgtggccggcattatttcctagttcttcttgtaaccctgaggtgccagcgcggggagtgaggaggggtcagggggctaaggatgcaacctctgacgttctgcgccttcctaggagagtcttacatgtgttgagatttcacaagcaatgcgagttgtaaaataccagctctacaagaagctaggctctgtgacggcatagttttcagtagctttatcacaatattcacaatggagaattatatgacatggtagcagaaataggcccttttatgtgttgcttctattttacctcaaattgtagatatagggtaatcaataaaatccatccatgcctttcacacactaagt

SEQ ID NO: 5141 - protein, 605 aa, Homo sapiens; identical to SEQ ID NO: 4221

SEQ ID NO: 5142 - DNA, 7231 bp, Homo sapiens
gggtcttgttctgtctcccaagctggagtgcagtggtgtggtcataggtcactgcagcgtcgaactcctaggctcaagtgatcctcttgcctcaggctcctgagtagctgggacaacaggcgtgtaccacacctggatactttttaaatttttggtagagaagggatctcactctattgccaagctggtgtcgaactcttggtcttaagcagccctcccacgtcagcatcccaaagtgttgggatttcagagggatcatggcccaagttgcaatgtccaccctccccgttgaagatgaggagtcctcggagagcaggatggtggtgacattcctcatgtcagctctcgagtccatgtgtaaagaactggccaagtccaaagccgaagtggcctgcattgcagtgtatgaaacagacgtgtttgtcgtcggaactgaaagaggacgtgcttttgtcaataccagaaaggattttcaaaaagattttgtaaaatattgtgttgaagaagaagaaaaagctgcagagatgcataaaatgaaatctacaacccaggcaaatcggatgagtgtagatgctgtagaaattgaaacactcagaaaaacagttgaggactatttctgcttttgctatgggaaagctttaggcaaatccacagtggtacctgtaccatatgagaagatgctgcgagaccagtcggctgtggtagtgcaggggcttccggaaggtgttgcctttaaacaccccgagaactatgatcttgcaaccctgaaatggattttggagaacaaagcagggatttcattcatcattaagagaccttttttagagccaaagaagcatgtaggtggtcgtgtgatggtaacagatgctgacaggtcaatactatctccaggtggaagttgtggccccatcaaagtgaaaactgaacccacagaagattctggcatttccctggaaatggcagctgtgacagtaaaggaagaatcagaagatcctgattattatcaatataacattcaaggaagccaccattcttcagagggcaatgaaggcacagaaatggaagtaccagcagaagattctactcaacatgtcccttcagaaacaagtgaggaccctgaagttgaggtgactattgaagatgatgattattctccaccgtctaagagaccaaaggccaatgagctaccgcagccaccagtcccggaacccgccaatgctgggaagcggaaagtgagggagttcaacttcgagaaatggaatgctcgcatcactgatctacgtaaacaagttgaagaattgtttgaaaggaaatatgctcaagccataaaagccaaaggtccggtgacgatcccgtaccctcttttccagtctcatgttgaagatctttatgtagaaggacttcctgaaggaattccttttagaaggccatctacttacggaattcctcgcctggagaggatattacttgcaaaggaaaggattcgttttgtgattaagaaacatgagcttctgaattcaacacgtgaagatttacagcttgataagccagcttcaggagtaaaggaagaatggtatgccagaatcactaaattaagaaagatggtggatcagcttttctgcaaaaaatttgcggaagccttggggagcactgaagccaaggctgtaccgtaccaaaaatttgaggcacacccgaatgatctgtacgtggaaggactgccagaaaacattcctttccgaagtccctcatggtatggaatcccaaggctggaaaaaatcattcaagtgggcaatcgaattaaatttgttattaaaagaccagaacttctgactcacagtaccactgaagttactcagccaagaacgaatacaccagtcaaagaagattggaatgtcagaattaccaagctacggaagcaagtggaagagatttttaatttgaaatttgcttagatttgttgacagcggtttcctggagtgctgtcttgagaacgattctgaggaggctcagcaagaaagagtgtttcagttgattgggtgtgtctgtcatggagaaggaactcaagctcttggactcaccgaggcagtaaaagtaccatatcctgtgtttgaatcaaacccggagttcttgtatgtggaaggcttgccagaggggattcccttccgaagccctacctggtttggaattccacgacttgaaaggatcgtccgcgggagtaataaaatcaagttcgttgttaaaaaacctgaactagttatttcctacttgcctcctgggatggctagtaaaataaacactaaagctttgcagtcccccaaaagaccacgaagtcctgggagtaattcaaaggttcctgaaattgaggtcaccgtggaaggccctaataacaacaatcctcaaacctcagctgttcgaaccccgacccagactaacggttctaacgttcccttcaagccacgagggagagagttttcctttgaggcctggaatgccaaaatcacggacctaaaacagaaagttgaaaatctcttcaatgagaaatgtggggaagctcttggccttaaacaagctgtgaaggtgccgttcgcgttatttgagtctttcccggaagacttttatgtggaaggcttacctgagggtgtgccattccgaagaccatcgacttttggcattccgaggctggagaagatactcagaaacaaagccaaaattaagttcatcattaaaaagcccgaaatgtttgagacggcgattaaggagagcacctcctctaagagccctcccagaaaaataaattcatcacccaatgttaatactactgcatcaggtgttgaagaccttaacatcattcaggtgacaattccagatgatgataatgaaagactctcgaaagttgaaaaagctagacagctaagagaacaagtgaatgacctctttagtcggaaatttggtgaagctattggtatgggttttcctgtgaaagttccctacaggaaaatcacaattaaccctggctgtgtggtggttgatggcatgcccccgggggtgtccttcaaagcccccagctacctggaaatcagctccatgagaaggatcttagactctgccgagtttatcaaattcacggtcattaggtaagtgagagtttcctgcttagtcacaggagcgaatctggagctcatgaggctgactcttctaaaatgcagccacaggtagtcatcgaatccggcttcctatgctgtgcaatcaacaaatcaaaataacttgtgtcatcattagaatgtcagatgtgcttctacgaactaagctgactcttttaattctttggcaaagggttggcaaactaggactgtttgccaaattcaggctgcctcctatttttagagtcttcctgaaacacagctacacccgtattatccatggctgctttcctgtcacagtgagtaagtagctgggactgagaaggcatggcctccaaagtctaaaatatttactctctagcactttgtagaaaaaccttagctaggcacagtggctaacgcctgtaatcccagcattttgggaggccaaggcaggcagatcacctgaggtcaggagttccagaccagcctggccaacatggtgaaatcccatctctacaaaaataaaacagttagctgggcatgatggcgggtgcctgtaatcccagctactcgggaggctgaggcaggatagtcgcttgaacccaggaggtggaggttgcaatgagccaagatcatgccactgcactccagcctggacgacagagtgagactccatcacaagaaaaaaagaactttgtcaacctctgtcttagggcgccttgtcacaggcttcgggtcagacggattcaaccttgcatcagccatttgttagccaggtcactctgttctttgtctgtaaatgagattgatcgttgttcccactgagagtgtcagctccttcccgtagagcaggcatgatgattgtactcacctctgacaccattgtgagtgccacattccttcccacgtccttgtcactgtaagagatgcccacctgagcaccaaccccaggttatcttcccctttgtcttccagccccccagaaacagctacgactcaacctacccaatcatttcatcatcagattgccactgtctctagttcaggtctcttgggactggcactcagaaatctcataataaatcctcttgaggcttctcatacactcgtcttcttccaatcttctttccctcaaaatctcatattttggttccacttcacccaccgtcattctccatatcactcccaggagttaggcaaaaagccccttccgttcttccgtatgttaaacttagaatcactctgttccctgctctgcgtttctattttttgtttttcctccatttactagtagcttaacactttctaacagtgttcttattattgatacgtatctatctcttccataagcttataaggtcacggataatacttctcattgtagtacgtaaatgacgtgggctagatatgagttgaataaacagttatacctgtaaattcttacagagtgaaaataaattgttatactttacaatttgtttctctctttagaccatttccaggacttgtgattaataaccgtgagtattttgtgaagtgttttgtttttgttttttcctggggtctgacgtgtgtgcgtgtgagtgtgtatacatgcttaacgtatatcacgttacttcacctatgtcagtaaccaggccaaatacttgttttagccctcagtaaaaacaccaggcacttcctagttgtaaaattattcaagcttcttaacttcctatcctcgatgcacttaatcataaaatggtaataatagcaccgattttgggggagtcgttccagtagatggaaagcatctggaacaggtgtcagcaagctcctgccgacgtgtatgcataaagttttattgaaaccaccatcgtgtccatttgtttatggcagaactgagagatggcagcagcaagtgtgtgcctgcaaaacctaaaatatttactaattggctctgcaagaaaagagtttgcatccccctaacctagaacagtgtctagcctctagtatgtgtttagcctacagtatgtgctcagcgaatacaatctatatttattactgcttttatgactgttataattactgtgcttggatttcgttacaaagtaagtcacaatgtgcctgcttctgttagtatttcagcacagtgcctggcacacatggggctctcaaatattgctgagcgagtgaacaaatgtcctttcaattccttaacgttgatgtcattttcaatagtattttgagccaaacttaattttgcgagtgtgttttgttttcttaactttattattaaaaatgtataaaagtgaggccaggcgtggtggctcacgcctgtaatcccagcagtttgggaggctgaggcaggcggatcagttgaggttgggagttggagaccagcccgtccaacatggtgaaagcctgtctctactaaaaatacaaaaatcagctgggtgtggtggcgcgtgcctgtaatcccagctactcaggaggctgaggcaggagagttgcttgaatcctagaggtggaggttgcagtgagctgagatcgtgccattgcactccagcctgggcaacaagagcaaaactctgtcccaataaataaataaataaaatgttctcttttgttcctgttcttgtgcggtagtgtggtatagagttttatggtaattactgtgaattagtgattctgagggacatatcagaactctgaggtttgtttccttctcatcttgagggaaacagcaaatgtatgttaaaatgcttttccaagggaacaacacatccttacattatttaaaccaatctgcttcattttcagagctggttgatcagagtgagtcagaaggccccgtgatacaagaatcagctgaaccaagccagttggaagttccagccacagaagaaataaaagagactgatggaagctctcagatcaagcaagaaccagaccccacgtggtagacctcttccctcctaggcttaaagtatcagtggttgagaagagcttttcggacctgttactaccccaagctgtgtaatatacttgtataacagaaataccttctatacaaacctttttttctacttttagatagaaatgtctactttttcagcagttctgtgaattaaagagcagagtgactgtgggtctggaatggctggtgtacttgggaatgtactatcaggattttacagcaatgctgggaaatgacagggaaaatgacaggaatgaatctcaccagattttttatgtactcagcagagccttgagttacggtgtttattttccaatcaagtgaagatatctcctacttctcctactggaacatctcagcttctgcagtgaagaaaaattcctgtgatagttcagttctttagtttttctatttgaaaaaaaaaaatcatttaaatgatcctttgttcacggctctccttaatgactgagtgaacagttcctatctgtatatttgactaaaccttttcctaagctatctctcatggttcctatgtttttttatcataattaaaagcaaaaccatctggatcacctaacagtcagaggtcagtatctcagcgtgtgaattatagaggaaatacagagagaacctcttccacttttacttttcgtccaaataaaatgcatggtgtaccagaagttgaagatcgggttgaggattggggctagctcgatgacactaaggccccaacatcgcgggacctgctgtggcgcggattcttaggaacgctgttctagccggccccctctccaggggtcgccgtggccggcattatttcctagttcttcttgtaaccctgaggtgccagcgcggggagtgaggaggggtcagggggctaaggatgcaacctctgacgttctgcgccttcctaggagagtcttacatgtgttgagatttcacaagcaatgcgagttgtaaaataccagctctacaagaagctaggctctgtgacggcatagttttcagtagctttatcacaatattcacaatggagaattatatgacatggtagcagaaataggcccttttatgtgttgcttctattttacctcaaattgtagatatagggtaatcaataaaatccatccatgcctttcacacactaagt

SEQ ID NO: 5143 - protein, 564 aa, Homo sapiens; identical to SEQ ID NO: 4061

SEQ ID NO: 5144 - DNA, 4295 bp, Homo sapiens
gggtcttgttctgtctcccaagctggagtgcagtggtgtggtcataggtcactgcagcgtcgaactcctaggctcaagtgatcctcttgcctcaggctcctgagtagctgggacaacaggcgtgtaccacacctggatactttttaaatttttggtagagaagggatctcactctattgccaagctggtgtcgaactcttggtcttaagcagccctcccacgtcagcatcccaaagtgttgggatttcagagggatcatggcccaagttgcaatgtccaccctccccgttgaagatgaggagtcctcggagagcaggatggtggtgacattcctcatgtcagctctcgagtccatgtgtaaagaactggccaagtccaaagccgaagtggcctgcattgcagtgtatgaaacagacgtgtttgtcgtcggaactgaaagaggacgtgcttttgtcaataccagaaaggattttcaaaaagattttgtaaaatattgtgttgaagaagaagaaaaagctgcagagatgcataaaatgaaatctacaacccaggcaaatcggatgagtgtagatgctgtagaaattgaaacactcagaaaaacagttgaggactatttctgcttttgctatgggaaagctttaggcaaatccacagtggtacctgtaccatatgagaagatgctgcgagaccagtcggctgtggtagtgcaggggcttccggaaggtgttgcctttaaacaccccgagaactatgatcttgcaaccctgaaatggattttggagaacaaagcagggatttcattcatcattaagagaccttttttagagccaaagaagcatgtaggtggtcgtgtgatggtaacagatgctgacaggtcaatactatctccaggtggaagttgtggccccatcaaagtgaaaactgaacccacagaagattctggcatttccctggaaatggcagctgtgacagtaaaggaagaatcagaagatcctgattattatcaatataacattcaaggaagccaccattcttcagagggcaatgaaggcacagaaatggaagtaccagcagaagatgatgattattctccaccgtctaagagaccaaaggccaatgagctaccgcagccaccagtcccggaacccgccaatgctgggaagcggaaagtgagggagttcaacttcgagaaatggaatgctcgcatcactgatctacgtaaacaagttgaagaattgtttgaaaggaaatatgctcaagccataaaagccaaaggtccggtgacgatcccgtaccctcttttccagtctcatgttgaagatctttatgtagaaggacttcctgaaggaattccttttagaaggccatctacttacggaattcctcgcctggagaggatattacttgcaaaggaaaggattcgttttgtgattaagaaacatgagcttctgaattcaacacgtgaagatttacagcttgataagccagcttcaggagtaaaggaagaatggtatgccagaatcactaaattaagaaagatggtggatcagcttttctgcaaaaaatttgcggaagccttggggagcactgaagccaaggctgtaccgtaccaaaaatttgaggcacacccgaatgatctgtacgtggaaggactgccagaaaacattcctttccgaagtccctcatggtatggaatcccaaggctggaaaaaatcattcaagtgggcaatcgaattaaatttgttattaaaagaccagaacttctgactcacagtaccactgaagttactcagccaagaacgaatacaccagtcaaagaagattggaatgtcagaattaccaagctacggaagcaagtggaagagatttttaatttgaaatttgctcaagctcttggactcaccgaggcagtaaaagtaccatatcctgtgtttgaatcaaacccggagttcttgtatgtggaaggcttgccagaggggattcccttccgaagccctacctggtttggaattccacgacttgaaaggatcgtccgcgggagtaataaaatcaagttcgttgttaaaaaacctgaactagttatttcctacttgcctcctgggatggctagtaaaataaacactaaagctttgcagtcccccaaaagaccacgaagtcctgggagtaattcaaaggttcctgaaattgaggtcaccgtggaaggccctaataacaacaatcctcaaacctcagctgttcgaaccccgacccagactaacggttctaacgttcccttcaagccacgagggagagagttttcctttgaggcctggaatgccaaaatcacggacctaaaacagaaagttgaaaatctcttcaatgagaaatgtggggaagctcttggccttaaacaagctgtgaaggtgccgttcgcgttatttgagtctttcccggaagacttttatgtggaaggcttacctgagggtgtgccattccgaagaccatcgacttttggcattccgaggctggagaagatactcagaaacaaagccaaaattaagttcatcattaaaaagcccgaaatgtttgagacggcgattaaggagagcacctcctctaagagccctcccagaaaaataaattcatcacccaatgttaatactactgcatcaggtgttgaagaccttaacatcattcaggtgacaattccagatgatgataatgaaagactctcgaaagttgaaaaagctagacagctaagagaacaagtgaatgacctctttagtcggaaatttggtgaagctattggtatgggttttcctgtgaaagttccctacaggaaaatcacaattaaccctggctgtgtggtggttgatggcatgcccccgggggtgtccttcaaagcccccagctacctggaaatcagctccatgagaaggatcttagactctgccgagtttatcaaattcacggtcattagaccatttccaggacttgtgattaataaccagctggttgatcagagtgagtcagaaggccccgtgatacaagaatcagctgaaccaagccagttggaagttccagccacagaagaaataaaagagactgatggaagctctcagatcaagcaagaaccagaccccacgtggtagacctcttccctcctaggcttaaagtatcagtggttgagaagagcttttcggacctgttactaccccaagctgtgtaatatacttgtataacagaaataccttctatacaaacctttttttctacttttagatagaaatgtctactttttcagcagttctgtgaattaaagagcagagtgactgtgggtctggaatggctggtgtacttgggaatgtactatcaggattttacagcaatgctgggaaatgacagggaaaatgacaggaatgaatctcaccagattttttatgtactcagcagagccttgagttacggtgtttattttccaatcaagtgaagatatctcctacttctcctactggaacatctcagcttctgcagtgaagaaaaattcctgtgatagttcagttctttagtttttctatttgaaaaaaaaaaatcatttaaatgatcctttgttcacggctctccttaatgactgagtgaacagttcctatctgtatatttgactaaaccttttcctaagctatctctcatggttcctatgtttttttatcataattaaaagcaaaaccatctggatcacctaacagtcagaggtcagtatctcagcgtgtgaattatagaggaaatacagagagaacctcttccacttttacttttcgtccaaataaaatgcatggtgtaccagaagttgaagatcgggttgaggattggggctagctcgatgacactaaggccccaacatcgcgggacctgctgtggcgcggattcttaggaacgctgttctagccggccccctctccaggggtcgccgtggccggcattatttcctagttcttcttgtaaccctgaggtgccagcgcggggagtgaggaggggtcagggggctaaggatgcaacctctgacgttctgcgccttcctaggagagtcttacatgtgttgagatttcacaagcaatgcgagttgtaaaataccagctctacaagaagctaggctctgtgacggcatagttttcagtagctttatcacaatattcacaatggagaattatatgacatggtagcagaaataggcccttttatgtgttgcttctattttacctcaaattgtagatatagggtaatcaataaaatccatccatgcctttcacacactaagt

SEQ ID NO: 5145 - protein, 957 aa, Homo sapiens; identical to SEQ ID NO: 4303

SEQ ID NO: 5146 - DNA, 5038 bp, Homo sapiens
gggtcttgttctgtctcccaagctggagtgcagtggtgtggtcataggtcactgcagcgtcgaactcctaggctcaagtgatcctcttgcctcaggctcctgagtagctgggacaacaggcgtgtaccacacctggatactttttaaatttttggtagagaagggatctcactctattgccaagctggtgtcgaactcttggtcttaagcagccctcccacgtcagcatcccaaagtgttgggatttcagagggatcatggcccaagttgcaatgtccaccctccccgttgaagatgaggagtcctcggagagcaggatggtggtgacattcctcatgtcagctctcgagtccatgtgtaaagaactggccaagtccaaagccgaagtggcctgcattgcagtgtatgaaacagacgtgtttgtcgtcggaactgaaagaggacgtgcttttgtcaataccagaaaggattttcaaaaagattttgtaaaatattgtgttgaagaagaagaaaaagctgcagagatgcataaaatgaaatctacaacccaggcaaatcggatgagtgtagatgctgtagaaattgaaacactcagaaaaacagttgaggactatttctgcttttgctatgggaaagctttaggcaaatccacagtggtacctgtaccatatgagaagatgctgcgagaccagtcggctgtggtagtgcaggggcttccggaaggtgttgcctttaaacaccccgagaactatgatcttgcaaccctgaaatggattttggagaacaaagcagggatttcattcatcattaagagaccttttttagagccaaagaagcatgtaggtggtcgtgtgatggtaacagatgctgacaggtcaatactatctccaggtggaagttgtggccccatcaaagtgaaaactgaacccacagaagattctggcatttccctggaaatggcagctgtgacagtaaaggaagaatcagaagatcctgattattatcaatataacattcaagcaggcccttctgaaactgatgatgttgatgaaaaacagcccctatcgaagcctttgcaaggaagccaccattcttcagagggcaatgaaggcacagaaatggaagtaccagcagaagattctactcaacatgtcccttcagaaacaagtgaggaccctgaagttgaggtgactattgaagatgatgattattctccaccgtctaagagaccaaaggccaatgagctaccgcagccaccagtcccggaacccgccaatgctgggaagcggaaagtgagggagttcaacttcgagaaatggaatgctcgcatcactgatctacgtaaacaagttgaagaattgtttgaaaggaaatatgctcaagccataaaagccaaaggtccggtgacgatcccgtaccctcttttccagtctcatgttgaagatctttatgtagaaggacttcctgaaggaattccttttagaaggccatctacttacggaattcctcgcctggagaggatattacttgcaaaggaaaggattcgttttgtgattaagaaacatgagcttctgaattcaacacgtgaagatttacagcttgataagccagcttcaggagtaaaggaagaatggtatgccagaatcactaaattaagaaagatggtggatcagcttttctgcaaaaaatttgcggaagccttggggagcactgaagccaaggctgtaccgtaccaaaaatttgaggcacacccgaatgatctgtacgtggaaggactgccagaaaacattcctttccgaagtccctcatggtatggaatcccaaggctggaaaaaatcattcaagtgggcaatcgaattaaatttgttattaaaagaccagaacttctgactcacagtaccactgaagttactcagccaagaacgaatacaccagctcaagctcttggactcaccgaggcagtaaaagtaccatatcctgtgtttgaatcaaacccggagttcttgtatgtggaaggcttgccagaggggattcccttccgaagccctacctggtttggaattccacgacttgaaaggatcgtccgcgggagtaataaaatcaagttcgttgttaaaaaacctgaactagttatttcctacttgcctcctgggatggctagtaaaataaacactaaagctttgcagtcccccaaaagaccacgaagtcctgggagtaattcaaaggttcctgaaattgaggtcaccgtggaaggccctaataacaacaatcctcaaacctcagctgttcgaaccccgacccagactaacggttctaacgttcccttcaagccacgagggagagagttttcctttgaggcctggaatgccaaaatcacggacctaaaacagaaagttgaaaatctcttcaatgagaaatgtggggaagctcttggccttaaacaagctgtgaaggtgccgttcgcgttatttgagtctttcccggaagacttttatgtggaaggcttacctgagggtgtgccattccgaagaccatcgacttttggcattccgaggctggagaagatactcagaaacaaagccaaaattaagttcatcattaaaaagcccgaaatgtttgagacggcgattaaggagagcacctcctctaagagccctcccagaaaaataaattcatcacccaatgttaatactactgcatcaggtgttgaagaccttaacatcattcaggtgacaattccagatgatgataatgaaagactctcgaaagttgaaaaagctagacagctaagagaacaagtgaatgacctctttagtcggaaatttggtgaagctattggtatgggttttcctgtgaaagttccctacaggaaaatcacaattaaccctggctgtgtggtggttgatggcatgcccccgggggtgtccttcaaagcccccagctacctggaaatcagctccatgagaaggatcttagactctgccgagtttatcaaattcacggtcattagaccatttccaggacttgtgattaataaccagctggttgatcagagtgagtcagaaggccccgtgatacaagaatcagctgaaccaagccagttggaagttccagccacagaagaaataaaagagactgatggaagctctcagatcaagcaagaaccagaccccacgtggtagacctcttccctcctagggtaaatcagcttctgtgtcagggatgctgtgtggtgtccatctgaaccccctgcatacgcgtagctaatgtgatctccccactttcacataagatggtggccctgccttcagggaatgtgggagccaggtgggagccttcccggatatttaagctagaagattctacagggagattctccttggatcaatatatgtctctcagtcaaagatgtaaaagcacttttgccttaaaaagaatgttctgtttctaaatagagtcaacgttgtcctcctcattggaattcactatgagtcagaatcattagactgacttttttttttccatagtaatagtattttgcagagtctcacagagctgcagatcttttgttcatcttgcagagttaacaagtctgatcctgttagtccagatttcttaaatttggccaagttataataggagcagtagcttgagacccgaagtcaggaaactttgacaatggatttttttttttaatccagagacttgtactggaatttgccttaccctgtcagctcatggacttaaggtttcatcccgctttatgagtgcttctgaatccaagtcattgttacctgaatttgcaaattaagttgtgatattcgtgactgttaaattcctgtaattagattaacctctttgcttgcttgtttgttttctctcctattttagcttaaagtatcagtggttgagaagagcttttcggacctgttactaccccaagctgtgtaatatacttgtataacagaaataccttctatacaaacctttttttctacttttagatagaaatgtctactttttcagcagttctgtgaattaaagagcagagtgactgtgggtctggaatggctggtgtacttgggaatgtactatcaggattttacagcaatgctgggaaatgacagggaaaatgacaggaatgaatctcaccagattttttatgtactcagcagagccttgagttacggtgtttattttccaatcaagtgaagatatctcctacttctcctactggaacatctcagcttctgcagtgaagaaaaattcctgtgatagttcagttctttagtttttctatttgaaaaaaaaaaatcatttaaatgatcctttgttcacggctctccttaatgactgagtgaacagttcctatctgtatatttgactaaaccttttcctaagctatctctcatggttcctatgtttttttatcataattaaaagcaaaaccatctggatcacctaacagtcagaggtcagtatctcagcgtgtgaattatagaggaaatacagagagaacctcttccacttttacttttcgtccaaataaaatgcatggtgtaccagaagttgaagatcgggttgaggattggggctagctcgatgacactaaggccccaacatcgcgggacctgctgtggcgcggattcttaggaacgctgttctagccggccccctctccaggggtcgccgtggccggcattatttcctagttcttcttgtaaccctgaggtgccagcgcggggagtgaggaggggtcagggggctaaggatgcaacctctgacgttctgcgccttcctaggagagtcttacatgtgttgagatttcacaagcaatgcgagttgtaaaataccagctctacaagaagctaggctctgtgacggcatagttttcagtagctttatcacaatattcacaatggagaattatatgacatggtagcagaaataggcccttttatgtgttgcttctattttacctcaaattgtagatatagggtaatcaataaaatccatccatgcctttcacacactaagt

SEQ ID NO: 5147 - protein, 974 aa, Homo sapiens; identical to SEQ ID NO: 4101

SEQ ID NO: 5148 - DNA, 4905 bp, Homo sapiens
gggtcttgttctgtctcccaagctggagtgcagtggtgtggtcataggtcactgcagcgtcgaactcctaggctcaagtgatcctcttgcctcaggctcctgagtagctgggacaacaggcgtgtaccacacctggatactttttaaatttttggtagagaagggatctcactctattgccaagctggtgtcgaactcttggtcttaagcagccctcccacgtcagcatcccaaagtgttgggatttcagagggatcatggcccaagttgcaatgtccaccctccccgttgaagatgaggagtcctcggagagcaggatggtggtgacattcctcatgtcagctctcgagtccatgtgtaaagaactggccaagtccaaagccgaagtggcctgcattgcagtgtatgaaacagacgtgtttgtcgtcggaactgaaagaggacgtgcttttgtcaataccagaaaggattttcaaaaagattttgtaaaatattgtgttgaagaagaagaaaaagctgcagagatgcataaaatgaaatctacaacccaggcaaatcggatgagtgtagatgctgtagaaattgaaacactcagaaaaacagttgaggactatttctgcttttgctatgggaaagctttaggcaaatccacagtggtacctgtaccatatgagaagatgctgcgagaccagtcggctgtggtagtgcaggggcttccggaaggtgttgcctttaaacaccccgagaactatgatcttgcaaccctgaaatggattttggagaacaaagcagggatttcattcatcattaagagaccttttttagagccaaagaagcatgtaggtggtcgtgtgatggtaacagatgctgacaggtcaatactatctccaggtggaagttgtggccccatcaaagtgaaaactgaacccacagaagattctggaagccaccattcttcagagggcaatgaaggcacagaaatggaagtaccagcagaagattctactcaacatgtcccttcagaaacaagtgaggaccctgaagttgaggtgactattgaagatgatgattattctccaccgtctaagagaccaaaggccaatgagctaccgcagccaccagtcccggaacccgccaatgctgggaagcggaaagtgagggagttcaacttcgagaaatggaatgctcgcatcactgatctacgtaaacaagttgaagaattgtttgaaaggaaatatgctcaagccataaaagccaaaggtccggtgacgatcccgtaccctcttttccagtctcatgttgaagatctttatgtagaaggacttcctgaaggaattccttttagaaggccatctacttacggaattcctcgcctggagaggatattacttgcaaaggaaaggattcgttttgtgattaagaaacatgagcttctgaattcaacacgtgaagatttacagcttgataagccagcttcaggagtaaaggaagaatggtatgccagaatcactaaattaagaaagatggtggatcagcttttctgcaaaaaatttgcggaagccttggggagcactgaagccaaggctgtaccgtaccaaaaatttgaggcacacccgaatgatctgtacgtggaaggactgccagaaaacattcctttccgaagtccctcatggtatggaatcccaaggctggaaaaaatcattcaagtgggcaatcgaattaaatttgttattaaaagaccagaacttctgactcacagtaccactgaagttactcagccaagaacgaatacaccagtcaaagaagattggaatgtcagaattaccaagctacggaagcaagtggaagagatttttaatttgaaatttgctcaagctcttggactcaccgaggcagtaaaagtaccatatcctgtgtttgaatcaaacccggagttcttgaaaggatcgtccgcgggagtaataaaatcaagttcgttgttaaaaaacctgaactagttatttcctacttgcctcctgggatggctagtaaaataaacactaaagctttgcagtcccccaaaagaccacgaagtcctgggagtaattcaaaggttcctgaaattgaggtcaccgtggaaggccctaataacaacaatcctcaaacctcagctgttcgaaccccgacccagactaacggttctaacgttcccttcaagccacgagggagagagttttcctttgaggcctggaatgccaaaatcacggacctaaaacagaaagttgaaaatctcttcaatgagaaatgtggggaagctcttggccttaaacaagctgtgaaggtgccgttcgcgttatttgagtctttcccggaagacttttatgtggaaggcttacctgagggtgtgccattccgaagaccatcgacttttggcattccgaggctggagaagatactcagaaacaaagccaaaattaagttcatcattaaaaagcccgaaatgtttgagacggcgattaaggagagcacctcctctaagagccctcccagaaaaataaattcatcacccaatgttaatactactgcatcaggtgttgaagaccttaacatcattcaggtgacaattccagatgatgataatgaaagactctcgaaagttgaaaaagctagacagctaagagaacaagtgaatgacctctttagtcggaaatttggtgaagctattggtatgggttttcctgtgaaagttccctacaggaaaatcacaattaaccctggctgtgtggtggttgatggcatgcccccgggggtgtccttcaaagcccccagctacctggaaatcagctccatgagaaggatcttagactctgccgagtttatcaaattcacggtcattagaccatttccaggacttgtgattaataaccagctggttgatcagagtgagtcagaaggccccgtgatacaagaatcagctgaaccaagccagttggaagttccagccacagaagaaataaaagagactgatggaagctctcagatcaagcaagaaccagaccccacgtggtagacctcttccctcctagggtaaatcagcttctgtgtcagggatgctgtgtggtgtccatctgaaccccctgcatacgcgtagctaatgtgatctccccactttcacataagatggtggccctgccttcagggaatgtgggagccaggtgggagccttcccggatatttaagctagaagattctacagggagattctccttggatcaatatatgtctctcagtcaaagatgtaaaagcacttttgccttaaaaagaatgttctgtttctaaatagagtcaacgttgtcctcctcattggaattcactatgagtcagaatcattagactgacttttttttttccatagtaatagtattttgcagagtctcacagagctgcagatcttttgttcatcttgcagagttaacaagtctgatcctgttagtccagatttcttaaatttggccaagttataataggagcagtagcttgagacccgaagtcaggaaactttgacaatggatttttttttttaatccagagacttgtactggaatttgccttaccctgtcagctcatggacttaaggtttcatcccgctttatgagtgcttctgaatccaagtcattgttacctgaatttgcaaattaagttgtgatattcgtgactgttaaattcctgtaattagattaacctctttgcttgcttgtttgttttctctcctattttagcttaaagtatcagtggttgagaagagcttttcggacctgttactaccccaagctgtgtaatatacttgtataacagaaataccttctatacaaacctttttttctacttttagatagaaatgtctactttttcagcagttctgtgaattaaagagcagagtgactgtgggtctggaatggctggtgtacttgggaatgtactatcaggattttacagcaatgctgggaaatgacagggaaaatgacaggaatgaatctcaccagattttttatgtactcagcagagccttgagttacggtgtttattttccaatcaagtgaagatatctcctacttctcctactggaacatctcagcttctgcagtgaagaaaaattcctgtgatagttcagttctttagtttttctatttgaaaaaaaaaaatcatttaaatgatcctttgttcacggctctccttaatgactgagtgaacagttcctatctgtatatttgactaaaccttttcctaagctatctctcatggttcctatgtttttttatcataattaaaagcaaaaccatctggatcacctaacagtcagaggtcagtatctcagcgtgtgaattatagaggaaatacagagagaacctcttccacttttacttttcgtccaaataaaatgcatggtgtaccagaagttgaagatcgggttgaggattggggctagctcgatgacactaaggccccaacatcgcgggacctgctgtggcgcggattcttaggaacgctgttctagccggccccctctccaggggtcgccgtggccggcattatttcctagttcttcttgtaaccctgaggtgccagcgcggggagtgaggaggggtcagggggctaaggatgcaacctctgacgttctgcgccttcctaggagagtcttacatgtgttgagatttcacaagcaatgcgagttgtaaaataccagctctacaagaagctaggctctgtgacggcatagttttcagtagctttatcacaatattcacaatggagaattatatgacatggtagcagaaataggcccttttatgtgttgcttctattttacctcaaattgtagatatagggtaatcaataaaatccatccatgcctttcacacactaagt

SEQ ID NO: 5149 - protein, 579 aa, Homo sapiens; identical to SEQ ID NO: 4111

SEQ ID NO: 5150 - DNA, 3728 bp, Homo sapiens
gggtcttgttctgtctcccaagctggagtgcagtggtgtggtcataggtcactgcagcgtcgaactcctaggctcaagtgatcctcttgcctcaggctcctgagtagctgggacaacaggcgtgtaccacacctggatactttttaaatttttggtagagaagggatctcactctattgccaagctggtgtcgaactcttggtcttaagcagccctcccacgtcagcatcccaaagtgttgggatttcagagggatcatggcccaagttgcaatgtccaccctccccgttgaagatgaggagtcctcggagagcaggatggtggtgacattcctcatgtcagctctcgagtccatgtgtaaagaactggccaagtccaaagccgaagtggcctgcattgcagtgtatgaaacagacgtgtttgtcgtcggaactgaaagaggacgtgcttttgtcaataccagaaaggattttcaaaaagattttgtaaaatattgtgttgaagaagaagaaaaagctgcagagatgcataaaatgaaatctacaacccaggcaaatcggatgagtgtagatgctgtagaaattgaaacactcagaaaaacagttgaggactatttctgcttttgctatgggaaagctttaggcaaatccacagtggtacctgtaccatatgagaagatgctgcgagaccagtcggctgtggtagtgcaggggcttccggaaggtgttgcctttaaacaccccgagaactatgatcttgcaaccctgaaatggattttggagaacaaagcagggatttcattcatcattaagagaccttttttagagccaaagaagcatgtaggtggtcgtgtgatggtaacagatgctgacaggtcaatactatctccaggtggaagttgtggccccatcaaagtgaaaactgaacccacagaagattctggaagccaccattcttcagagggcaatgaaggcacagaaatggaagtaccagcagaagattctactcaacatgtcccttcagaaacaagtgaggaccctgaagttgaggtgactattgaagatgatgattattctccaccgtctaagagaccaaaggccaatgagctaccgcagccaccagtcccggaacccgccaatgctgggaagcggaaagtgagggagttcaacttcgagaaatggaatgctcgcatcactgatctacgtaaacaagttgaagaattgtttgaaaggaaatatgctcaagccataaaagccaaaggtccggtgacgatcccgtaccctcttttccagtctcatgttgaagatctttatgtagaaggacttcctgaaggaattccttttagaaggccatctacttacggaattcctcgcctggagaggatattacttgcaaaggaaaggattcgttttgtgattaagaaacatgagcttctgaattcaacacgtgaagatttacagcttgataagccagcttcaggagtaaaggaagaatggtatgccagaatcactaaattaagaaagatggtggatcagcttttctgcaaaaaatttgcggaagccttggggagcactgaagccaaggctgtaccgtaccaaaaatttgaggcacacccgaatgatctgtacgtggaaggactgccagaaaacattcctttccgaagtccctcatggtatggaatcccaaggctggaaaaaatcattcaagtgggcaatcgaattaaatttgttattaaaagaccagaacttctgactcacagtaccactgaagttactcagccaagaacgaatacaccagtcaaagaagattggaatgtcagaattaccaagctacggaagcaagtggaagagatttttaatttgaaatttgctcaagctcttggactcaccgaggcagtaaaagtaccatatcctgtgtttgaatcaaacccggagttcttgtatgtggaaggcttgccagaggggattcccttccgaagccctacctggtttggaattccacgacttgaaaggatcgtccgcgggagtaataaaatcaagttcgttgttaaaaaacctgaactagttatttcctacttgcctcctgggatggctagtaaaataaacactaaagctttgcagtcccccaaaagaccacgaagtcctgggagtaattcaaaggttcctgaaattgaggtcaccgtggaaggccctaataacaacaatcctcaaacctcagctgttcgaaccccgacccagactaacggttctaacgttcccttcaagccacgagggagagagttttcctttgaggcctggaatgccaaaatcacggacctaaaacagaaagttgaaaatctcttcaatgagaaatgtggggaagctcttggccttaaacaagctgtgaaggtgccgttcgcgttatttgagtctttcccggaagacttttatgtggaaggcttacctgagggtgtgccattccgaagaccatcgacttttggcattccgaggctggagaagatactcagaaacaaagccaaaattaagttcatcattaaaaagcccgaaatgtttgagacggcgattaaggagagcacctcctctaagagccctcccagaaaaataaattcatcacccaatgttaatactactgcatcaggtgttgaagaccttaacatcattcaggtgacaattccagatgatgataatgaaagactctcgaaagttgaaaaagctagacagctaagagaacaagtgaatgacctctttagtcggaaatttggtgaagctattggtatgggttttcctgtgaaagttccctacaggaaaatcacaattaaccctggctgtgtggtggttgatggcatgcccccgggggtgtccttcaaagcccccagctacctggaaatcagctccatgagaaggatcttagactctgccgagtttatcaaattcacggtcattagaccatttccaggacttgtgattaataaccagctggttgatcagagtgagtcagaaggccccgtgatacaagaatcagctgaaccaagccagttggaagttccagccacagaagaaataaaagagactgatggaagctctcagatcaagcaagaaccagaccccacgtggtagacctcttccctcctaggcaaaaccatctggatcacctaacagtcagaggtcagtatctcagcgtgtgaattatagaggaaatacagagagaacctcttccacttttacttttcgtccaaataaaatgcatggtgtaccagaagttgaagatcgggttgaggattggggctagctcgatgacactaaggccccaacatcgcgggacctgctgtggcgcggattcttaggaacgctgttctagccggccccctctccaggggtcgccgtggccggcattatttcctagttcttcttgtaaccctgaggtgccagcgcggggagtgaggaggggtcagggggctaaggatgcaacctctgacgttctgcgccttcctaggagagtcttacatgtgttgagatttcacaagcaatgcgagttgtaaaataccagctctacaagaagctaggctctgtgacggcatagttttcagtagctttatcacaatattcacaatggagaattatatgacatggtagcagaaataggcccttttatgtgttgcttctattttacctcaaattgtagatatagggtaatcaataaaatccatccatgcctttcacacactaagt

SEQ ID NO: 5151 - protein, 952 aa, Homo sapiens; identical to SEQ ID NO: 4069

SEQ ID NO: 5152 - DNA, 4280 bp, Homo sapiens
gggtcttgttctgtctcccaagctggagtgcagtggtgtggtcataggtcactgcagcgtcgaactcctaggctcaagtgatcctcttgcctcaggctcctgagtagctgggacaacaggcgtgtaccacacctggatactttttaaatttttggtagagaagggatctcactctattgccaagctggtgtcgaactcttggtcttaagcagccctcccacgtcagcatcccaaagtgttgggatttcagagggatcatggcccaagttgcaatgtccaccctccccgttgaagatgaggagtcctcggagagcaggatggtggtgacattcctcatgtcagctctcgagtccatgtgtaaagaactggccaagtccaaagccgaagtggcctgcattgcagtgtatgaaacagacgtgtttgtcgtcggaactgaaagaggacgtgcttttgtcaataccagaaaggattttcaaaaagattttgtaaaatattgtgttgaagaagaagaaaaagctgcagagatgcataaaatgaaatctacaacccaggcaaatcggatgagtgtagatgctgtagaaattgaaacactcagaaaaacagttgaggactatttctgcttttgctatgggaaagctttaggcaaatccacagtggtacctgtaccatatgagaagatgctgcgagaccagtcggctgtggtagtgcaggggcttccggaaggtgttgcctttaaacaccccgagaactatgatcttgcaaccctgaaatggattttggagaacaaagcagggatttcattcatcattaagagaccttttttagagccaaagaagcatgtaggtggtcgtgtgatggtaacagatgctgacaggtcaatactatctccaggtggaagttgtggccccatcaaagtgaaaactgaacccacagaagattctggaagccaccattcttcagagggcaatgaaggcacagaaatggaagtaccagcagaagattctactcaacatgtcccttcagaaacaagtgaggaccctgaagttgaggtgactattgaagatgatgattattctccaccgtctaagagaccaaaggccaatgagctaccgcagccaccagtcccggaacccgccaatgctgggaagcggaaagtgagggagttcaacttcgagaaatggaatgctcgcatcactgatctacgtaaacaagttgaagaattgtttgaaaggaaatatgctcaagccataaaagccaaaggtccggtgacgatcccgtaccctcttttccagtctcatgttgaagatctttatgtagaaggacttcctgaaggaattccttttagaaggccatctacttacggaattcctcgcctggagaggatattacttgcaaaggaaaggattcgttttgtgattaagaaacatgagcttctgaattcaacacgtgaagatttacagcttgataagccagcttcaggagtaaaggaagaatggtatgccagaatcactaaattaagaaagatggtggatcagcttttctgcaaaaaatttgcggaagccttggggagcactgaagccaaggctgtaccgtaccaaaaatttgaggcacacccgaatgatctgtacgtggaaggactgccagaaaacattcctttccgaagtccctcatggtatggaatcccaaggctggaaaaaatcattcaagtgggcaatcgaattaaatttgttattaaaagaccagaacttctgactcacagtaccactgaagttactcagccaagaacgaatacaccagtcaaagaagattggaatgtcagaattaccaagctacggaagcaagtggaagagatttttaatttgaaatttgctcaagctcttggactcaccgaggcagtaaaagtaccatatcctgtgtttgaatcaaacccggagttcttgtatgtggaaggcttgccagaggggattcccttccgaagccctacctggtttggaattccacgacttgaaaggatcgtccgcgggagtaataaaatcaagttcgttgttaaaaaacctgaactagttatttcctacttgcctcctgggatggctagtaaaataaacactaaagctttgcagtcccccaaaagaccacgaagtcctgggagtaattcaaaggttcctgaaattgaggtcaccgtggaaggccctaataacaacaatcctcaaacctcagctgttcgaaccccgacccagactaacggttctaacgttcccttcaagccacgagggagagagttttcctttgaggcctggaatgccaaaatcacggacctaaaacagaaagttgaaaatctcttcaatgagaaatgtggggaagctcttggccttaaacaagctgtgaaggtgccgttcgcgttatttgagtctttcccggaagacttttatgtggaaggcttacctgagggtgtgccattccgaagaccatcgacttttggcattccgaggctggagaagatactcagaaacaaagccaaaattaagttcatcattaaaaagcccgaaatgtttgagacggcgattaaggagagcacctcctctaagagccctcccagaaaaataaattcatcacccaatgttaatactactgcatcaggtgttgaagaccttaacatcattcaggtgacaattccagatgatgataatgaaagactctcgaaagttgaaaaagctagacagctaagagaacaagtgaatgacctctttagtcggaaatttggtgaagctattggtatgggttttcctgtgaaagttccctacaggaaaatcacaattaaccctggctgtgtggtggttgatggcatgcccccgggggtgtccttcaaagcccccagctacctggaaatcagctccatgagaaggatcttagactctgccgagtttatcaaattcacggtcattagaccatttccaggacttgtgattaataaccagctggttgatcagagtgagtcagaaggccccgtgatacaagaatcagctgaaccaagccagttggaagttccagccacagaagaaataaaagagactgatggaagctctcagatcaagcaagaaccagaccccacgtggtagacctcttccctcctaggcttaaagtatcagtggttgagaagagcttttcggacctgttactaccccaagctgtgtaatatacttgtataacagaaataccttctatacaaacctttttttctacttttagatagaaatgtctactttttcagcagttctgtgaattaaagagcagagtgactgtgggtctggaatggctggtgtacttgggaatgtactatcaggattttacagcaatgctgggaaatgacagggaaaatgacaggaatgaatctcaccagattttttatgtactcagcagagccttgagttacggtgtttattttccaatcaagtgaagatatctcctacttctcctactggaacatctcagcttctgcagtgaagaaaaattcctgtgatagttcagttctttagtttttctatttgaaaaaaaaaaatcatttaaatgatcctttgttcacggctctccttaatgactgagtgaacagttcctatctgtatatttgactaaaccttttcctaagctatctctcatggttcctatgtttttttatcataattaaaagcaaaaccatctggatcacctaacagtcagaggtcagtatctcagcgtgtgaattatagaggaaatacagagagaacctcttccacttttacttttcgtccaaataaaatgcatggtgtaccagaagttgaagatcgggttgaggattggggctagctcgatgacactaaggccccaacatcgcgggacctgctgtggcgcggattcttaggaacgctgttctagccggccccctctccaggggtcgccgtggccggcattatttcctagttcttcttgtaaccctgaggtgccagcgcggggagtgaggaggggtcagggggctaaggatgcaacctctgacgttctgcgccttcctaggagagtcttacatgtgttgagatttcacaagcaatgcgagttgtaaaataccagctctacaagaagctaggctctgtgacggcatagttttcagtagctttatcacaatattcacaatggagaattatatgacatggtagcagaaataggcccttttatgtgttgcttctattttacctcaaattgtagatatagggtaatcaataaaatccatccatgcctttcacacactaagt

SEQ ID NO: 5153 - protein, 952 aa, Homo sapiens; identical to SEQ ID NO: 4069

SEQ ID NO: 5154 - DNA, 6974 bp, Homo sapiens
gggtcttgttctgtctcccaagctggagtgcagtggtgtggtcataggtcactgcagcgtcgaactcctaggctcaagtgatcctcttgcctcaggctcctgagtagctgggacaacaggcgtgtaccacacctggatactttttaaatttttggtagagaagggatctcactctattgccaagctggtgtcgaactcttggtcttaagcagccctcccacgtcagcatcccaaagtgttgggatttcagagggatcatggcccaagttgcaatgtccaccctccccgttgaagatgaggagtcctcggagagcaggatggtggtgacattcctcatgtcagctctcgagtccatgtgtaaagaactggccaagtccaaagccgaagtggcctgcattgcagtgtatgaaacagacgtgtttgtcgtcggaactgaaagaggacgtgcttttgtcaataccagaaaggattttcaaaaagattttgtaaaatattgtgttgaagaagaagaaaaagctgcagagatgcataaaatgaaatctacaacccaggcaaatcggatgagtgtagatgctgtagaaattgaaacactcagaaaaacagttgaggactatttctgcttttgctatgggaaagctttaggcaaatccacagtggtacctgtaccatatgagaagatgctgcgagaccagtcggctgtggtagtgcaggggcttccggaaggtgttgcctttaaacaccccgagaactatgatcttgcaaccctgaaatggattttggagaacaaagcagggatttcattcatcattaagagaccttttttagagccaaagaagcatgtaggtggtcgtgtgatggtaacagatgctgacaggtcaatactatctccaggtggaagttgtggccccatcaaagtgaaaactgaacccacagaagattctggaagccaccattcttcagagggcaatgaaggcacagaaatggaagtaccagcagaagattctactcaacatgtcccttcagaaacaagtgaggaccctgaagttgaggtgactattgaagatgatgattattctccaccgtctaagagaccaaaggccaatgagctaccgcagccaccagtcccggaacccgccaatgctgggaagcggaaagtgagggagttcaacttcgagaaatggaatgctcgcatcactgatctacgtaaacaagttgaagaattgtttgaaaggaaatatgctcaagccataaaagccaaaggtccggtgacgatcccgtaccctcttttccagtctcatgttgaagatctttatgtagaaggacttcctgaaggaattccttttagaaggccatctacttacggaattcctcgcctggagaggatattacttgcaaaggaaaggattcgttttgtgattaagaaacatgagcttctgaattcaacacgtgaagatttacagcttgataagccagcttcaggagtaaaggaagaatggtatgccagaatcactaaattaagaaagatggtggatcagcttttctgcaaaaaatttgcggaagccttggggagcactgaagccaaggctgtaccgtaccaaaaatttgaggcacacccgaatgatctgtacgtggaaggactgccagaaaacattcctttccgaagtccctcatggtatggaatcccaaggctggaaaaaatcattcaagtgggcaatcgaattaaatttgttattaaaagaccagaacttctgactcacagtaccactgaagttactcagccaagaacgaatacaccagtcaaagaagattggaatgtcagaattaccaagctacggaagcaagtggaagagatttttaatttgaaatttgctcaagctcttggactcaccgaggcagtaaaagtaccatatcctgtgtttgaatcaaacccggagttcttgaaaggatcgtccgcgggagtaataaaatcaagttcgttgttaaaaaacctgaactagttatttcctacttgcctcctgggatggctagtaaaataaacactaaagctttgcagtcccccaaaagaccacgaagtcctgggagtaattcaaaggttcctgaaattgaggtcaccgtggaaggccctaataacaacaatcctcaaacctcagctgttcgaaccccgacccagactaacggttctaacgttcccttcaagccacgagggagagagttttcctttgaggcctggaatgccaaaatcacggacctaaaacagaaagttgaaaatctcttcaatgagaaatgtggggaagctcttggccttaaacaagctgtgaaggtgccgttcgcgttatttgagtctttcccggaagacttttatgtggaaggcttacctgagggtgtgccattccgaagaccatcgacttttggcattccgaggctggagaagatactcagaaacaaagccaaaattaagttcatcattaaaaagcccgaaatgtttgagacggcgattaaggagagcacctcctctaagagccctcccagaaaaataaattcatcacccaatgttaatactactgcatcaggtgttgaagaccttaacatcattcaggtgacaattccagatgatgataatgaaagactctcgaaagttgaaaaagctagacagctaagagaacaagtgaatgacctctttagtcggaaatttggtgaagctattggtatgggttttcctgtgaaagttccctacaggaaaatcacaattaaccctggctgtgtggtggttgatggcatgcccccgggggtgtccttcaaagcccccagctacctggaaatcagctccatgagaaggatcttagactctgccgagtttatcaaattcacggtcattaggtaagtgagagtttcctgcttagtcacaggagcgaatctggagctcatgaggctgactcttctaaaatgcagccacaggtagtcatcgaatccggcttcctatgctgtgcaatcaacaaatcaaaataacttgtgtcatcattagaatgtcagatgtgcttctacgaactaagctgactcttttaattctttggcaaagggttggcaaactaggactgtttgccaaattcaggctgcctcctatttttagagtcttcctgaaacacagctacacccgtattatccatggctgctttcctgtcacagtgagtaagtagctgggactgagaaggcatggcctccaaagtctaaaatatttactctctagcactttgtagaaaaaccttagctaggcacagtggctaacgcctgtaatcccagcattttgggaggccaaggcaggcagatcacctgaggtcaggagttccagaccagcctggccaacatggtgaaatcccatctctacaaaaataaaacagttagctgggcatgatggcgggtgcctgtaatcccagctactcgggaggctgaggcaggatagtcgcttgaacccaggaggtggaggttgcaatgagccaagatcatgccactgcactccagcctggacgacagagtgagactccatcacaagaaaaaaagaactttgtcaacctctgtcttagggcgccttgtcacaggcttcgggtcagacggattcaaccttgcatcagccatttgttagccaggtcactctgttctttgtctgtaaatgagattgatcgttgttcccactgagagtgtcagctccttcccgtagagcaggcatgatgattgtactcacctctgacaccattgtgagtgccacattccttcccacgtccttgtcactgtaagagatgcccacctgagcaccaaccccaggttatcttcccctttgtcttccagccccccagaaacagctacgactcaacctacccaatcatttcatcatcagattgccactgtctctagttcaggtctcttgggactggcactcagaaatctcataataaatcctcttgaggcttctcatacactcgtcttcttccaatcttctttccctcaaaatctcatattttggttccacttcacccaccgtcattctccatatcactcccaggagttaggcaaaaagccccttccgttcttccgtatgttaaacttagaatcactctgttccctgctctgcgtttctattttttgtttttcctccatttactagtagcttaacactttctaacagtgttcttattattgatacgtatctatctcttccataagcttataaggtcacggataatacttctcattgtagtacgtaaatgacgtgggctagatatgagttgaataaacagttatacctgtaaattcttacagagtgaaaataaattgttatactttacaatttgtttctctctttagaccatttccaggacttgtgattaataaccgtgagtattttgtgaagtgttttgtttttgttttttcctggggtctgacgtgtgtgcgtgtgagtgtgtatacatgcttaacgtatatcacgttacttcacctatgtcagtaaccaggccaaatacttgttttagccctcagtaaaaacaccaggcacttcctagttgtaaaattattcaagcttcttaacttcctatcctcgatgcacttaatcataaaatggtaataatagcaccgattttgggggagtcgttccagtagatggaaagcatctggaacaggtgtcagcaagctcctgccgacgtgtatgcataaagttttattgaaaccaccatcgtgtccatttgtttatggcagaactgagagatggcagcagcaagtgtgtgcctgcaaaacctaaaatatttactaattggctctgcaagaaaagagtttgcatccccctaacctagaacagtgtctagcctctagtatgtgtttagcctacagtatgtgctcagcgaatacaatctatatttattactgcttttatgactgttataattactgtgcttggatttcgttacaaagtaagtcacaatgtgcctgcttctgttagtatttcagcacagtgcctggcacacatggggctctcaaatattgctgagcgagtgaacaaatgtcctttcaattccttaacgttgatgtcattttcaatagtattttgagccaaacttaattttgcgagtgtgttttgttttcttaactttattattaaaaatgtataaaagtgaggccaggcgtggtggctcacgcctgtaatcccagcagtttgggaggctgaggcaggcggatcagttgaggttgggagttggagaccagcccgtccaacatggtgaaagcctgtctctactaaaaatacaaaaatcagctgggtgtggtggcgcgtgcctgtaatcccagctactcaggaggctgaggcaggagagttgcttgaatcctagaggtggaggttgcagtgagctgagatcgtgccattgcactccagcctgggcaacaagagcaaaactctgtcccaataaataaataaataaaatgttctcttttgttcctgttcttgtgcggtagtgtggtatagagttttatggtaattactgtgaattagtgattctgagggacatatcagaactctgaggtttgtttccttctcatcttgagggaaacagcaaatgtatgttaaaatgcttttccaagggaacaacacatccttacattatttaaaccaatctgcttcattttcagagctggttgatcagagtgagtcagaaggccccgtgatacaagaatcagctgaaccaagccagttggaagttccagccacagaagaaataaaagagactgatggaagctctcagatcaagcaagaaccagaccccacgtggtagacctcttccctcctaggcttaaagtatcagtggttgagaagagcttttcggacctgttactaccccaagctgtgtaatatacttgtataacagaaataccttctatacaaacctttttttctacttttagatagaaatgtctactttttcagcagttctgtgaattaaagagcagagtgactgtgggtctggaatggctggtgtacttgggaatgtactatcaggattttacagcaatgctgggaaatgacagggaaaatgacaggaatgaatctcaccagattttttatgtactcagcagagccttgagttacggtgtttattttccaatcaagtgaagatatctcctacttctcctactggaacatctcagcttctgcagtgaagaaaaattcctgtgatagttcagttctttagtttttctatttgaaaaaaaaaaatcatttaaatgatcctttgttcacggctctccttaatgactgagtgaacagttcctatctgtatatttgactaaaccttttcctaagctatctctcatggttcctatgtttttttatcataattaaaagcaaaaccatctggatcacctaacagtcagaggtcagtatctcagcgtgtgaattatagaggaaatacagagagaacctcttccacttttacttttcgtccaaataaaatgcatggtgtaccagaagttgaagatcgggttgaggattggggctagctcgatgacactaaggccccaacatcgcgggacctgctgtggcgcggattcttaggaacgctgttctagccggccccctctccaggggtcgccgtggccggcattatttcctagttcttcttgtaaccctgaggtgccagcgcggggagtgaggaggggtcagggggctaaggatgcaacctctgacgttctgcgccttcctaggagagtcttacatgtgttgagatttcacaagcaatgcgagttgtaaaataccagctctacaagaagctaggctctgtgacggcatagttttcagtagctttatcacaatattcacaatggagaattatatgacatggtagcagaaataggcccttttatgtgttgcttctattttacctcaaattgtagatatagggtaatcaataaaatccatccatgcctttcacacactaagt

SEQ ID NO: 5155 - protein, 579 aa, Homo sapiens; identical to SEQ ID NO: 4111

SEQ ID NO: 5156 - DNA, 4002 bp, Homo sapiens
gggtcttgttctgtctcccaagctggagtgcagtggtgtggtcataggtcactgcagcgtcgaactcctaggctcaagtgatcctcttgcctcaggctcctgagtagctgggacaacaggcgtgtaccacacctggatactttttaaatttttggtagagaagggatctcactctattgccaagctggtgtcgaactcttggtcttaagcagccctcccacgtcagcatcccaaagtgttgggatttcagagggatcatggcccaagttgcaatgtccaccctccccgttgaagatgaggagtcctcggagagcaggatggtggtgacattcctcatgtcagctctcgagtccatgtgtaaagaactggccaagtccaaagccgaagtggcctgcattgcagtgtatgaaacagacgtgtttgtcgtcggaactgaaagaggacgtgcttttgtcaataccagaaaggattttcaaaaagattttgtaaaatattgtgttgaagaagaagaaaaagctgcagagatgcataaaatgaaatctacaacccaggcaaatcggatgagtgtagatgctgtagaaattgaaacactcagaaaaacagttgaggactatttctgcttttgctatgggaaagctttaggcaaatccacagtggtacctgtaccatatgagaagatgctgcgagaccagtcggctgtggtagtgcaggggcttccggaaggtgttgcctttaaacaccccgagaactatgatcttgcaaccctgaaatggattttggagaacaaagcagggatttcattcatcattaagagaccttttttagagccaaagaagcatgtaggtggtcgtgtgatggtaacagatgctgacaggtcaatactatctccaggtggaagttgtggccccatcaaagtgaaaactgaacccacagaagattctggcatttccctggaaatggcagctgtgacagtaaaggaagaatcagaagatcctgattattatcaatataacattcaaggaagccaccattcttcagagggcaatgaaggcacagaaatggaagtaccagcagaagattctactcaacatgtcccttcagaaacaagtgaggaccctgaagttgaggtgactattgaagatgatgattattctccaccgtctaagagaccaaaggccaatgagctaccgcagccaccagtcccggaacccgccaatgctgggaagcggaaagtgagggagttcaacttcgagaaatggaatgctcgcatcactgatctacgtaaacaagttgaagaattgtttgaaaggaaatatgctcaagccataaaagccaaaggtccggtgacgatcccgtaccctcttttccagtctcatgttgaagatctttatgtagaaggacttcctgaaggaattccttttagaaggccatctacttacggaattcctcgcctggagaggatattacttgcaaaggaaaggattcgttttgtgattaagaaacatgagcttctgaattcaacacgtgaagatttacagcttgataagccagcttcaggagtaaaggaagaatggtatgccagaatcactaaattaagaaagatggtggatcagcttttctgcaaaaaatttgcggaagccttggggagcactgaagccaaggctgtaccgtaccaaaaatttgaggcacacccgaatgatctgtacgtggaaggactgccagaaaacattcctttccgaagtccctcatggtatggaatcccaaggctggaaaaaatcattcaagtgggcaatcgaattaaatttgttattaaaagaccagaacttctgactcacagtaccactgaagttactcagccaagaacgaatacaccagctcaagctcttggactcaccgaggcagtaaaagtaccatatcctgtgtttgaatcaaacccggagttcttgtatgtggaaggcttgccagaggggattcccttccgaagccctacctggtttggaattccacgacttgaaaggatcgtccgcgggagtaataaaatcaagttcgttgttaaaaaacctgaactagttatttcctacttgcctcctgggatggctagtaaaataaacactaaagctttgcagtcccccaaaagaccacgaagtcctgggagtaattcaaaggttcctgaaattgaggtcaccgtggaaggccctaataacaacaatcctcaaacctcagctgttcgaaccccgacccagactaacggttctaacgttcccttcaagccacgagggagagagttttcctttgaggcctggaatgccaaaatcacggacctaaaacagaaagttgaaaatctcttcaatgagaaatgtggggaagctcttggccttaaacaagctgtgaaggtgccgttcgcgttatttgagtctttcccggaagacttttatgtggaaggcttacctgagggtgtgccattccgaagaccatcgacttttggcattccgaggctggagaagatactcagaaacaaagccaaaattaagttcatcattaaaaagcccgaaatgtttgagacggcgattaaggagagcacctcctctaagagccctcccagaaaaataaattcatcacccaatgttaatactactgcatcaggtgttgaagaccttaacatcattcaggtgacaattccagatgatgataatgaaagactctcgaaagttgaaaaagctagacagctaagagaacaagtgaatgacctctttagtcggaaatttggtgaagctattggtatgggttttcctgtgaaagttccctacaggaaaatcacaattaaccctggctgtgtggtggttgatggcatgcccccgggggtgtccttcaaagcccccagctacctggaaatcagctccatgagaaggatcttagactctgccgagtttatcaaattcacggtcattagaccatttccaggacttgtgattaataaccagctggttgatcagagtgagtcagaaggccccgtgatacaagaatcagctgaaccaagccagttggaagttccagccacagaagaaataaaagagactgatggaagctctcagatcaagcaagaaccagaccccacgtggtagacctcttccctcctaggagccttgagttacggtgtttattttccaatcaagtgaagatatctcctacttctcctactggaacatctcagcttctgcagtgaagaaaaattcctgtgatagttcagttctttagtttttctatttgaaaaaaaaaaatcatttaaatgatcctttgttcacggctctccttaatgactgagtgaacagttcctatctgtatatttgactaaaccttttcctaagctatctctcatggttcctatgtttttttatcataattaaaagcaaaaccatctggatcacctaacagtcagaggtcagtatctcagcgtgtgaattatagaggaaatacagagagaacctcttccacttttacttttcgtccaaataaaatgcatggtgtaccagaagttgaagatcgggttgaggattggggctagctcgatgacactaaggccccaacatcgcgggacctgctgtggcgcggattcttaggaacgctgttctagccggccccctctccaggggtcgccgtggccggcattatttcctagttcttcttgtaaccctgaggtgccagcgcggggagtgaggaggggtcagggggctaaggatgcaacctctgacgttctgcgccttcctaggagagtcttacatgtgttgagatttcacaagcaatgcgagttgtaaaataccagctctacaagaagctaggctctgtgacggcatagttttcagtagctttatcacaatattcacaatggagaattatatgacatggtagcagaaataggcccttttatgtgttgcttctattttacctcaaattgtagatatagggtaatcaataaaatccatccatgcctttcacacactaagt

SEQ ID NO: 5157 - protein, 954 aa, Homo sapiens; identical to SEQ ID NO: 4155

SEQ ID NO: 5158 - DNA, 4900 bp, Homo sapiens
gggtcttgttctgtctcccaagctggagtgcagtggtgtggtcataggtcactgcagcgtcgaactcctaggctcaagtgatcctcttgcctcaggctcctgagtagctgggacaacaggcgtgtaccacacctggatactttttaaatttttggtagagaagggatctcactctattgccaagctggtgtcgaactcttggtcttaagcagccctcccacgtcagcatcccaaagtgttgggatttcagagggatcatggcccaagttgcaatgtccaccctccccgttgaagatgaggagtcctcggagagcaggatggtggtgacattcctcatgtcagctctcgagtccatgtgtaaagaactggccaagtccaaagccgaagtggcctgcattgcagtgtatgaaacagacgtgtttgtcgtcggaactgaaagaggacgtgcttttgtcaataccagaaaggattttcaaaaagattttgtaaaatattgtgttgaagaagaagaaaaagctgcagagatgcataaaatgaaatctacaacccaggcaaatcggatgagtgtagatgctgtagaaattgaaacactcagaaaaacagttgaggactatttctgcttttgctatgggaaagctttaggcaaatccacagtggtacctgtaccatatgagaagatgctgcgagaccagtcggctgtggtagtgcaggggcttccggaaggtgttgcctttaaacaccccgagaactatgatcttgcaaccctgaaatggattttggagaacaaagcagggatttcattcatcattaagagaccttttttagagccaaagaagcatgtaggtggtcgtgtgatggtaacagatgctgacaggtcaatactatctccaggtggaagttgtggccccatcaaagtgaaaactgaacccacagaagattctggaagccaccattcttcagagggcaatgaaggcacagaaatggaagtaccagcagaagattctactcaacatgtcccttcagaaacaagtgaggaccctgaagttgaggtgactattgaagatgatgattattctccaccgtctaagagaccaaaggccaatgagctaccgcagccaccagtcccggaacccgccaatgctgggaagcggaaagtgagggagttcaacttcgagaaatggaatgctcgcatcactgatctacgtaaacaagttgaagaattgtttgaaaggaaatatgctcaagccataaaagccaaaggtccggtgacgatcccgtaccctcttttccagtctcatgttgaagatctttatgtagaaggacttcctgaaggaattccttttagaaggccatctacttacggaattcctcgcctggagaggatattacttgcaaaggaaaggattcgttttgtgattaagaaacatgagcttctgaattcaacacgtgaagatttacagcttgataagccagcttcaggagtaaaggaagaatggtatgccagaatcactaaattaagaaagatggtggatcagcttttctgcaaaaaatttgcggaagccttggggagcactgaagccaaggctgtaccgtaccaaaaatttgaggcacacccgaatgatctgtacgtggaaggactgccagaaaacattcctttccgaagtccctcatggtatggaatcccaaggctggaaaaaatcattcaagtgggcaatcgaattaaatttgttattaaaagaccagaacttctgactcacagtaccactgaagttactcagccaagaacgaatacaccagctcaagctcttggactcaccgaggcagtaaaagtaccatatcctgtgtttgaatcaaacccggagttcttgtatgtggaaggcttgccagaggggattcccttccgaagccctacctggtttggaattccacgacttgaaaggatcgtccgcgggagtaataaaatcaagttcgttgttaaaaaacctgaactagttatttcctacttgcctcctgggatggctagtaaaataaacactaaagctttgcagtcccccaaaagaccacgaagtcctgggagtaattcaaaggttcctgaaattgaggtcaccgtggaaggccctaataacaacaatcctcaaacctcagctgttcgaaccccgacccagactaacggttctaacgttcccttcaagccacgagggagagagttttcctttgaggcctggaatgccaaaatcacggacctaaaacagaaagttgaaaatctcttcaatgagaaatgtggggaagctcttggccttaaacaagctgtgaaggtgccgttcgcgttatttgagtctttcccggaagacttttatgtggaaggcttacctgagggtgtgccattccgaagaccatcgacttttggcattccgaggctggagaagatactcagaaacaaagccaaaattaagttcatcattaaaaagcccgaaatgtttgagacggcgattaaggagagcacctcctctaagagccctcccagaaaaataaattcatcacccaatgttaatactactgcatcaggtgttgaagaccttaacatcattcaggtgacaattccagatgatgataatgaaagactctcgaaagttgaaaaagctagacagctaagagaacaagtgaatgacctctttagtcggaaatttggtgaagctattggtatgggttttcctgtgaaagttccctacaggaaaatcacaattaaccctggctgtgtggtggttgatggcatgcccccgggggtgtccttcaaagcccccagctacctggaaatcagctccatgagaaggatcttagactctgccgagtttatcaaattcacggtcattagaccatttccaggacttgtgattaataaccagctggttgatcagagtgagtcagaaggccccgtgatacaagaatcagctgaaccaagccagttggaagttccagccacagaagaaataaaagagactgatggaagctctcagatcaagcaagaaccagaccccacgtggtagacctcttccctcctagggtaaatcagcttctgtgtcagggatgctgtgtggtgtccatctgaaccccctgcatacgcgtagctaatgtgatctccccactttcacataagatggtggccctgccttcagggaatgtgggagccaggtgggagccttcccggatatttaagctagaagattctacagggagattctccttggatcaatatatgtctctcagtcaaagatgtaaaagcacttttgccttaaaaagaatgttctgtttctaaatagagtcaacgttgtcctcctcattggaattcactatgagtcagaatcattagactgacttttttttttccatagtaatagtattttgcagagtctcacagagctgcagatcttttgttcatcttgcagagttaacaagtctgatcctgttagtccagatttcttaaatttggccaagttataataggagcagtagcttgagacccgaagtcaggaaactttgacaatggatttttttttttaatccagagacttgtactggaatttgccttaccctgtcagctcatggacttaaggtttcatcccgctttatgagtgcttctgaatccaagtcattgttacctgaatttgcaaattaagttgtgatattcgtgactgttaaattcctgtaattagattaacctctttgcttgcttgtttgttttctctcctattttagcttaaagtatcagtggttgagaagagcttttcggacctgttactaccccaagctgtgtaatatacttgtataacagaaataccttctatacaaacctttttttctacttttagatagaaatgtctactttttcagcagttctgtgaattaaagagcagagtgactgtgggtctggaatggctggtgtacttgggaatgtactatcaggattttacagcaatgctgggaaatgacagggaaaatgacaggaatgaatctcaccagattttttatgtactcagcagagccttgagttacggtgtttattttccaatcaagtgaagatatctcctacttctcctactggaacatctcagcttctgcagtgaagaaaaattcctgtgatagttcagttctttagtttttctatttgaaaaaaaaaaatcatttaaatgatcctttgttcacggctctccttaatgactgagtgaacagttcctatctgtatatttgactaaaccttttcctaagctatctctcatggttcctatgtttttttatcataattaaaagcaaaaccatctggatcacctaacagtcagaggtcagtatctcagcgtgtgaattatagaggaaatacagagagaacctcttccacttttacttttcgtccaaataaaatgcatggtgtaccagaagttgaagatcgggttgaggattggggctagctcgatgacactaaggccccaacatcgcgggacctgctgtggcgcggattcttaggaacgctgttctagccggccccctctccaggggtcgccgtggccggcattatttcctagttcttcttgtaaccctgaggtgccagcgcggggagtgaggaggggtcagggggctaaggatgcaacctctgacgttctgcgccttcctaggagagtcttacatgtgttgagatttcacaagcaatgcgagttgtaaaataccagctctacaagaagctaggctctgtgacggcatagttttcagtagctttatcacaatattcacaatggagaattatatgacatggtagcagaaataggcccttttatgtgttgcttctattttacctcaaattgtagatatagggtaatcaataaaatccatccatgcctttcacacactaagt

SEQ ID NO: 5159 - protein, 928 aa, Homo sapiens; identical to SEQ ID NO: 4237

SEQ ID NO: 5160 - DNA, 3918 bp, Homo sapiens
gggtcttgttctgtctcccaagctggagtgcagtggtgtggtcataggtcactgcagcgtcgaactcctaggctcaagtgatcctcttgcctcaggctcctgagtagctgggacaacaggcgtgtaccacacctggatactttttaaatttttggtagagaagggatctcactctattgccaagctggtgtcgaactcttggtcttaagcagccctcccacgtcagcatcccaaagtgttgggatttcagagggatcatggcccaagttgcaatgtccaccctccccgttgaagatgaggagtcctcggagagcaggatggtggtgacattcctcatgtcagctctcgagtccatgtgtaaagaactggccaagtccaaagccgaagtggcctgcattgcagtgtatgaaacagacgtgtttgtcgtcggaactgaaagaggacgtgcttttgtcaataccagaaaggattttcaaaaagattttgtaaaatattgtgttgaagaagaagaaaaagctgcagagatgcataaaatgaaatctacaacccaggcaaatcggatgagtgtagatgctgtagaaattgaaacactcagaaaaacagttgaggactatttctgcttttgctatgggaaagctttaggcaaatccacagtggtacctgtaccatatgagaagatgctgcgagaccagtcggctgtggtagtgcaggggcttccggaaggtgttgcctttaaacaccccgagaactatgatcttgcaaccctgaaatggattttggagaacaaagcagggatttcattcatcattaagagaccttttttagagccaaagaagcatgtaggtggtcgtgtgatggtaacagatgctgacaggtcaatactatctccaggtggaagttgtggccccatcaaagtgaaaactgaacccacagaagattctggcatttccctggaaatggcagctgtgacagtaaaggaagaatcagaagatcctgattattatcaatataacattcaaggaagccaccattcttcagagggcaatgaaggcacagaaatggaagtaccagcagaagattctactcaacatgtcccttcagaaacaagtgaggaccctgaagttgaggtgactattgaagatgatgattattctccaccgtctaagagaccaaaggccaatgagctaccgcagccaccagtcccggaacccgccaatgctgggaagcggaaagtgagggagttcaacttcgagaaatggaatgctcgcatcactgatctacgtaaacaagttgaagaattgtttgaaaggaaatatgctcaagccataaaagccaaaggtccggtgacgatcccgtaccctcttttccagtctcatgttgaagatctttatgtagaaggacttcctgaaggaattccttttagaaggccatctacttacggaattcctcgcctggagaggatattacttgcaaaggaaaggattcgttttgtgattaagaaacatgagcttctgaattcaacacgtgaagatttacagcttgataagccagcttcaggagtaaaggaagaatggtatgccagaatcactaaattaagaaagatggtggatcagcttttctgcaaaaaatttgcggaagccttggggagcactgaagccaaggctgtaccgtaccaaaaatttgaggcacacccgaatgatctgtacgtggaaggactgccagaaaacattcctttccgaagtccctcatggtatggaatcccaaggctggaaaaaatcattcaagtgggcaatcgaattaaatttgttattaaaagaccagaacttctgactcacagtaccactgaagttactcagccaagaacgaatacaccagtcaaagaagattggaatgtcagaattaccaagctacggaagcaagtggaagagatttttaatttgaaatttgcttagatttgttgacagcggtttcctggagtgctgtcttgagaacgattctgaggaggctcagcaagaaagagtgtttcagttgattgggtgtgtctgtcatggagaaggaactcaagctcttggactcaccgaggcagtaaaagtaccatatcctgtgtttgaatcaaacccggagttcttgtatgtggaaggcttgccagaggggattcccttccgaagccctacctggtttggaattccacgacttgaaaggatcgtccgcgggagtaataaaatcaagttcgttgttaaaaaacctgaactagttatttcctacttgcctcctgggatggctagtaaaataaacactaaagctttgcagtcccccaaaagaccacgaagtcctgggagtaattcaaaggttcctgaaattgaggtcaccgtggaaggccctaataacaacaatcctcaaacctcagctgttcgaaccccgacccagactaacggttctaacgttcccttcaagccacgagggagagagttttcctttgaggcctggaatgccaaaatcacggacctaaaacagaaagttgaaaatctcttcaatgagaaatgtggggaagctcttggccttaaacaagctgtgaaggtgccgttcgcgttatttgagtctttcccggaagacttttatgtggaaggcttacctgagggtgtgccattccgaagaccatcgacttttggcattccgaggctggagaagatactcagaaacaaagccaaaattaagttcatcattaaaaagcccgaaatgtttgagacggcgattaaggagagcacctcctctaagagccctcccagaaaaataaattcatcacccaatgttaatactactgcatcaggtgttgaagaccttaacatcattcaggtgacaattccagatgatgataatgaaagactctcgaaagttgaaaaagctagacagctaagagaacaagtgaatgacctctttagtcggaaatttggtgaagctattggtatgggttttcctgtgaaagttccctacaggaaaatcacaattaaccctggctgtgtggtggttgatggcatgcccccgggggtgtccttcaaagcccccagctacctggaaatcagctccatgagaaggatcttagactctgccgagtttatcaaattcacggtcattagaccatttccaggacttgtgattaataaccagctggttgatcagagtgagtcagaaggccccgtgatacaagaatcagctgaaccaagccagttggaagttccagccacagaagaaataaaagagactgatggaagctctcagatcaagcaagaaccagaccccacgtggtagacctcttccctcctaggcaaaaccatctggatcacctaacagtcagaggtcagtatctcagcgtgtgaattatagaggaaatacagagagaacctcttccacttttacttttcgtccaaataaaatgcatggtgtaccagaagttgaagatcgggttgaggattggggctagctcgatgacactaaggccccaacatcgcgggacctgctgtggcgcggattcttaggaacgctgttctagccggccccctctccaggggtcgccgtggccggcattatttcctagttcttcttgtaaccctgaggtgccagcgcggggagtgaggaggggtcagggggctaaggatgcaacctctgacgttctgcgccttcctaggagagtcttacatgtgttgagatttcacaagcaatgcgagttgtaaaataccagctctacaagaagctaggctctgtgacggcatagttttcagtagctttatcacaatattcacaatggagaattatatgacatggtagcagaaataggcccttttatgtgttgcttctattttacctcaaattgtagatatagggtaatcaataaaatccatccatgcctttcacacactaagt

SEQ ID NO: 5161 - protein, 564 aa, Homo sapiens; identical to SEQ ID NO: 4061

SEQ ID NO: 5162 - DNA, 4123 bp, Homo sapiens
gggtcttgttctgtctcccaagctggagtgcagtggtgtggtcataggtcactgcagcgtcgaactcctaggctcaagtgatcctcttgcctcaggctcctgagtagctgggacaacaggcgtgtaccacacctggatactttttaaatttttggtagagaagggatctcactctattgccaagctggtgtcgaactcttggtcttaagcagccctcccacgtcagcatcccaaagtgttgggatttcagagggatcatggcccaagttgcaatgtccaccctccccgttgaagatgaggagtcctcggagagcaggatggtggtgacattcctcatgtcagctctcgagtccatgtgtaaagaactggccaagtccaaagccgaagtggcctgcattgcagtgtatgaaacagacgtgtttgtcgtcggaactgaaagaggacgtgcttttgtcaataccagaaaggattttcaaaaagattttgtaaaatattgtgttgaagaagaagaaaaagctgcagagatgcataaaatgaaatctacaacccaggcaaatcggatgagtgtagatgctgtagaaattgaaacactcagaaaaacagttgaggactatttctgcttttgctatgggaaagctttaggcaaatccacagtggtacctgtaccatatgagaagatgctgcgagaccagtcggctgtggtagtgcaggggcttccggaaggtgttgcctttaaacaccccgagaactatgatcttgcaaccctgaaatggattttggagaacaaagcagggatttcattcatcattaagagaccttttttagagccaaagaagcatgtaggtggtcgtgtgatggtaacagatgctgacaggtcaatactatctccaggtggaagttgtggccccatcaaagtgaaaactgaacccacagaagattctggcatttccctggaaatggcagctgtgacagtaaaggaagaatcagaagatcctgattattatcaatataacattcaagcaggcccttctgaaactgatgatgttgatgaaaaacagcccctatcgaagcctttgcaaggaagccaccattcttcagagggcaatgaaggcacagaaatggaagtaccagcagaagattctactcaacatgtcccttcagaaacaagtgaggaccctgaagttgaggtgactattgaagatgatgattattctccaccgtctaagagaccaaaggccaatgagctaccgcagccaccagtcccggaacccgccaatgctgggaagcggaaagtgagggagttcaacttcgagaaatggaatgctcgcatcactgatctacgtaaacaagttgaagaattgtttgaaaggaaatatgctcaagccataaaagccaaaggtccggtgacgatcccgtaccctcttttccagtctcatgttgaagatctttatgtagaaggacttcctgaaggaattccttttagaaggccatctacttacggaattcctcgcctggagaggatattacttgcaaaggaaaggattcgttttgtgattaagaaacatgagcttctgaattcaacacgtgaagatttacagcttgataagccagcttcaggagtaaaggaagaatggtatgccagaatcactaaattaagaaagatggtggatcagcttttctgcaaaaaatttgcggaagccttggggagcactgaagccaaggctgtaccgtaccaaaaatttgaggcacacccgaatgatctgtacgtggaaggactgccagaaaacattcctttccgaagtccctcatggtatggaatcccaaggctggaaaaaatcattcaagtgggcaatcgaattaaatttgttattaaaagaccagaacttctgactcacagtaccactgaagttactcagccaagaacgaatacaccagtcaaagaagattggaatgtcagaattaccaagctacggaagcaagtggaagagatttttaatttgaaatttgctcaagctcttggactcaccgaggcagtaaaagtaccatatcctgtgtttgaatcaaacccggagttcttgaaaggatcgtccgcgggagtaataaaatcaagttcgttgttaaaaaacctgaactagttatttcctacttgcctcctgggatggctagtaaaataaacactaaagctttgcagtcccccaaaagaccacgaagtcctgggagtaattcaaaggttcctgaaattgaggtcaccgtggaaggccctaataacaacaatcctcaaacctcagctgttcgaaccccgacccagactaacggttctaacgttcccttcaagccacgagggagagagttttcctttgaggcctggaatgccaaaatcacggacctaaaacagaaagttgaaaatctcttcaatgagaaatgtggggaagctcttggccttaaacaagctgtgaaggtgccgttcgcgttatttgagtctttcccggaagacttttatgtggaaggcttacctgagggtgtgccattccgaagaccatcgacttttggcattccgaggctggagaagatactcagaaacaaagccaaaattaagttcatcattaaaaagcccgaaatgtttgagacggcgattaaggagagcacctcctctaagagccctcccagaaaaataaattcatcacccaatgttaatactactgcatcaggtgttgaagaccttaacatcattcaggtgacaattccagatgatgataatgaaagactctcgaaagttgaaaaagctagacagctaagagaacaagtgaatgacctctttagtcggaaatttggtgaagctattggtatgggttttcctgtgaaagttccctacaggaaaatcacaattaaccctggctgtgtggtggttgatggcatgcccccgggggtgtccttcaaagcccccagctacctggaaatcagctccatgagaaggatcttagactctgccgagtttatcaaattcacggtcattagaccatttccaggacttgtgattaataaccagctggttgatcagagtgagtcagaaggccccgtgatacaagaatcagctgaaccaagccagttggaagttccagccacagaagaaataaaagagactgatggaagctctcagatcaagcaagaaccagaccccacgtggtagacctcttccctcctaggcttaaagtatcagtggttgagaagagcttttcggacctgttactaccccaagctgtagccttgagttacggtgtttattttccaatcaagtgaagatatctcctacttctcctactggaacatctcagcttctgcagtgaagaaaaattcctgtgatagttcagttctttagtttttctatttgaaaaaaaaaaatcatttaaatgatcctttgttcacggctctccttaatgactgagtgaacagttcctatctgtatatttgactaaaccttttcctaagctatctctcatggttcctatgtttttttatcataattaaaagcaaaaccatctggatcacctaacagtcagaggtcagtatctcagcgtgtgaattatagaggaaatacagagagaacctcttccacttttacttttcgtccaaataaaatgcatggtgtaccagaagttgaagatcgggttgaggattggggctagctcgatgacactaaggccccaacatcgcgggacctgctgtggcgcggattcttaggaacgctgttctagccggccccctctccaggggtcgccgtggccggcattatttcctagttcttcttgtaaccctgaggtgccagcgcggggagtgaggaggggtcagggggctaaggatgcaacctctgacgttctgcgccttcctaggagagtcttacatgtgttgagatttcacaagcaatgcgagttgtaaaataccagctctacaagaagctaggctctgtgacggcatagttttcagtagctttatcacaatattcacaatggagaattatatgacatggtagcagaaataggcccttttatgtgttgcttctattttacctcaaattgtagatatagggtaatcaataaaatccatccatgcctttcacacactaagt

SEQ ID NO: 5163 - protein, 625 aa, Homo sapiens; identical to SEQ ID NO: 4033

SEQ ID NO: 5164 - DNA, 4052 bp, Homo sapiens
gggtcttgttctgtctcccaagctggagtgcagtggtgtggtcataggtcactgcagcgtcgaactcctaggctcaagtgatcctcttgcctcaggctcctgagtagctgggacaacaggcgtgtaccacacctggatactttttaaatttttggtagagaagggatctcactctattgccaagctggtgtcgaactcttggtcttaagcagccctcccacgtcagcatcccaaagtgttgggatttcagagggatcatggcccaagttgcaatgtccaccctccccgttgaagatgaggagtcctcggagagcaggatggtggtgacattcctcatgtcagctctcgagtccatgtgtaaagaactggccaagtccaaagccgaagtggcctgcattgcagtgtatgaaacagacgtgtttgtcgtcggaactgaaagaggacgtgcttttgtcaataccagaaaggattttcaaaaagattttgtaaaatattgtgttgaagaagaagaaaaagctgcagagatgcataaaatgaaatctacaacccaggcaaatcggatgagtgtagatgctgtagaaattgaaacactcagaaaaacagttgaggactatttctgcttttgctatgggaaagctttaggcaaatccacagtggtacctgtaccatatgagaagatgctgcgagaccagtcggctgtggtagtgcaggggcttccggaaggtgttgcctttaaacaccccgagaactatgatcttgcaaccctgaaatggattttggagaacaaagcagggatttcattcatcattaagagaccttttttagagccaaagaagcatgtaggtggtcgtgtgatggtaacagatgctgacaggtcaatactatctccaggtggaagttgtggccccatcaaagtgaaaactgaacccacagaagattctggaagccaccattcttcagagggcaatgaaggcacagaaatggaagtaccagcagaagattctactcaacatgtcccttcagaaacaagtgaggaccctgaagttgaggtgactattgaagatgatgattattctccaccgtctaagagaccaaaggccaatgagctaccgcagccaccagtcccggaacccgccaatgctgggaagcggaaagtgagggagttcaacttcgagaaatggaatgctcgcatcactgatctacgtaaacaagttgaagaattgtttgaaaggaaatatgctcaagccataaaagccaaaggtccggtgacgatcccgtaccctcttttccagtctcatgttgaagatctttatgtagaaggacttcctgaaggaattccttttagaaggccatctacttacggaattcctcgcctggagaggatattacttgcaaaggaaaggattcgttttgtgattaagaaacatgagcttctgaattcaacacgtgaagatttacagcttgataagccagcttcaggagtaaaggaagaatggtatgccagaatcactaaattaagaaagatggtggatcagcttttctgcaaaaaatttgcggaagccttggggagcactgaagccaaggctgtaccgtaccaaaaatttgaggcacacccgaatgatctgtacgtggaaggactgccagaaaacattcctttccgaagtccctcatggtatggaatcccaaggctggaaaaaatcattcaagtgggcaatcgaattaaatttgttattaaaagaccagaacttctgactcacagtaccactgaagttactcagccaagaacgaatacaccagtcaaagaagattggaatgtcagaattaccaagctacggaagcaagtggaagagatttttaatttgaaatttgctcaagctcttggactcaccgaggcagtaaaagtaccatatcctgtgtttgaatcaaacccggagttcttgtatgtggaaggcttgccagaggggattcccttccgaagccctacctggtttggaattccacgacttgaaaggatcgtccgcgggagtaataaaatcaagttcgttgttaaaaaacctgaactagttatttcctacttgcctcctgggatggctagtaaaataaacactaaagctttgcagtcccccaaaagaccacgaagtcctgggagtaattcaaaggttcctgaaattgaggtcaccgtggaaggccctaataacaacaatcctcaaacctcagctgttcgaaccccgacccagactaacggttctaacgttcccttcaagccacgagggagagagttttcctttgaggcctggaatgccaaaatcacggacctaaaacagaaagttgaaaatctcttcaatgagaaatgtggggaagctcttggccttaaacaagctgtgaaggtgccgttcgcgttatttgagtctttcccggaagacttttatgtggaaggcttacctgagggtgtgccattccgaagaccatcgacttttggcattccgaggctggagaagatactcagaaacaaagccaaaattaagttcatcattaaaaagcccgaaatgtttgagacggcgattaaggagagcacctcctctaagagccctcccagaaaaataaattcatcacccaatgttaatactactgcatcaggtgttgaagaccttaacatcattcaggtgacaattccagatgatgataatgaaagactctcgaaagttgaaaaagctagacagctaagagaacaagtgaatgacctctttagtcggaaatttggtgaagctattggtatgggttttcctgtgaaagttccctacaggaaaatcacaattaaccctggctgtgtggtggttgatggcatgcccccgggggtgtccttcaaagcccccagctacctggaaatcagctccatgagaaggatcttagactctgccgagtttatcaaattcacggtcattagaccatttccaggacttgtgattaataaccagctggttgatcagagtgagtcagaaggccccgtgatacaagaatcagctgaaccaagccagttggaagttccagccacagaagaaataaaagagactgatggaagctctcagatcaagcaagaaccagaccccacgtggtagacctcttccctcctaggcttaaagtatcagtggttgagaagagcttttcggacctgttactaccccaagctgtagccttgagttacggtgtttattttccaatcaagtgaagatatctcctacttctcctactggaacatctcagcttctgcagtgaagaaaaattcctgtgatagttcagttctttagtttttctatttgaaaaaaaaaaatcatttaaatgatcctttgttcacggctctccttaatgactgagtgaacagttcctatctgtatatttgactaaaccttttcctaagctatctctcatggttcctatgtttttttatcataattaaaagcaaaaccatctggatcacctaacagtcagaggtcagtatctcagcgtgtgaattatagaggaaatacagagagaacctcttccacttttacttttcgtccaaataaaatgcatggtgtaccagaagttgaagatcgggttgaggattggggctagctcgatgacactaaggccccaacatcgcgggacctgctgtggcgcggattcttaggaacgctgttctagccggccccctctccaggggtcgccgtggccggcattatttcctagttcttcttgtaaccctgaggtgccagcgcggggagtgaggaggggtcagggggctaaggatgcaacctctgacgttctgcgccttcctaggagagtcttacatgtgttgagatttcacaagcaatgcgagttgtaaaataccagctctacaagaagctaggctctgtgacggcatagttttcagtagctttatcacaatattcacaatggagaattatatgacatggtagcagaaataggcccttttatgtgttgcttctattttacctcaaattgtagatatagggtaatcaataaaatccatccatgcctttcacacactaagt

SEQ ID NO: 5165 - protein, 952 aa, Homo sapiens; identical to SEQ ID NO: 4069

SEQ ID NO: 5166 - DNA, 4975 bp, Homo sapiens
gggtcttgttctgtctcccaagctggagtgcagtggtgtggtcataggtcactgcagcgtcgaactcctaggctcaagtgatcctcttgcctcaggctcctgagtagctgggacaacaggcgtgtaccacacctggatactttttaaatttttggtagagaagggatctcactctattgccaagctggtgtcgaactcttggtcttaagcagccctcccacgtcagcatcccaaagtgttgggatttcagagggatcatggcccaagttgcaatgtccaccctccccgttgaagatgaggagtcctcggagagcaggatggtggtgacattcctcatgtcagctctcgagtccatgtgtaaagaactggccaagtccaaagccgaagtggcctgcattgcagtgtatgaaacagacgtgtttgtcgtcggaactgaaagaggacgtgcttttgtcaataccagaaaggattttcaaaaagattttgtaaaatattgtgttgaagaagaagaaaaagctgcagagatgcataaaatgaaatctacaacccaggcaaatcggatgagtgtagatgctgtagaaattgaaacactcagaaaaacagttgaggactatttctgcttttgctatgggaaagctttaggcaaatccacagtggtacctgtaccatatgagaagatgctgcgagaccagtcggctgtggtagtgcaggggcttccggaaggtgttgcctttaaacaccccgagaactatgatcttgcaaccctgaaatggattttggagaacaaagcagggatttcattcatcattaagagaccttttttagagccaaagaagcatgtaggtggtcgtgtgatggtaacagatgctgacaggtcaatactatctccaggtggaagttgtggccccatcaaagtgaaaactgaacccacagaagattctggcatttccctggaaatggcagctgtgacagtaaaggaagaatcagaagatcctgattattatcaatataacattcaagcaggcccttctgaaactgatgatgttgatgaaaaacagcccctatcgaagcctttgcaaggaagccaccattcttcagagggcaatgaaggcacagaaatggaagtaccagcagaagatgatgattattctccaccgtctaagagaccaaaggccaatgagctaccgcagccaccagtcccggaacccgccaatgctgggaagcggaaagtgagggagttcaacttcgagaaatggaatgctcgcatcactgatctacgtaaacaagttgaagaattgtttgaaaggaaatatgctcaagccataaaagccaaaggtccggtgacgatcccgtaccctcttttccagtctcatgttgaagatctttatgtagaaggacttcctgaaggaattccttttagaaggccatctacttacggaattcctcgcctggagaggatattacttgcaaaggaaaggattcgttttgtgattaagaaacatgagcttctgaattcaacacgtgaagatttacagcttgataagccagcttcaggagtaaaggaagaatggtatgccagaatcactaaattaagaaagatggtggatcagcttttctgcaaaaaatttgcggaagccttggggagcactgaagccaaggctgtaccgtaccaaaaatttgaggcacacccgaatgatctgtacgtggaaggactgccagaaaacattcctttccgaagtccctcatggtatggaatcccaaggctggaaaaaatcattcaagtgggcaatcgaattaaatttgttattaaaagaccagaacttctgactcacagtaccactgaagttactcagccaagaacgaatacaccagctcaagctcttggactcaccgaggcagtaaaagtaccatatcctgtgtttgaatcaaacccggagttcttgtatgtggaaggcttgccagaggggattcccttccgaagccctacctggtttggaattccacgacttgaaaggatcgtccgcgggagtaataaaatcaagttcgttgttaaaaaacctgaactagttatttcctacttgcctcctgggatggctagtaaaataaacactaaagctttgcagtcccccaaaagaccacgaagtcctgggagtaattcaaaggttcctgaaattgaggtcaccgtggaaggccctaataacaacaatcctcaaacctcagctgttcgaaccccgacccagactaacggttctaacgttcccttcaagccacgagggagagagttttcctttgaggcctggaatgccaaaatcacggacctaaaacagaaagttgaaaatctcttcaatgagaaatgtggggaagctcttggccttaaacaagctgtgaaggtgccgttcgcgttatttgagtctttcccggaagacttttatgtggaaggcttacctgagggtgtgccattccgaagaccatcgacttttggcattccgaggctggagaagatactcagaaacaaagccaaaattaagttcatcattaaaaagcccgaaatgtttgagacggcgattaaggagagcacctcctctaagagccctcccagaaaaataaattcatcacccaatgttaatactactgcatcaggtgttgaagaccttaacatcattcaggtgacaattccagatgatgataatgaaagactctcgaaagttgaaaaagctagacagctaagagaacaagtgaatgacctctttagtcggaaatttggtgaagctattggtatgggttttcctgtgaaagttccctacaggaaaatcacaattaaccctggctgtgtggtggttgatggcatgcccccgggggtgtccttcaaagcccccagctacctggaaatcagctccatgagaaggatcttagactctgccgagtttatcaaattcacggtcattagaccatttccaggacttgtgattaataaccagctggttgatcagagtgagtcagaaggccccgtgatacaagaatcagctgaaccaagccagttggaagttccagccacagaagaaataaaagagactgatggaagctctcagatcaagcaagaaccagaccccacgtggtagacctcttccctcctagggtaaatcagcttctgtgtcagggatgctgtgtggtgtccatctgaaccccctgcatacgcgtagctaatgtgatctccccactttcacataagatggtggccctgccttcagggaatgtgggagccaggtgggagccttcccggatatttaagctagaagattctacagggagattctccttggatcaatatatgtctctcagtcaaagatgtaaaagcacttttgccttaaaaagaatgttctgtttctaaatagagtcaacgttgtcctcctcattggaattcactatgagtcagaatcattagactgacttttttttttccatagtaatagtattttgcagagtctcacagagctgcagatcttttgttcatcttgcagagttaacaagtctgatcctgttagtccagatttcttaaatttggccaagttataataggagcagtagcttgagacccgaagtcaggaaactttgacaatggatttttttttttaatccagagacttgtactggaatttgccttaccctgtcagctcatggacttaaggtttcatcccgctttatgagtgcttctgaatccaagtcattgttacctgaatttgcaaattaagttgtgatattcgtgactgttaaattcctgtaattagattaacctctttgcttgcttgtttgttttctctcctattttagcttaaagtatcagtggttgagaagagcttttcggacctgttactaccccaagctgtgtaatatacttgtataacagaaataccttctatacaaacctttttttctacttttagatagaaatgtctactttttcagcagttctgtgaattaaagagcagagtgactgtgggtctggaatggctggtgtacttgggaatgtactatcaggattttacagcaatgctgggaaatgacagggaaaatgacaggaatgaatctcaccagattttttatgtactcagcagagccttgagttacggtgtttattttccaatcaagtgaagatatctcctacttctcctactggaacatctcagcttctgcagtgaagaaaaattcctgtgatagttcagttctttagtttttctatttgaaaaaaaaaaatcatttaaatgatcctttgttcacggctctccttaatgactgagtgaacagttcctatctgtatatttgactaaaccttttcctaagctatctctcatggttcctatgtttttttatcataattaaaagcaaaaccatctggatcacctaacagtcagaggtcagtatctcagcgtgtgaattatagaggaaatacagagagaacctcttccacttttacttttcgtccaaataaaatgcatggtgtaccagaagttgaagatcgggttgaggattggggctagctcgatgacactaaggccccaacatcgcgggacctgctgtggcgcggattcttaggaacgctgttctagccggccccctctccaggggtcgccgtggccggcattatttcctagttcttcttgtaaccctgaggtgccagcgcggggagtgaggaggggtcagggggctaaggatgcaacctctgacgttctgcgccttcctaggagagtcttacatgtgttgagatttcacaagcaatgcgagttgtaaaataccagctctacaagaagctaggctctgtgacggcatagttttcagtagctttatcacaatattcacaatggagaattatatgacatggtagcagaaataggcccttttatgtgttgcttctattttacctcaaattgtagatatagggtaatcaataaaatccatccatgcctttcacacactaagt

SEQ ID NO: 5167 - protein, 953 aa, Homo sapiens; identical to SEQ ID NO: 4179

SEQ ID NO: 5168 - DNA, 4530 bp, Homo sapiens
gggtcttgttctgtctcccaagctggagtgcagtggtgtggtcataggtcactgcagcgtcgaactcctaggctcaagtgatcctcttgcctcaggctcctgagtagctgggacaacaggcgtgtaccacacctggatactttttaaatttttggtagagaagggatctcactctattgccaagctggtgtcgaactcttggtcttaagcagccctcccacgtcagcatcccaaagtgttgggatttcagagggatcatggcccaagttgcaatgtccaccctccccgttgaagatgaggagtcctcggagagcaggatggtggtgacattcctcatgtcagctctcgagtccatgtgtaaagaactggccaagtccaaagccgaagtggcctgcattgcagtgtatgaaacagacgtgtttgtcgtcggaactgaaagaggacgtgcttttgtcaataccagaaaggattttcaaaaagattttgtaaaatattgtgttgaagaagaagaaaaagctgcagagatgcataaaatgaaatctacaacccaggcaaatcggatgagtgtagatgctgtagaaattgaaacactcagaaaaacagttgaggactatttctgcttttgctatgggaaagctttaggcaaatccacagtggtacctgtaccatatgagaagatgctgcgagaccagtcggctgtggtagtgcaggggcttccggaaggtgttgcctttaaacaccccgagaactatgatcttgcaaccctgaaatggattttggagaacaaagcagggatttcattcatcattaagagaccttttttagagccaaagaagcatgtaggtggtcgtgtgatggtaacagatgctgacaggtcaatactatctccaggtggaagttgtggccccatcaaagtgaaaactgaacccacagaagattctggcatttccctggaaatggcagctgtgacagtaaaggaagaatcagaagatcctgattattatcaatataacattcaagcaggcccttctgaaactgatgatgttgatgaaaaacagcccctatcgaagcctttgcaaggaagccaccattcttcagagggcaatgaaggcacagaaatggaagtaccagcagaagattctactcaacatgtcccttcagaaacaagtgaggaccctgaagttgaggtgactattgaagatgatgattattctccaccgtctaagagaccaaaggccaatgagctaccgcagccaccagtcccggaacccgccaatgctgggaagcggaaagtgagggagttcaacttcgagaaatggaatgctcgcatcactgatctacgtaaacaagttgaagaattgtttgaaaggaaatatgctcaagccataaaagccaaaggtccggtgacgatcccgtaccctcttttccagtctcatgttgaagatctttatgtagaaggacttcctgaaggaattccttttagaaggccatctacttacggaattcctcgcctggagaggatattacttgcaaaggaaaggattcgttttgtgattaagaaacatgagcttctgaattcaacacgtgaagatttacagcttgataagccagcttcaggagtaaaggaagaatggtatgccagaatcactaaattaagaaagatggtggatcagcttttctgcaaaaaatttgcggaagccttggggagcactgaagccaaggctgtaccgtaccaaaaatttgaggcacacccgaatgatctgtacgtggaaggactgccagaaaacattcctttccgaagtccctcatggtatggaatcccaaggctggaaaaaatcattcaagtgggcaatcgaattaaatttgttattaaaagaccagaacttctgactcacagtaccactgaagttactcagccaagaacgaatacaccagtcaaagaagattggaatgtcagaattaccaagctacggaagcaagtggaagagatttttaatttgaaatttgcttagatttgttgacagcggtttcctggagtgctgtcttgagaacgattctgaggaggctcagcaagaaagagtgtttcagttgattgggtgtgtctgtcatggagaaggaactcaagctcttggactcaccgaggcagtaaaagtaccatatcctgtgtttgaatcaaacccggagttcttgtatgtggaaggcttgccagaggggattcccttccgaagccctacctggtttggaattccacgacttgaaaggatcgtccgcgggagtaataaaatcaagttcgttgttaaaaaacctgaactagttatttcctacttgcctcctgggatggctagtaaaataaacactaaagctttgcagtcccccaaaagaccacgaagtcctgggagtaattcaaaggttcctgaaattgaggtcaccgtggaaggccctaataacaacaatcctcaaacctcagctgttcgaaccccgacccagactaacggttctaacgttcccttcaagccacgagggagagagttttcctttgaggcctggaatgccaaaatcacggacctaaaacagaaagttgaaaatctcttcaatgagaaatgtggggaagctcttggccttaaacaagctgtgaaggtgccgttcgcgttatttgagtctttcccggaagacttttatgtggaaggcttacctgagggtgtgccattccgaagaccatcgacttttggcattccgaggctggagaagatactcagaaacaaagccaaaattaagttcatcattaaaaagcccgaaatgtttgagacggcgattaaggagagcacctcctctaagagccctcccagaaaaataaattcatcacccaatgttaatactactgcatcaggtgttgaagaccttaacatcattcaggtgacaattccagatgatgataatgaaagactctcgaaagttgaaaaagctagacagctaagagaacaagtgaatgacctctttagtcggaaatttggtgaagctattggtatgggttttcctgtgaaagttccctacaggaaaatcacaattaaccctggctgtgtggtggttgatggcatgcccccgggggtgtccttcaaagcccccagctacctggaaatcagctccatgagaaggatcttagactctgccgagtttatcaaattcacggtcattagaccatttccaggacttgtgattaataaccagctggttgatcagagtgagtcagaaggccccgtgatacaagaatcagctgaaccaagccagttggaagttccagccacagaagaaataaaagagactgatggaagctctcagatcaagcaagaaccagaccccacgtggtagacctcttccctcctaggcttaaagtatcagtggttgagaagagcttttcggacctgttactaccccaagctgtgtaatatacttgtataacagaaataccttctatacaaacctttttttctacttttagatagaaatgtctactttttcagcagttctgtgaattaaagagcagagtgactgtgggtctggaatggctggtgtacttgggaatgtactatcaggattttacagcaatgctgggaaatgacagggaaaatgacaggaatgaatctcaccagattttttatgtactcagcagagccttgagttacggtgtttattttccaatcaagtgaagatatctcctacttctcctactggaacatctcagcttctgcagtgaagaaaaattcctgtgatagttcagttctttagtttttctatttgaaaaaaaaaaatcatttaaatgatcctttgttcacggctctccttaatgactgagtgaacagttcctatctgtatatttgactaaaccttttcctaagctatctctcatggttcctatgtttttttatcataattaaaagcaaaaccatctggatcacctaacagtcagaggtcagtatctcagcgtgtgaattatagaggaaatacagagagaacctcttccacttttacttttcgtccaaataaaatgcatggtgtaccagaagttgaagatcgggttgaggattggggctagctcgatgacactaaggccccaacatcgcgggacctgctgtggcgcggattcttaggaacgctgttctagccggccccctctccaggggtcgccgtggccggcattatttcctagttcttcttgtaaccctgaggtgccagcgcggggagtgaggaggggtcagggggctaaggatgcaacctctgacgttctgcgccttcctaggagagtcttacatgtgttgagatttcacaagcaatgcgagttgtaaaataccagctctacaagaagctaggctctgtgacggcatagttttcagtagctttatcacaatattcacaatggagaattatatgacatggtagcagaaataggcccttttatgtgttgcttctattttacctcaaattgtagatatagggtaatcaataaaatccatccatgcctttcacacactaagt

SEQ ID NO: 5169 - protein, 584 aa, Homo sapiens; identical to SEQ ID NO: 4053

SEQ ID NO: 5170 - DNA, 3980 bp, Homo sapiens
gggtcttgttctgtctcccaagctggagtgcagtggtgtggtcataggtcactgcagcgtcgaactcctaggctcaagtgatcctcttgcctcaggctcctgagtagctgggacaacaggcgtgtaccacacctggatactttttaaatttttggtagagaagggatctcactctattgccaagctggtgtcgaactcttggtcttaagcagccctcccacgtcagcatcccaaagtgttgggatttcagagggatcatggcccaagttgcaatgtccaccctccccgttgaagatgaggagtcctcggagagcaggatggtggtgacattcctcatgtcagctctcgagtccatgtgtaaagaactggccaagtccaaagccgaagtggcctgcattgcagtgtatgaaacagacgtgtttgtcgtcggaactgaaagaggacgtgcttttgtcaataccagaaaggattttcaaaaagattttgtaaaatattgtgttgaagaagaagaaaaagctgcagagatgcataaaatgaaatctacaacccaggcaaatcggatgagtgtagatgctgtagaaattgaaacactcagaaaaacagttgaggactatttctgcttttgctatgggaaagctttaggcaaatccacagtggtacctgtaccatatgagaagatgctgcgagaccagtcggctgtggtagtgcaggggcttccggaaggtgttgcctttaaacaccccgagaactatgatcttgcaaccctgaaatggattttggagaacaaagcagggatttcattcatcattaagagaccttttttagagccaaagaagcatgtaggtggtcgtgtgatggtaacagatgctgacaggtcaatactatctccaggtggaagttgtggccccatcaaagtgaaaactgaacccacagaagattctggaagccaccattcttcagagggcaatgaaggcacagaaatggaagtaccagcagaagattctactcaacatgtcccttcagaaacaagtgaggaccctgaagttgaggtgactattgaagatgatgattattctccaccgtctaagagaccaaaggccaatgagctaccgcagccaccagtcccggaacccgccaatgctgggaagcggaaagtgagggagttcaacttcgagaaatggaatgctcgcatcactgatctacgtaaacaagttgaagaattgtttgaaaggaaatatgctcaagccataaaagccaaaggtccggtgacgatcccgtaccctcttttccagtctcatgttgaagatctttatgtagaaggacttcctgaaggaattccttttagaaggccatctacttacggaattcctcgcctggagaggatattacttgcaaaggaaaggattcgttttgtgattaagaaacatgagcttctgaattcaacacgtgaagatttacagcttgataagccagcttcaggagtaaaggaagaatggtatgccagaatcactaaattaagaaagatggtggatcagcttttctgcaaaaaatttgcggaagccttggggagcactgaagccaaggctgtaccgtaccaaaaatttgaggcacacccgaatgatctgtacgtggaaggactgccagaaaacattcctttccgaagtccctcatggtatggaatcccaaggctggaaaaaatcattcaagtgggcaatcgaattaaatttgttattaaaagaccagaacttctgactcacagtaccactgaagttactcagccaagaacgaatacaccagctcaagctcttggactcaccgaggcagtaaaagtaccatatcctgtgtttgaatcaaacccggagttcttgtatgtggaaggcttgccagaggggattcccttccgaagccctacctggtttggaattccacgacttgaaaggatcgtccgcgggagtaataaaatcaagttcgttgttaaaaaacctgaactagttatttcctacttgcctcctgggatggctagtaaaataaacactaaagctttgcagtcccccaaaagaccacgaagtcctgggagtaattcaaaggttcctgaaattgaggtcaccgtggaaggccctaataacaacaatcctcaaacctcagctgttcgaaccccgacccagactaacggttctaacgttcccttcaagccacgagggagagagttttcctttgaggcctggaatgccaaaatcacggacctaaaacagaaagttgaaaatctcttcaatgagaaatgtggggaagctcttggccttaaacaagctgtgaaggtgccgttcgcgttatttgagtctttcccggaagacttttatgtggaaggcttacctgagggtgtgccattccgaagaccatcgacttttggcattccgaggctggagaagatactcagaaacaaagccaaaattaagttcatcattaaaaagcccgaaatgtttgagacggcgattaaggagagcacctcctctaagagccctcccagaaaaataaattcatcacccaatgttaatactactgcatcaggtgttgaagaccttaacatcattcaggtgacaattccagatgatgataatgaaagactctcgaaagttgaaaaagctagacagctaagagaacaagtgaatgacctctttagtcggaaatttggtgaagctattggtatgggttttcctgtgaaagttccctacaggaaaatcacaattaaccctggctgtgtggtggttgatggcatgcccccgggggtgtccttcaaagcccccagctacctggaaatcagctccatgagaaggatcttagactctgccgagtttatcaaattcacggtcattagaccatttccaggacttgtgattaataaccagctggttgatcagagtgagtcagaaggccccgtgatacaagaatcagctgaaccaagccagttggaagttccagccacagaagaaataaaagagactgatggaagctctcagatcaagcaagaaccagaccccacgtggtagacctcttccctcctaggcttaaagtatcagtggttgagaagagcttttcggacctgttactaccccaagctgtagccttgagttacggtgtttattttccaatcaagtgaagatatctcctacttctcctactggaacatctcagcttctgcagtgaagaaaaattcctgtgatagttcagttctttagtttttctatttgaaaaaaaaaaatcatttaaatgatcctttgttcacggctctccttaatgactgagtgaacagttcctatctgtatatttgactaaaccttttcctaagctatctctcatggttcctatgtttttttatcataattaaaagcaaaaccatctggatcacctaacagtcagaggtcagtatctcagcgtgtgaattatagaggaaatacagagagaacctcttccacttttacttttcgtccaaataaaatgcatggtgtaccagaagttgaagatcgggttgaggattggggctagctcgatgacactaaggccccaacatcgcgggacctgctgtggcgcggattcttaggaacgctgttctagccggccccctctccaggggtcgccgtggccggcattatttcctagttcttcttgtaaccctgaggtgccagcgcggggagtgaggaggggtcagggggctaaggatgcaacctctgacgttctgcgccttcctaggagagtcttacatgtgttgagatttcacaagcaatgcgagttgtaaaataccagctctacaagaagctaggctctgtgacggcatagttttcagtagctttatcacaatattcacaatggagaattatatgacatggtagcagaaataggcccttttatgtgttgcttctattttacctcaaattgtagatatagggtaatcaataaaatccatccatgcctttcacacactaagt

SEQ ID NO: 5171 - protein, 928 aa, Homo sapiens; identical to SEQ ID NO: 4237

SEQ ID NO: 5172 - DNA, 5084 bp, Homo sapiens
gggtcttgttctgtctcccaagctggagtgcagtggtgtggtcataggtcactgcagcgtcgaactcctaggctcaagtgatcctcttgcctcaggctcctgagtagctgggacaacaggcgtgtaccacacctggatactttttaaatttttggtagagaagggatctcactctattgccaagctggtgtcgaactcttggtcttaagcagccctcccacgtcagcatcccaaagtgttgggatttcagagggatcatggcccaagttgcaatgtccaccctccccgttgaagatgaggagtcctcggagagcaggatggtggtgacattcctcatgtcagctctcgagtccatgtgtaaagaactggccaagtccaaagccgaagtggcctgcattgcagtgtatgaaacagacgtgtttgtcgtcggaactgaaagaggacgtgcttttgtcaataccagaaaggattttcaaaaagattttgtaaaatattgtgttgaagaagaagaaaaagctgcagagatgcataaaatgaaatctacaacccaggcaaatcggatgagtgtagatgctgtagaaattgaaacactcagaaaaacagttgaggactatttctgcttttgctatgggaaagctttaggcaaatccacagtggtacctgtaccatatgagaagatgctgcgagaccagtcggctgtggtagtgcaggggcttccggaaggtgttgcctttaaacaccccgagaactatgatcttgcaaccctgaaatggattttggagaacaaagcagggatttcattcatcattaagagaccttttttagagccaaagaagcatgtaggtggtcgtgtgatggtaacagatgctgacaggtcaatactatctccaggtggaagttgtggccccatcaaagtgaaaactgaacccacagaagattctggaagccaccattcttcagagggcaatgaaggcacagaaatggaagtaccagcagaagattctactcaacatgtcccttcagaaacaagtgaggaccctgaagttgaggtgactattgaagatgatgattattctccaccgtctaagagaccaaaggccaatgagctaccgcagccaccagtcccggaacccgccaatgctgggaagcggaaagtgagggagttcaacttcgagaaatggaatgctcgcatcactgatctacgtaaacaagttgaagaattgtttgaaaggaaatatgctcaagccataaaagccaaaggtccggtgacgatcccgtaccctcttttccagtctcatgttgaagatctttatgtagaaggacttcctgaaggaattccttttagaaggccatctacttacggaattcctcgcctggagaggatattacttgcaaaggaaaggattcgttttgtgattaagaaacatgagcttctgaattcaacacgtgaagatttacagcttgataagccagcttcaggagtaaaggaagaatggtatgccagaatcactaaattaagaaagatggtggatcagcttttctgcaaaaaatttgcggaagccttggggagcactgaagccaaggctgtaccgtaccaaaaatttgaggcacacccgaatgatctgtacgtggaaggactgccagaaaacattcctttccgaagtccctcatggtatggaatcccaaggctggaaaaaatcattcaagtgggcaatcgaattaaatttgttattaaaagaccagaacttctgactcacagtaccactgaagttactcagccaagaacgaatacaccagtcaaagaagattggaatgtcagaattaccaagctacggaagcaagtggaagagatttttaatttgaaatttgcttagatttgttgacagcggtttcctggagtgctgtcttgagaacgattctgaggaggctcagcaagaaagagtgtttcagttgattgggtgtgtctgtcatggagaaggaactcaagctcttggactcaccgaggcagtaaaagtaccatatcctgtgtttgaatcaaacccggagttcttgtatgtggaaggcttgccagaggggattcccttccgaagccctacctggtttggaattccacgacttgaaaggatcgtccgcgggagtaataaaatcaagttcgttgttaaaaaacctgaactagttatttcctacttgcctcctgggatggctagtaaaataaacactaaagctttgcagtcccccaaaagaccacgaagtcctgggagtaattcaaaggttcctgaaattgaggtcaccgtggaaggccctaataacaacaatcctcaaacctcagctgttcgaaccccgacccagactaacggttctaacgttcccttcaagccacgagggagagagttttcctttgaggcctggaatgccaaaatcacggacctaaaacagaaagttgaaaatctcttcaatgagaaatgtggggaagctcttggccttaaacaagctgtgaaggtgccgttcgcgttatttgagtctttcccggaagacttttatgtggaaggcttacctgagggtgtgccattccgaagaccatcgacttttggcattccgaggctggagaagatactcagaaacaaagccaaaattaagttcatcattaaaaagcccgaaatgtttgagacggcgattaaggagagcacctcctctaagagccctcccagaaaaataaattcatcacccaatgttaatactactgcatcaggtgttgaagaccttaacatcattcaggtgacaattccagatgatgataatgaaagactctcgaaagttgaaaaagctagacagctaagagaacaagtgaatgacctctttagtcggaaatttggtgaagctattggtatgggttttcctgtgaaagttccctacaggaaaatcacaattaaccctggctgtgtggtggttgatggcatgcccccgggggtgtccttcaaagcccccagctacctggaaatcagctccatgagaaggatcttagactctgccgagtttatcaaattcacggtcattagaccatttccaggacttgtgattaataaccagctggttgatcagagtgagtcagaaggccccgtgatacaagaatcagctgaaccaagccagttggaagttccagccacagaagaaataaaagagactgatggaagctctcagatcaagcaagaaccagaccccacgtggtagacctcttccctcctagggtaaatcagcttctgtgtcagggatgctgtgtggtgtccatctgaaccccctgcatacgcgtagctaatgtgatctccccactttcacataagatggtggccctgccttcagggaatgtgggagccaggtgggagccttcccggatatttaagctagaagattctacagggagattctccttggatcaatatatgtctctcagtcaaagatgtaaaagcacttttgccttaaaaagaatgttctgtttctaaatagagtcaacgttgtcctcctcattggaattcactatgagtcagaatcattagactgacttttttttttccatagtaatagtattttgcagagtctcacagagctgcagatcttttgttcatcttgcagagttaacaagtctgatcctgttagtccagatttcttaaatttggccaagttataataggagcagtagcttgagacccgaagtcaggaaactttgacaatggatttttttttttaatccagagacttgtactggaatttgccttaccctgtcagctcatggacttaaggtttcatcccgctttatgagtgcttctgaatccaagtcattgttacctgaatttgcaaattaagttgtgatattcgtgactgttaaattcctgtaattagattaacctctttgcttgcttgtttgttttctctcctattttagcttaaagtatcagtggttgagaagagcttttcggacctgttactaccccaagctgtgtaatatacttgtataacagaaataccttctatacaaacctttttttctacttttagatagaaatgtctactttttcagcagttctgtgaattaaagagcagagtgactgtgggtctggaatggctggtgtacttgggaatgtactatcaggattttacagcaatgctgggaaatgacagggaaaatgacaggaatgaatctcaccagattttttatgtactcagcagagccttgagttacggtgtttattttccaatcaagtgaagatatctcctacttctcctactggaacatctcagcttctgcagtgaagaaaaattcctgtgatagttcagttctttagtttttctatttgaaaaaaaaaaatcatttaaatgatcctttgttcacggctctccttaatgactgagtgaacagttcctatctgtatatttgactaaaccttttcctaagctatctctcatggttcctatgtttttttatcataattaaaagcaaaaccatctggatcacctaacagtcagaggtcagtatctcagcgtgtgaattatagaggaaatacagagagaacctcttccacttttacttttcgtccaaataaaatgcatggtgtaccagaagttgaagatcgggttgaggattggggctagctcgatgacactaaggccccaacatcgcgggacctgctgtggcgcggattcttaggaacgctgttctagccggccccctctccaggggtcgccgtggccggcattatttcctagttcttcttgtaaccctgaggtgccagcgcggggagtgaggaggggtcagggggctaaggatgcaacctctgacgttctgcgccttcctaggagagtcttacatgtgttgagatttcacaagcaatgcgagttgtaaaataccagctctacaagaagctaggctctgtgacggcatagttttcagtagctttatcacaatattcacaatggagaattatatgacatggtagcagaaataggcccttttatgtgttgcttctattttacctcaaattgtagatatagggtaatcaataaaatccatccatgcctttcacacactaagt

SEQ ID NO: 5173 - protein, 538 aa, Homo sapiens; identical to SEQ ID NO: 4183

SEQ ID NO: 5174 - DNA, 3661 bp, Homo sapiens
gggtcttgttctgtctcccaagctggagtgcagtggtgtggtcataggtcactgcagcgtcgaactcctaggctcaagtgatcctcttgcctcaggctcctgagtagctgggacaacaggcgtgtaccacacctggatactttttaaatttttggtagagaagggatctcactctattgccaagctggtgtcgaactcttggtcttaagcagccctcccacgtcagcatcccaaagtgttgggatttcagagggatcatggcccaagttgcaatgtccaccctccccgttgaagatgaggagtcctcggagagcaggatggtggtgacattcctcatgtcagctctcgagtccatgtgtaaagaactggccaagtccaaagccgaagtggcctgcattgcagtgtatgaaacagacgtgtttgtcgtcggaactgaaagaggacgtgcttttgtcaataccagaaaggattttcaaaaagattttgtaaaatattgtgttgaagaagaagaaaaagctgcagagatgcataaaatgaaatctacaacccaggcaaatcggatgagtgtagatgctgtagaaattgaaacactcagaaaaacagttgaggactatttctgcttttgctatgggaaagctttaggcaaatccacagtggtacctgtaccatatgagaagatgctgcgagaccagtcggctgtggtagtgcaggggcttccggaaggtgttgcctttaaacaccccgagaactatgatcttgcaaccctgaaatggattttggagaacaaagcagggatttcattcatcattaagagaccttttttagagccaaagaagcatgtaggtggtcgtgtgatggtaacagatgctgacaggtcaatactatctccaggtggaagttgtggccccatcaaagtgaaaactgaacccacagaagattctggaagccaccattcttcagagggcaatgaaggcacagaaatggaagtaccagcagaagattctactcaacatgtcccttcagaaacaagtgaggaccctgaagttgaggtgactattgaagatgatgattattctccaccgtctaagagaccaaaggccaatgagctaccgcagccaccagtcccggaacccgccaatgctgggaagcggaaagtgagggagttcaacttcgagaaatggaatgctcgcatcactgatctacgtaaacaagttgaagaattgtttgaaaggaaatatgctcaagccataaaagccaaaggtccggtgacgatcccgtaccctcttttccagtctcatgttgaagatctttatgtagaaggacttcctgaaggaattccttttagaaggccatctacttacggaattcctcgcctggagaggatattacttgcaaaggaaaggattcgttttgtgattaagaaacatgagcttctgaattcaacacgtgaagatttacagcttgataagccagcttcaggagtaaaggaagaatggtatgccagaatcactaaattaagaaagatggtggatcagcttttctgcaaaaaatttgcggaagccttggggagcactgaagccaaggctgtaccgtaccaaaaatttgaggcacacccgaatgatctgtacgtggaaggactgccagaaaacattcctttccgaagtccctcatggtatggaatcccaaggctggaaaaaatcattcaagtgggcaatcgaattaaatttgttattaaaagaccagaacttctgactcacagtaccactgaagttactcagccaagaacgaatacaccagtcaaagaagattggaatgtcagaattaccaagctacggaagcaagtggaagagatttttaatttgaaatttgctcaagctcttggactcaccgaggcagtaaaagtaccatatcctgtgtttgaatcaaacccggagttcttgaaaggatcgtccgcgggagtaataaaatcaagttcgttgttaaaaaacctgaactagttatttcctacttgcctcctgggatggctagtaaaataaacactaaagctttgcagtcccccaaaagaccacgaagtcctgggagtaattcaaaggttcctgaaattgaggtcaccgtggaaggccctaataacaacaatcctcaaacctcagctgttcgaaccccgacccagactaacggttctaacgttcccttcaagccacgagggagagagttttcctttgaggcctggaatgccaaaatcacggacctaaaacagaaagttgaaaatctcttcaatgagaaatgtggggaagctcttggccttaaacaagctgtgaaggtgccgttcgcgttatttgagtctttcccggaagacttttatgtggaaggcttacctgagggtgtgccattccgaagaccatcgacttttggcattccgaggctggagaagatactcagaaacaaagccaaaattaagttcatcattaaaaagcccgaaatgtttgagacggcgattaaggagagcacctcctctaagagccctcccagaaaaataaattcatcacccaatgttaatactactgcatcaggtgttgaagaccttaacatcattcaggtgacaattccagatgatgataatgaaagactctcgaaagttgaaaaagctagacagctaagagaacaagtgaatgacctctttagtcggaaatttggtgaagctattggtatgggttttcctgtgaaagttccctacaggaaaatcacaattaaccctggctgtgtggtggttgatggcatgcccccgggggtgtccttcaaagcccccagctacctggaaatcagctccatgagaaggatcttagactctgccgagtttatcaaattcacggtcattagaccatttccaggacttgtgattaataaccagctggttgatcagagtgagtcagaaggccccgtgatacaagaatcagctgaaccaagccagttggaagttccagccacagaagaaataaaagagactgatggaagctctcagatcaagcaagaaccagaccccacgtggtagacctcttccctcctaggcaaaaccatctggatcacctaacagtcagaggtcagtatctcagcgtgtgaattatagaggaaatacagagagaacctcttccacttttacttttcgtccaaataaaatgcatggtgtaccagaagttgaagatcgggttgaggattggggctagctcgatgacactaaggccccaacatcgcgggacctgctgtggcgcggattcttaggaacgctgttctagccggccccctctccaggggtcgccgtggccggcattatttcctagttcttcttgtaaccctgaggtgccagcgcggggagtgaggaggggtcagggggctaaggatgcaacctctgacgttctgcgccttcctaggagagtcttacatgtgttgagatttcacaagcaatgcgagttgtaaaataccagctctacaagaagctaggctctgtgacggcatagttttcagtagctttatcacaatattcacaatggagaattatatgacatggtagcagaaataggcccttttatgtgttgcttctattttacctcaaattgtagatatagggtaatcaataaaatccatccatgcctttcacacactaagt

SEQ ID NO: 5175 - protein, 579 aa, Homo sapiens; identical to SEQ ID NO: 4111

SEQ ID NO: 5176 - DNA, 7736 bp, Homo sapiens
gggtcttgttctgtctcccaagctggagtgcagtggtgtggtcataggtcactgcagcgtcgaactcctaggctcaagtgatcctcttgcctcaggctcctgagtagctgggacaacaggcgtgtaccacacctggatactttttaaatttttggtagagaagggatctcactctattgccaagctggtgtcgaactcttggtcttaagcagccctcccacgtcagcatcccaaagtgttgggatttcagagggatcatggcccaagttgcaatgtccaccctccccgttgaagatgaggagtcctcggagagcaggatggtggtgacattcctcatgtcagctctcgagtccatgtgtaaagaactggccaagtccaaagccgaagtggcctgcattgcagtgtatgaaacagacgtgtttgtcgtcggaactgaaagaggacgtgcttttgtcaataccagaaaggattttcaaaaagattttgtaaaatattgtgttgaagaagaagaaaaagctgcagagatgcataaaatgaaatctacaacccaggcaaatcggatgagtgtagatgctgtagaaattgaaacactcagaaaaacagttgaggactatttctgcttttgctatgggaaagctttaggcaaatccacagtggtacctgtaccatatgagaagatgctgcgagaccagtcggctgtggtagtgcaggggcttccggaaggtgttgcctttaaacaccccgagaactatgatcttgcaaccctgaaatggattttggagaacaaagcagggatttcattcatcattaagagaccttttttagagccaaagaagcatgtaggtggtcgtgtgatggtaacagatgctgacaggtcaatactatctccaggtggaagttgtggccccatcaaagtgaaaactgaacccacagaagattctggcatttccctggaaatggcagctgtgacagtaaaggaagaatcagaagatcctgattattatcaatataacattcaagcaggcccttctgaaactgatgatgttgatgaaaaacagcccctatcgaagcctttgcaaggaagccaccattcttcagagggcaatgaaggcacagaaatggaagtaccagcagaagatgatgattattctccaccgtctaagagaccaaaggccaatgagctaccgcagccaccagtcccggaacccgccaatgctgggaagcggaaagtgagggagttcaacttcgagaaatggaatgctcgcatcactgatctacgtaaacaagttgaagaattgtttgaaaggaaatatgctcaagccataaaagccaaaggtccggtgacgatcccgtaccctcttttccagtctcatgttgaagatctttatgtagaaggacttcctgaaggaattccttttagaaggccatctacttacggaattcctcgcctggagaggatattacttgcaaaggaaaggattcgttttgtgattaagaaacatgagcttctgaattcaacacgtgaagatttacagcttgataagccagcttcaggagtaaaggaagaatggtatgccagaatcactaaattaagaaagatggtggatcagcttttctgcaaaaaatttgcggaagccttggggagcactgaagccaaggctgtaccgtaccaaaaatttgaggcacacccgaatgatctgtacgtggaaggactgccagaaaacattcctttccgaagtccctcatggtatggaatcccaaggctggaaaaaatcattcaagtgggcaatcgaattaaatttgttattaaaagaccagaacttctgactcacagtaccactgaagttactcagccaagaacgaatacaccagctcaagctcttggactcaccgaggcagtaaaagtaccatatcctgtgtttgaatcaaacccggagttcttgtatgtggaaggcttgccagaggggattcccttccgaagccctacctggtttggaattccacgacttgaaaggatcgtccgcgggagtaataaaatcaagttcgttgttaaaaaacctgaactagttatttcctacttgcctcctgggatggctagtaaaataaacactaaagctttgcagtcccccaaaagaccacgaagtcctgggagtaattcaaaggttcctgaaattgaggtcaccgtggaaggccctaataacaacaatcctcaaacctcagctgttcgaaccccgacccagactaacggttctaacgttcccttcaagccacgagggagagagttttcctttgaggcctggaatgccaaaatcacggacctaaaacagaaagttgaaaatctcttcaatgagaaatgtggggaagctcttggccttaaacaagctgtgaaggtgccgttcgcgttatttgagtctttcccggaagacttttatgtggaaggcttacctgagggtgtgccattccgaagaccatcgacttttggcattccgaggctggagaagatactcagaaacaaagccaaaattaagttcatcattaaaaagcccgaaatgtttgagacggcgattaaggagagcacctcctctaagagccctcccagaaaaataaattcatcacccaatgttaatactactgcatcaggtgttgaagaccttaacatcattcaggtgacaattccagatgatgataatgaaagactctcgaaagttgaaaaagctagacagctaagagaacaagtgaatgacctctttagtcggaaatttggtgaagctattggtatgggttttcctgtgaaagttccctacaggaaaatcacaattaaccctggctgtgtggtggttgatggcatgcccccgggggtgtccttcaaagcccccagctacctggaaatcagctccatgagaaggatcttagactctgccgagtttatcaaattcacggtcattaggtaagtgagagtttcctgcttagtcacaggagcgaatctggagctcatgaggctgactcttctaaaatgcagccacaggtagtcatcgaatccggcttcctatgctgtgcaatcaacaaatcaaaataacttgtgtcatcattagaatgtcagatgtgcttctacgaactaagctgactcttttaattctttggcaaagggttggcaaactaggactgtttgccaaattcaggctgcctcctatttttagagtcttcctgaaacacagctacacccgtattatccatggctgctttcctgtcacagtgagtaagtagctgggactgagaaggcatggcctccaaagtctaaaatatttactctctagcactttgtagaaaaaccttagctaggcacagtggctaacgcctgtaatcccagcattttgggaggccaaggcaggcagatcacctgaggtcaggagttccagaccagcctggccaacatggtgaaatcccatctctacaaaaataaaacagttagctgggcatgatggcgggtgcctgtaatcccagctactcgggaggctgaggcaggatagtcgcttgaacccaggaggtggaggttgcaatgagccaagatcatgccactgcactccagcctggacgacagagtgagactccatcacaagaaaaaaagaactttgtcaacctctgtcttagggcgccttgtcacaggcttcgggtcagacggattcaaccttgcatcagccatttgttagccaggtcactctgttctttgtctgtaaatgagattgatcgttgttcccactgagagtgtcagctccttcccgtagagcaggcatgatgattgtactcacctctgacaccattgtgagtgccacattccttcccacgtccttgtcactgtaagagatgcccacctgagcaccaaccccaggttatcttcccctttgtcttccagccccccagaaacagctacgactcaacctacccaatcatttcatcatcagattgccactgtctctagttcaggtctcttgggactggcactcagaaatctcataataaatcctcttgaggcttctcatacactcgtcttcttccaatcttctttccctcaaaatctcatattttggttccacttcacccaccgtcattctccatatcactcccaggagttaggcaaaaagccccttccgttcttccgtatgttaaacttagaatcactctgttccctgctctgcgtttctattttttgtttttcctccatttactagtagcttaacactttctaacagtgttcttattattgatacgtatctatctcttccataagcttataaggtcacggataatacttctcattgtagtacgtaaatgacgtgggctagatatgagttgaataaacagttatacctgtaaattcttacagagtgaaaataaattgttatactttacaatttgtttctctctttagaccatttccaggacttgtgattaataaccgtgagtattttgtgaagtgttttgtttttgttttttcctggggtctgacgtgtgtgcgtgtgagtgtgtatacatgcttaacgtatatcacgttacttcacctatgtcagtaaccaggccaaatacttgttttagccctcagtaaaaacaccaggcacttcctagttgtaaaattattcaagcttcttaacttcctatcctcgatgcacttaatcataaaatggtaataatagcaccgattttgggggagtcgttccagtagatggaaagcatctggaacaggtgtcagcaagctcctgccgacgtgtatgcataaagttttattgaaaccaccatcgtgtccatttgtttatggcagaactgagagatggcagcagcaagtgtgtgcctgcaaaacctaaaatatttactaattggctctgcaagaaaagagtttgcatccccctaacctagaacagtgtctagcctctagtatgtgtttagcctacagtatgtgctcagcgaatacaatctatatttattactgcttttatgactgttataattactgtgcttggatttcgttacaaagtaagtcacaatgtgcctgcttctgttagtatttcagcacagtgcctggcacacatggggctctcaaatattgctgagcgagtgaacaaatgtcctttcaattccttaacgttgatgtcattttcaatagtattttgagccaaacttaattttgcgagtgtgttttgttttcttaactttattattaaaaatgtataaaagtgaggccaggcgtggtggctcacgcctgtaatcccagcagtttgggaggctgaggcaggcggatcagttgaggttgggagttggagaccagcccgtccaacatggtgaaagcctgtctctactaaaaatacaaaaatcagctgggtgtggtggcgcgtgcctgtaatcccagctactcaggaggctgaggcaggagagttgcttgaatcctagaggtggaggttgcagtgagctgagatcgtgccattgcactccagcctgggcaacaagagcaaaactctgtcccaataaataaataaataaaatgttctcttttgttcctgttcttgtgcggtagtgtggtatagagttttatggtaattactgtgaattagtgattctgagggacatatcagaactctgaggtttgtttccttctcatcttgagggaaacagcaaatgtatgttaaaatgcttttccaagggaacaacacatccttacattatttaaaccaatctgcttcattttcagagctggttgatcagagtgagtcagaaggccccgtgatacaagaatcagctgaaccaagccagttggaagttccagccacagaagaaataaaagagactgatggaagctctcagatcaagcaagaaccagaccccacgtggtagacctcttccctcctagggtaaatcagcttctgtgtcagggatgctgtgtggtgtccatctgaaccccctgcatacgcgtagctaatgtgatctccccactttcacataagatggtggccctgccttcagggaatgtgggagccaggtgggagccttcccggatatttaagctagaagattctacagggagattctccttggatcaatatatgtctctcagtcaaagatgtaaaagcacttttgccttaaaaagaatgttctgtttctaaatagagtcaacgttgtcctcctcattggaattcactatgagtcagaatcattagactgacttttttttttccatagtaatagtattttgcagagtctcacagagctgcagatcttttgttcatcttgcagagttaacaagtctgatcctgttagtccagatttcttaaatttggccaagttataataggagcagtagcttgagacccgaagtcaggaaactttgacaatggatttttttttttaatccagagacttgtactggaatttgccttaccctgtcagctcatggacttaaggtttcatcccgctttatgagtgcttctgaatccaagtcattgttacctgaatttgcaaattaagttgtgatattcgtgactgttaaattcctgtaattagattaacctctttgcttgcttgtttgttttctctcctattttagcttaaagtatcagtggttgagaagagcttttcggacctgttactaccccaagctgtgtaatatacttgtataacagaaataccttctatacaaacctttttttctacttttagatagaaatgtctactttttcagcagttctgtgaattaaagagcagagtgactgtgggtctggaatggctggtgtacttgggaatgtactatcaggattttacagcaatgctgggaaatgacagggaaaatgacaggaatgaatctcaccagattttttatgtactcagcagagccttgagttacggtgtttattttccaatcaagtgaagatatctcctacttctcctactggaacatctcagcttctgcagtgaagaaaaattcctgtgatagttcagttctttagtttttctatttgaaaaaaaaaaatcatttaaatgatcctttgttcacggctctccttaatgactgagtgaacagttcctatctgtatatttgactaaaccttttcctaagctatctctcatggttcctatgtttttttatcataattaaaagcaaaaccatctggatcacctaacagtcagaggtcagtatctcagcgtgtgaattatagaggaaatacagagagaacctcttccacttttacttttcgtccaaataaaatgcatggtgtaccagaagttgaagatcgggttgaggattggggctagctcgatgacactaaggccccaacatcgcgggacctgctgtggcgcggattcttaggaacgctgttctagccggccccctctccaggggtcgccgtggccggcattatttcctagttcttcttgtaaccctgaggtgccagcgcggggagtgaggaggggtcagggggctaaggatgcaacctctgacgttctgcgccttcctaggagagtcttacatgtgttgagatttcacaagcaatgcgagttgtaaaataccagctctacaagaagctaggctctgtgacggcatagttttcagtagctttatcacaatattcacaatggagaattatatgacatggtagcagaaataggcccttttatgtgttgcttctattttacctcaaattgtagatatagggtaatcaataaaatccatccatgcctttcacacactaagt

SEQ ID NO: 5177 - protein, 897 aa, Homo sapiens; identical to SEQ ID NO: 4087

SEQ ID NO: 5178 - DNA, 3794 bp, Homo sapiens
gggtcttgttctgtctcccaagctggagtgcagtggtgtggtcataggtcactgcagcgtcgaactcctaggctcaagtgatcctcttgcctcaggctcctgagtagctgggacaacaggcgtgtaccacacctggatactttttaaatttttggtagagaagggatctcactctattgccaagctggtgtcgaactcttggtcttaagcagccctcccacgtcagcatcccaaagtgttgggatttcagagggatcatggcccaagttgcaatgtccaccctccccgttgaagatgaggagtcctcggagagcaggatggtggtgacattcctcatgtcagctctcgagtccatgtgtaaagaactggccaagtccaaagccgaagtggcctgcattgcagtgtatgaaacagacgtgtttgtcgtcggaactgaaagaggacgtgcttttgtcaataccagaaaggattttcaaaaagattttgtaaaatattgtgttgaagaagaagaaaaagctgcagagatgcataaaatgaaatctacaacccaggcaaatcggatgagtgtagatgctgtagaaattgaaacactcagaaaaacagttgaggactatttctgcttttgctatgggaaagctttaggcaaatccacagtggtacctgtaccatatgagaagatgctgcgagaccagtcggctgtggtagtgcaggggcttccggaaggtgttgcctttaaacaccccgagaactatgatcttgcaaccctgaaatggattttggagaacaaagcagggatttcattcatcattaagagaccttttttagagccaaagaagcatgtaggtggtcgtgtgatggtaacagatgctgacaggtcaatactatctccaggtggaagttgtggccccatcaaagtgaaaactgaacccacagaagattctggcatttccctggaaatggcagctgtgacagtaaaggaagaatcagaagatcctgattattatcaatataacattcaagcaggcccttctgaaactgatgatgttgatgaaaaacagcccctatcgaagcctttgcaaggaagccaccattcttcagagggcaatgaaggcacagaaatggaagtaccagcagaagattctactcaacatgtcccttcagaaacaagtgaggaccctgaagttgaggtgactattgaagatgatgattattctccaccgtctaagagaccaaaggccaatgagctaccgcagccaccagtcccggaacccgccaatgctgggaagcggaaagtgagggagttcaacttcgagaaatggaatgctcgcatcactgatctacgtaaacaagttgaagaattgtttgaaaggaaatatgctcaagccataaaagccaaaggtccggtgacgatcccgtaccctcttttccagtctcatgttgaagatctttatgtagaaggacttcctgaaggaattccttttagaaggccatctacttacggaattcctcgcctggagaggatattacttgcaaaggaaaggattcgttttgtgattaagaaacatgagcttctgaattcaacacgtgaagatttacagcttgataagccagcttcaggagtaaaggaagaatggtatgccagaatcactaaattaagaaagatggtggatcagcttttctgcaaaaaatttgcggaagccttggggagcactgaagccaaggctgtaccgtaccaaaaatttgaggcacacccgaatgatctgtacgtggaaggactgccagaaaacattcctttccgaagtccctcatggtatggaatcccaaggctggaaaaaatcattcaagtgggcaatcgaattaaatttgttattaaaagaccagaacttctgactcacagtaccactgaagttactcagccaagaacgaatacaccagctcaagctcttggactcaccgaggcagtaaaagtaccatatcctgtgtttgaatcaaacccggagttcttgtatgtggaaggcttgccagaggggattcccttccgaagccctacctggtttggaattccacgacttgaaaggatcgtccgcgggagtaataaaatcaagttcgttgttaaaaaacctgaactagttatttcctacttgcctcctgggatggctagtaaaataaacactaaagctttgcagtcccccaaaagaccacgaagtcctgggagtaattcaaaggttcctgaaattgaggtcaccgtggaaggccctaataacaacaatcctcaaacctcagctgttcgaaccccgacccagactaacggttctaacgttcccttcaagccacgagggagagagttttcctttgaggcctggaatgccaaaatcacggacctaaaacagaaagttgaaaatctcttcaatgagaaatgtggggaagctcttggccttaaacaagctgtgaaggtgccgttcgcgttatttgagtctttcccggaagacttttatgtggaaggcttacctgagggtgtgccattccgaagaccatcgacttttggcattccgaggctggagaagatactcagaaacaaagccaaaattaagttcatcattaaaaagcccgaaatgtttgagacggcgattaaggagagcacctcctctaagagccctcccagaaaaataaattcatcacccaatgttaatactactgcatcaggtgttgaagaccttaacatcattcaggtgacaattccagatgatgataatgaaagactctcgaaagttgaaaaagctagacagctaagagaacaagtgaatgacctctttagtcggaaatttggtgaagctattggtatgggttttcctgtgaaagttccctacaggaaaatcacaattaaccctggctgtgtggtggttgatggcatgcccccgggggtgtccttcaaagcccccagctacctggaaatcagctccatgagaaggatcttagactctgccgagtttatcaaattcacggtcattagaccatttccaggacttgtgattaataaccagctggttgatcagagtgagtcagaaggccccgtgatacaagaatcagctgaaccaagccagttggaagttccagccacagaagaaataaaagagactgatggaagctctcagatcaagcaagaaccagaccccacgtggtagacctcttccctcctaggcaaaaccatctggatcacctaacagtcagaggtcagtatctcagcgtgtgaattatagaggaaatacagagagaacctcttccacttttacttttcgtccaaataaaatgcatggtgtaccagaagttgaagatcgggttgaggattggggctagctcgatgacactaaggccccaacatcgcgggacctgctgtggcgcggattcttaggaacgctgttctagccggccccctctccaggggtcgccgtggccggcattatttcctagttcttcttgtaaccctgaggtgccagcgcggggagtgaggaggggtcagggggctaaggatgcaacctctgacgttctgcgccttcctaggagagtcttacatgtgttgagatttcacaagcaatgcgagttgtaaaataccagctctacaagaagctaggctctgtgacggcatagttttcagtagctttatcacaatattcacaatggagaattatatgacatggtagcagaaataggcccttttatgtgttgcttctattttacctcaaattgtagatatagggtaatcaataaaatccatccatgcctttcacacactaagt

SEQ ID NO: 5179 - protein, 974 aa, Homo sapiens; identical to SEQ ID NO: 4101

SEQ ID NO: 5180 - DNA, 4190 bp, Homo sapiens
gggtcttgttctgtctcccaagctggagtgcagtggtgtggtcataggtcactgcagcgtcgaactcctaggctcaagtgatcctcttgcctcaggctcctgagtagctgggacaacaggcgtgtaccacacctggatactttttaaatttttggtagagaagggatctcactctattgccaagctggtgtcgaactcttggtcttaagcagccctcccacgtcagcatcccaaagtgttgggatttcagagggatcatggcccaagttgcaatgtccaccctccccgttgaagatgaggagtcctcggagagcaggatggtggtgacattcctcatgtcagctctcgagtccatgtgtaaagaactggccaagtccaaagccgaagtggcctgcattgcagtgtatgaaacagacgtgtttgtcgtcggaactgaaagaggacgtgcttttgtcaataccagaaaggattttcaaaaagattttgtaaaatattgtgttgaagaagaagaaaaagctgcagagatgcataaaatgaaatctacaacccaggcaaatcggatgagtgtagatgctgtagaaattgaaacactcagaaaaacagttgaggactatttctgcttttgctatgggaaagctttaggcaaatccacagtggtacctgtaccatatgagaagatgctgcgagaccagtcggctgtggtagtgcaggggcttccggaaggtgttgcctttaaacaccccgagaactatgatcttgcaaccctgaaatggattttggagaacaaagcagggatttcattcatcattaagagaccttttttagagccaaagaagcatgtaggtggtcgtgtgatggtaacagatgctgacaggtcaatactatctccaggtggaagttgtggccccatcaaagtgaaaactgaacccacagaagattctggcatttccctggaaatggcagctgtgacagtaaaggaagaatcagaagatcctgattattatcaatataacattcaagcaggcccttctgaaactgatgatgttgatgaaaaacagcccctatcgaagcctttgcaaggaagccaccattcttcagagggcaatgaaggcacagaaatggaagtaccagcagaagattctactcaacatgtcccttcagaaacaagtgaggaccctgaagttgaggtgactattgaagatgatgattattctccaccgtctaagagaccaaaggccaatgagctaccgcagccaccagtcccggaacccgccaatgctgggaagcggaaagtgagggagttcaacttcgagaaatggaatgctcgcatcactgatctacgtaaacaagttgaagaattgtttgaaaggaaatatgctcaagccataaaagccaaaggtccggtgacgatcccgtaccctcttttccagtctcatgttgaagatctttatgtagaaggacttcctgaaggaattccttttagaaggccatctacttacggaattcctcgcctggagaggatattacttgcaaaggaaaggattcgttttgtgattaagaaacatgagcttctgaattcaacacgtgaagatttacagcttgataagccagcttcaggagtaaaggaagaatggtatgccagaatcactaaattaagaaagatggtggatcagcttttctgcaaaaaatttgcggaagccttggggagcactgaagccaaggctgtaccgtaccaaaaatttgaggcacacccgaatgatctgtacgtggaaggactgccagaaaacattcctttccgaagtccctcatggtatggaatcccaaggctggaaaaaatcattcaagtgggcaatcgaattaaatttgttattaaaagaccagaacttctgactcacagtaccactgaagttactcagccaagaacgaatacaccagtcaaagaagattggaatgtcagaattaccaagctacggaagcaagtggaagagatttttaatttgaaatttgctcaagctcttggactcaccgaggcagtaaaagtaccatatcctgtgtttgaatcaaacccggagttcttgtatgtggaaggcttgccagaggggattcccttccgaagccctacctggtttggaattccacgacttgaaaggatcgtccgcgggagtaataaaatcaagttcgttgttaaaaaacctgaactagttatttcctacttgcctcctgggatggctagtaaaataaacactaaagctttgcagtcccccaaaagaccacgaagtcctgggagtaattcaaaggttcctgaaattgaggtcaccgtggaaggccctaataacaacaatcctcaaacctcagctgttcgaaccccgacccagactaacggttctaacgttcccttcaagccacgagggagagagttttcctttgaggcctggaatgccaaaatcacggacctaaaacagaaagttgaaaatctcttcaatgagaaatgtggggaagctcttggccttaaacaagctgtgaaggtgccgttcgcgttatttgagtctttcccggaagacttttatgtggaaggcttacctgagggtgtgccattccgaagaccatcgacttttggcattccgaggctggagaagatactcagaaacaaagccaaaattaagttcatcattaaaaagcccgaaatgtttgagacggcgattaaggagagcacctcctctaagagccctcccagaaaaataaattcatcacccaatgttaatactactgcatcaggtgttgaagaccttaacatcattcaggtgacaattccagatgatgataatgaaagactctcgaaagttgaaaaagctagacagctaagagaacaagtgaatgacctctttagtcggaaatttggtgaagctattggtatgggttttcctgtgaaagttccctacaggaaaatcacaattaaccctggctgtgtggtggttgatggcatgcccccgggggtgtccttcaaagcccccagctacctggaaatcagctccatgagaaggatcttagactctgccgagtttatcaaattcacggtcattagaccatttccaggacttgtgattaataaccagctggttgatcagagtgagtcagaaggccccgtgatacaagaatcagctgaaccaagccagttggaagttccagccacagaagaaataaaagagactgatggaagctctcagatcaagcaagaaccagaccccacgtggtagacctcttccctcctaggcttaaagtatcagtggttgagaagagcttttcggacctgttactaccccaagctgtagccttgagttacggtgtttattttccaatcaagtgaagatatctcctacttctcctactggaacatctcagcttctgcagtgaagaaaaattcctgtgatagttcagttctttagtttttctatttgaaaaaaaaaaatcatttaaatgatcctttgttcacggctctccttaatgactgagtgaacagttcctatctgtatatttgactaaaccttttcctaagctatctctcatggttcctatgtttttttatcataattaaaagcaaaaccatctggatcacctaacagtcagaggtcagtatctcagcgtgtgaattatagaggaaatacagagagaacctcttccacttttacttttcgtccaaataaaatgcatggtgtaccagaagttgaagatcgggttgaggattggggctagctcgatgacactaaggccccaacatcgcgggacctgctgtggcgcggattcttaggaacgctgttctagccggccccctctccaggggtcgccgtggccggcattatttcctagttcttcttgtaaccctgaggtgccagcgcggggagtgaggaggggtcagggggctaaggatgcaacctctgacgttctgcgccttcctaggagagtcttacatgtgttgagatttcacaagcaatgcgagttgtaaaataccagctctacaagaagctaggctctgtgacggcatagttttcagtagctttatcacaatattcacaatggagaattatatgacatggtagcagaaataggcccttttatgtgttgcttctattttacctcaaattgtagatatagggtaatcaataaaatccatccatgcctttcacacactaagt

SEQ ID NO: 5181 - protein, 998 aa, Homo sapiens; identical to SEQ ID NO: 468

SEQ ID NO: 5182 - DNA, 6969 bp, Homo sapiens
gggtcttgttctgtctcccaagctggagtgcagtggtgtggtcataggtcactgcagcgtcgaactcctaggctcaagtgatcctcttgcctcaggctcctgagtagctgggacaacaggcgtgtaccacacctggatactttttaaatttttggtagagaagggatctcactctattgccaagctggtgtcgaactcttggtcttaagcagccctcccacgtcagcatcccaaagtgttgggatttcagagggatcatggcccaagttgcaatgtccaccctccccgttgaagatgaggagtcctcggagagcaggatggtggtgacattcctcatgtcagctctcgagtccatgtgtaaagaactggccaagtccaaagccgaagtggcctgcattgcagtgtatgaaacagacgtgtttgtcgtcggaactgaaagaggacgtgcttttgtcaataccagaaaggattttcaaaaagattttgtaaaatattgtgttgaagaagaagaaaaagctgcagagatgcataaaatgaaatctacaacccaggcaaatcggatgagtgtagatgctgtagaaattgaaacactcagaaaaacagttgaggactatttctgcttttgctatgggaaagctttaggcaaatccacagtggtacctgtaccatatgagaagatgctgcgagaccagtcggctgtggtagtgcaggggcttccggaaggtgttgcctttaaacaccccgagaactatgatcttgcaaccctgaaatggattttggagaacaaagcagggatttcattcatcattaagagaccttttttagagccaaagaagcatgtaggtggtcgtgtgatggtaacagatgctgacaggtcaatactatctccaggtggaagttgtggccccatcaaagtgaaaactgaacccacagaagattctggaagccaccattcttcagagggcaatgaaggcacagaaatggaagtaccagcagaagattctactcaacatgtcccttcagaaacaagtgaggaccctgaagttgaggtgactattgaagatgatgattattctccaccgtctaagagaccaaaggccaatgagctaccgcagccaccagtcccggaacccgccaatgctgggaagcggaaagtgagggagttcaacttcgagaaatggaatgctcgcatcactgatctacgtaaacaagttgaagaattgtttgaaaggaaatatgctcaagccataaaagccaaaggtccggtgacgatcccgtaccctcttttccagtctcatgttgaagatctttatgtagaaggacttcctgaaggaattccttttagaaggccatctacttacggaattcctcgcctggagaggatattacttgcaaaggaaaggattcgttttgtgattaagaaacatgagcttctgaattcaacacgtgaagatttacagcttgataagccagcttcaggagtaaaggaagaatggtatgccagaatcactaaattaagaaagatggtggatcagcttttctgcaaaaaatttgcggaagccttggggagcactgaagccaaggctgtaccgtaccaaaaatttgaggcacacccgaatgatctgtacgtggaaggactgccagaaaacattcctttccgaagtccctcatggtatggaatcccaaggctggaaaaaatcattcaagtgggcaatcgaattaaatttgttattaaaagaccagaacttctgactcacagtaccactgaagttactcagccaagaacgaatacaccagctcaagctcttggactcaccgaggcagtaaaagtaccatatcctgtgtttgaatcaaacccggagttcttgtatgtggaaggcttgccagaggggattcccttccgaagccctacctggtttggaattccacgacttgaaaggatcgtccgcgggagtaataaaatcaagttcgttgttaaaaaacctgaactagttatttcctacttgcctcctgggatggctagtaaaataaacactaaagctttgcagtcccccaaaagaccacgaagtcctgggagtaattcaaaggttcctgaaattgaggtcaccgtggaaggccctaataacaacaatcctcaaacctcagctgttcgaaccccgacccagactaacggttctaacgttcccttcaagccacgagggagagagttttcctttgaggcctggaatgccaaaatcacggacctaaaacagaaagttgaaaatctcttcaatgagaaatgtggggaagctcttggccttaaacaagctgtgaaggtgccgttcgcgttatttgagtctttcccggaagacttttatgtggaaggcttacctgagggtgtgccattccgaagaccatcgacttttggcattccgaggctggagaagatactcagaaacaaagccaaaattaagttcatcattaaaaagcccgaaatgtttgagacggcgattaaggagagcacctcctctaagagccctcccagaaaaataaattcatcacccaatgttaatactactgcatcaggtgttgaagaccttaacatcattcaggtgacaattccagatgatgataatgaaagactctcgaaagttgaaaaagctagacagctaagagaacaagtgaatgacctctttagtcggaaatttggtgaagctattggtatgggttttcctgtgaaagttccctacaggaaaatcacaattaaccctggctgtgtggtggttgatggcatgcccccgggggtgtccttcaaagcccccagctacctggaaatcagctccatgagaaggatcttagactctgccgagtttatcaaattcacggtcattaggtaagtgagagtttcctgcttagtcacaggagcgaatctggagctcatgaggctgactcttctaaaatgcagccacaggtagtcatcgaatccggcttcctatgctgtgcaatcaacaaatcaaaataacttgtgtcatcattagaatgtcagatgtgcttctacgaactaagctgactcttttaattctttggcaaagggttggcaaactaggactgtttgccaaattcaggctgcctcctatttttagagtcttcctgaaacacagctacacccgtattatccatggctgctttcctgtcacagtgagtaagtagctgggactgagaaggcatggcctccaaagtctaaaatatttactctctagcactttgtagaaaaaccttagctaggcacagtggctaacgcctgtaatcccagcattttgggaggccaaggcaggcagatcacctgaggtcaggagttccagaccagcctggccaacatggtgaaatcccatctctacaaaaataaaacagttagctgggcatgatggcgggtgcctgtaatcccagctactcgggaggctgaggcaggatagtcgcttgaacccaggaggtggaggttgcaatgagccaagatcatgccactgcactccagcctggacgacagagtgagactccatcacaagaaaaaaagaactttgtcaacctctgtcttagggcgccttgtcacaggcttcgggtcagacggattcaaccttgcatcagccatttgttagccaggtcactctgttctttgtctgtaaatgagattgatcgttgttcccactgagagtgtcagctccttcccgtagagcaggcatgatgattgtactcacctctgacaccattgtgagtgccacattccttcccacgtccttgtcactgtaagagatgcccacctgagcaccaaccccaggttatcttcccctttgtcttccagccccccagaaacagctacgactcaacctacccaatcatttcatcatcagattgccactgtctctagttcaggtctcttgggactggcactcagaaatctcataataaatcctcttgaggcttctcatacactcgtcttcttccaatcttctttccctcaaaatctcatattttggttccacttcacccaccgtcattctccatatcactcccaggagttaggcaaaaagccccttccgttcttccgtatgttaaacttagaatcactctgttccctgctctgcgtttctattttttgtttttcctccatttactagtagcttaacactttctaacagtgttcttattattgatacgtatctatctcttccataagcttataaggtcacggataatacttctcattgtagtacgtaaatgacgtgggctagatatgagttgaataaacagttatacctgtaaattcttacagagtgaaaataaattgttatactttacaatttgtttctctctttagaccatttccaggacttgtgattaataaccgtgagtattttgtgaagtgttttgtttttgttttttcctggggtctgacgtgtgtgcgtgtgagtgtgtatacatgcttaacgtatatcacgttacttcacctatgtcagtaaccaggccaaatacttgttttagccctcagtaaaaacaccaggcacttcctagttgtaaaattattcaagcttcttaacttcctatcctcgatgcacttaatcataaaatggtaataatagcaccgattttgggggagtcgttccagtagatggaaagcatctggaacaggtgtcagcaagctcctgccgacgtgtatgcataaagttttattgaaaccaccatcgtgtccatttgtttatggcagaactgagagatggcagcagcaagtgtgtgcctgcaaaacctaaaatatttactaattggctctgcaagaaaagagtttgcatccccctaacctagaacagtgtctagcctctagtatgtgtttagcctacagtatgtgctcagcgaatacaatctatatttattactgcttttatgactgttataattactgtgcttggatttcgttacaaagtaagtcacaatgtgcctgcttctgttagtatttcagcacagtgcctggcacacatggggctctcaaatattgctgagcgagtgaacaaatgtcctttcaattccttaacgttgatgtcattttcaatagtattttgagccaaacttaattttgcgagtgtgttttgttttcttaactttattattaaaaatgtataaaagtgaggccaggcgtggtggctcacgcctgtaatcccagcagtttgggaggctgaggcaggcggatcagttgaggttgggagttggagaccagcccgtccaacatggtgaaagcctgtctctactaaaaatacaaaaatcagctgggtgtggtggcgcgtgcctgtaatcccagctactcaggaggctgaggcaggagagttgcttgaatcctagaggtggaggttgcagtgagctgagatcgtgccattgcactccagcctgggcaacaagagcaaaactctgtcccaataaataaataaataaaatgttctcttttgttcctgttcttgtgcggtagtgtggtatagagttttatggtaattactgtgaattagtgattctgagggacatatcagaactctgaggtttgtttccttctcatcttgagggaaacagcaaatgtatgttaaaatgcttttccaagggaacaacacatccttacattatttaaaccaatctgcttcattttcagagctggttgatcagagtgagtcagaaggccccgtgatacaagaatcagctgaaccaagccagttggaagttccagccacagaagaaataaaagagactgatggaagctctcagatcaagcaagaaccagaccccacgtggtagacctcttccctcctaggcttaaagtatcagtggttgagaagagcttttcggacctgttactaccccaagctgtgtaatatacttgtataacagaaataccttctatacaaacctttttttctacttttagatagaaatgtctactttttcagcagttctgtgaattaaagagcagagtgactgtgggtctggaatggctggtgtacttgggaatgtactatcaggattttacagcaatgctgggaaatgacagggaaaatgacaggaatgaatctcaccagattttttatgtactcagcagagccttgagttacggtgtttattttccaatcaagtgaagatatctcctacttctcctactggaacatctcagcttctgcagtgaagaaaaattcctgtgatagttcagttctttagtttttctatttgaaaaaaaaaaatcatttaaatgatcctttgttcacggctctccttaatgactgagtgaacagttcctatctgtatatttgactaaaccttttcctaagctatctctcatggttcctatgtttttttatcataattaaaagcaaaaccatctggatcacctaacagtcagaggtcagtatctcagcgtgtgaattatagaggaaatacagagagaacctcttccacttttacttttcgtccaaataaaatgcatggtgtaccagaagttgaagatcgggttgaggattggggctagctcgatgacactaaggccccaacatcgcgggacctgctgtggcgcggattcttaggaacgctgttctagccggccccctctccaggggtcgccgtggccggcattatttcctagttcttcttgtaaccctgaggtgccagcgcggggagtgaggaggggtcagggggctaaggatgcaacctctgacgttctgcgccttcctaggagagtcttacatgtgttgagatttcacaagcaatgcgagttgtaaaataccagctctacaagaagctaggctctgtgacggcatagttttcagtagctttatcacaatattcacaatggagaattatatgacatggtagcagaaataggcccttttatgtgttgcttctattttacctcaaattgtagatatagggtaatcaataaaatccatccatgcctttcacacactaagt

SEQ ID NO: 5183 - protein, 872 aa, Homo sapiens; identical to SEQ ID NO: 4541

SEQ ID NO: 5184 - DNA, 4980 bp, Homo sapiens
gggtcttgttctgtctcccaagctggagtgcagtggtgtggtcataggtcactgcagcgtcgaactcctaggctcaagtgatcctcttgcctcaggctcctgagtagctgggacaacaggcgtgtaccacacctggatactttttaaatttttggtagagaagggatctcactctattgccaagctggtgtcgaactcttggtcttaagcagccctcccacgtcagcatcccaaagtgttgggatttcagagggatcatggcccaagttgcaatgtccaccctccccgttgaagatgaggagtcctcggagagcaggatggtggtgacattcctcatgtcagctctcgagtccatgtgtaaagaactggccaagtccaaagccgaagtggcctgcattgcagtgtatgaaacagacgtgtttgtcgtcggaactgaaagaggacgtgcttttgtcaataccagaaaggattttcaaaaagattttgtaaaatattgtgttgaagaagaagaaaaagctgcagagatgcataaaatgaaatctacaacccaggcaaatcggatgagtgtagatgctgtagaaattgaaacactcagaaaaacagttgaggactatttctgcttttgctatgggaaagctttaggcaaatccacagtggtacctgtaccatatgagaagatgctgcgagaccagtcggctgtggtagtgcaggggcttccggaaggtgttgcctttaaacaccccgagaactatgatcttgcaaccctgaaatggattttggagaacaaagcagggatttcattcatcattaagagaccttttttagagccaaagaagcatgtaggtggtcgtgtgatggtaacagatgctgacaggtcaatactatctccaggtggaagttgtggccccatcaaagtgaaaactgaacccacagaagattctggcatttccctggaaatggcagctgtgacagtaaaggaagaatcagaagatcctgattattatcaatataacattcaagcaggcccttctgaaactgatgatgttgatgaaaaacagcccctatcgaagcctttgcaaggaagccaccattcttcagagggcaatgaaggcacagaaatggaagtaccagcagaagatgatgattattctccaccgtctaagagaccaaaggccaatgagctaccgcagccaccagtcccggaacccgccaatgctgggaagcggaaagtgagggagttcaacttcgagaaatggaatgctcgcatcactgatctacgtaaacaagttgaagaattgtttgaaaggaaatatgctcaagccataaaagccaaaggtccggtgacgatcccgtaccctcttttccagtctcatgttgaagatctttatgtagaaggacttcctgaaggaattccttttagaaggccatctacttacggaattcctcgcctggagaggatattacttgcaaaggaaaggattcgttttgtgattaagaaacatgagcttctgaattcaacacgtgaagatttacagcttgataagccagcttcaggagtaaaggaagaatggtatgccagaatcactaaattaagaaagatggtggatcagcttttctgcaaaaaatttgcggaagccttggggagcactgaagccaaggctgtaccgtaccaaaaatttgaggcacacccgaatgatctgtacgtggaaggactgccagaaaacattcctttccgaagtccctcatggtatggaatcccaaggctggaaaaaatcattcaagtgggcaatcgaattaaatttgttattaaaagaccagaacttctgactcacagtaccactgaagttactcagccaagaacgaatacaccagtcaaagaagattggaatgtcagaattaccaagctacggaagcaagtggaagagatttttaatttgaaatttgctcaagctcttggactcaccgaggcagtaaaagtaccatatcctgtgtttgaatcaaacccggagttcttgaaaggatcgtccgcgggagtaataaaatcaagttcgttgttaaaaaacctgaactagttatttcctacttgcctcctgggatggctagtaaaataaacactaaagctttgcagtcccccaaaagaccacgaagtcctgggagtaattcaaaggttcctgaaattgaggtcaccgtggaaggccctaataacaacaatcctcaaacctcagctgttcgaaccccgacccagactaacggttctaacgttcccttcaagccacgagggagagagttttcctttgaggcctggaatgccaaaatcacggacctaaaacagaaagttgaaaatctcttcaatgagaaatgtggggaagctcttggccttaaacaagctgtgaaggtgccgttcgcgttatttgagtctttcccggaagacttttatgtggaaggcttacctgagggtgtgccattccgaagaccatcgacttttggcattccgaggctggagaagatactcagaaacaaagccaaaattaagttcatcattaaaaagcccgaaatgtttgagacggcgattaaggagagcacctcctctaagagccctcccagaaaaataaattcatcacccaatgttaatactactgcatcaggtgttgaagaccttaacatcattcaggtgacaattccagatgatgataatgaaagactctcgaaagttgaaaaagctagacagctaagagaacaagtgaatgacctctttagtcggaaatttggtgaagctattggtatgggttttcctgtgaaagttccctacaggaaaatcacaattaaccctggctgtgtggtggttgatggcatgcccccgggggtgtccttcaaagcccccagctacctggaaatcagctccatgagaaggatcttagactctgccgagtttatcaaattcacggtcattagaccatttccaggacttgtgattaataaccagctggttgatcagagtgagtcagaaggccccgtgatacaagaatcagctgaaccaagccagttggaagttccagccacagaagaaataaaagagactgatggaagctctcagatcaagcaagaaccagaccccacgtggtagacctcttccctcctagggtaaatcagcttctgtgtcagggatgctgtgtggtgtccatctgaaccccctgcatacgcgtagctaatgtgatctccccactttcacataagatggtggccctgccttcagggaatgtgggagccaggtgggagccttcccggatatttaagctagaagattctacagggagattctccttggatcaatatatgtctctcagtcaaagatgtaaaagcacttttgccttaaaaagaatgttctgtttctaaatagagtcaacgttgtcctcctcattggaattcactatgagtcagaatcattagactgacttttttttttccatagtaatagtattttgcagagtctcacagagctgcagatcttttgttcatcttgcagagttaacaagtctgatcctgttagtccagatttcttaaatttggccaagttataataggagcagtagcttgagacccgaagtcaggaaactttgacaatggatttttttttttaatccagagacttgtactggaatttgccttaccctgtcagctcatggacttaaggtttcatcccgctttatgagtgcttctgaatccaagtcattgttacctgaatttgcaaattaagttgtgatattcgtgactgttaaattcctgtaattagattaacctctttgcttgcttgtttgttttctctcctattttagcttaaagtatcagtggttgagaagagcttttcggacctgttactaccccaagctgtgtaatatacttgtataacagaaataccttctatacaaacctttttttctacttttagatagaaatgtctactttttcagcagttctgtgaattaaagagcagagtgactgtgggtctggaatggctggtgtacttgggaatgtactatcaggattttacagcaatgctgggaaatgacagggaaaatgacaggaatgaatctcaccagattttttatgtactcagcagagccttgagttacggtgtttattttccaatcaagtgaagatatctcctacttctcctactggaacatctcagcttctgcagtgaagaaaaattcctgtgatagttcagttctttagtttttctatttgaaaaaaaaaaatcatttaaatgatcctttgttcacggctctccttaatgactgagtgaacagttcctatctgtatatttgactaaaccttttcctaagctatctctcatggttcctatgtttttttatcataattaaaagcaaaaccatctggatcacctaacagtcagaggtcagtatctcagcgtgtgaattatagaggaaatacagagagaacctcttccacttttacttttcgtccaaataaaatgcatggtgtaccagaagttgaagatcgggttgaggattggggctagctcgatgacactaaggccccaacatcgcgggacctgctgtggcgcggattcttaggaacgctgttctagccggccccctctccaggggtcgccgtggccggcattatttcctagttcttcttgtaaccctgaggtgccagcgcggggagtgaggaggggtcagggggctaaggatgcaacctctgacgttctgcgccttcctaggagagtcttacatgtgttgagatttcacaagcaatgcgagttgtaaaataccagctctacaagaagctaggctctgtgacggcatagttttcagtagctttatcacaatattcacaatggagaattatatgacatggtagcagaaataggcccttttatgtgttgcttctattttacctcaaattgtagatatagggtaatcaataaaatccatccatgcctttcacacactaagt

SEQ ID NO: 5185 - protein, 604 aa, Homo sapiens; identical to SEQ ID NO: 4117

SEQ ID NO: 5186 - DNA, 5033 bp, Homo sapiens
gggtcttgttctgtctcccaagctggagtgcagtggtgtggtcataggtcactgcagcgtcgaactcctaggctcaagtgatcctcttgcctcaggctcctgagtagctgggacaacaggcgtgtaccacacctggatactttttaaatttttggtagagaagggatctcactctattgccaagctggtgtcgaactcttggtcttaagcagccctcccacgtcagcatcccaaagtgttgggatttcagagggatcatggcccaagttgcaatgtccaccctccccgttgaagatgaggagtcctcggagagcaggatggtggtgacattcctcatgtcagctctcgagtccatgtgtaaagaactggccaagtccaaagccgaagtggcctgcattgcagtgtatgaaacagacgtgtttgtcgtcggaactgaaagaggacgtgcttttgtcaataccagaaaggattttcaaaaagattttgtaaaatattgtgttgaagaagaagaaaaagctgcagagatgcataaaatgaaatctacaacccaggcaaatcggatgagtgtagatgctgtagaaattgaaacactcagaaaaacagttgaggactatttctgcttttgctatgggaaagctttaggcaaatccacagtggtacctgtaccatatgagaagatgctgcgagaccagtcggctgtggtagtgcaggggcttccggaaggtgttgcctttaaacaccccgagaactatgatcttgcaaccctgaaatggattttggagaacaaagcagggatttcattcatcattaagagaccttttttagagccaaagaagcatgtaggtggtcgtgtgatggtaacagatgctgacaggtcaatactatctccaggtggaagttgtggccccatcaaagtgaaaactgaacccacagaagattctggaagccaccattcttcagagggcaatgaaggcacagaaatggaagtaccagcagaagattctactcaacatgtcccttcagaaacaagtgaggaccctgaagttgaggtgactattgaagatgatgattattctccaccgtctaagagaccaaaggccaatgagctaccgcagccaccagtcccggaacccgccaatgctgggaagcggaaagtgagggagttcaacttcgagaaatggaatgctcgcatcactgatctacgtaaacaagttgaagaattgtttgaaaggaaatatgctcaagccataaaagccaaaggtccggtgacgatcccgtaccctcttttccagtctcatgttgaagatctttatgtagaaggacttcctgaaggaattccttttagaaggccatctacttacggaattcctcgcctggagaggatattacttgcaaaggaaaggattcgttttgtgattaagaaacatgagcttctgaattcaacacgtgaagatttacagcttgataagccagcttcaggagtaaaggaagaatggtatgccagaatcactaaattaagaaagatggtggatcagcttttctgcaaaaaatttgcggaagccttggggagcactgaagccaaggctgtaccgtaccaaaaatttgaggcacacccgaatgatctgtacgtggaaggactgccagaaaacattcctttccgaagtccctcatggtatggaatcccaaggctggaaaaaatcattcaagtgggcaatcgaattaaatttgttattaaaagaccagaacttctgactcacagtaccactgaagttactcagccaagaacgaatacaccagtcaaagaagattggaatgtcagaattaccaagctacggaagcaagtggaagagatttttaatttgaaatttgcttagatttgttgacagcggtttcctggagtgctgtcttgagaacgattctgaggaggctcagcaagaaagagtgtttcagttgattgggtgtgtctgtcatggagaaggaactcaagctcttggactcaccgaggcagtaaaagtaccatatcctgtgtttgaatcaaacccggagttcttgtatgtggaaggcttgccagaggggattcccttccgaagccctacctggtttggaattccacgacttgaaaggatcgtccgcgggagtaataaaatcaagttcgttgttaaaaaacctgaactagttatttcctacttgcctcctgggatggctagtaaaataaacactaaagctttgcagtcccccaaaagaccacgaagtcctgggagtaattcaaaggttcctgaaattgaggtcaccgtggaaggccctaataacaacaatcctcaaacctcagctgttcgaaccccgacccagactaacggttctaacgttcccttcaagccacgagggagagagttttcctttgaggcctggaatgccaaaatcacggacctaaaacagaaagttgaaaatctcttcaatgagaaatgtggggaagctcttggccttaaacaagctgtgaaggtgccgttcgcgttatttgagtctttcccggaagacttttatgtggaaggcttacctgagggtgtgccattccgaagaccatcgacttttggcattccgaggctggagaagatactcagaaacaaagccaaaattaagttcatcattaaaaagcccgaaatgtttgagacggcgattaaggagagcacctcctctaagagccctcccagaaaaataaattcatcacccaatgttaatactactgcatcaggtgttgaagaccttaacatcattcaggtgacaattccagatgatgataatgaaagactctcgaaagttgaaaaagctagacagctaagagaacaagtgaatgacctctttagtcggaaatttggtgaagctattggtatgggttttcctgtgaaagttccctacaggaaaatcacaattaaccctggctgtgtggtggttgatggcatgcccccgggggtgtccttcaaagcccccagctacctggaaatcagctccatgagaaggatcttagactctgccgagtttatcaaattcacggtcattagaccatttccaggacttgtgattaataaccagctggttgatcagagtgagtcagaaggccccgtgatacaagaatcagctgaaccaagccagttggaagttccagccacagaaggtaaaaggacctcttccctcctagggtaaatcagcttctgtgtcagggatgctgtgtggtgtccatctgaaccccctgcatacgcgtagctaatgtgatctccccactttcacataagatggtggccctgccttcagggaatgtgggagccaggtgggagccttcccggatatttaagctagaagattctacagggagattctccttggatcaatatatgtctctcagtcaaagatgtaaaagcacttttgccttaaaaagaatgttctgtttctaaatagagtcaacgttgtcctcctcattggaattcactatgagtcagaatcattagactgacttttttttttccatagtaatagtattttgcagagtctcacagagctgcagatcttttgttcatcttgcagagttaacaagtctgatcctgttagtccagatttcttaaatttggccaagttataataggagcagtagcttgagacccgaagtcaggaaactttgacaatggatttttttttttaatccagagacttgtactggaatttgccttaccctgtcagctcatggacttaaggtttcatcccgctttatgagtgcttctgaatccaagtcattgttacctgaatttgcaaattaagttgtgatattcgtgactgttaaattcctgtaattagattaacctctttgcttgcttgtttgttttctctcctattttagcttaaagtatcagtggttgagaagagcttttcggacctgttactaccccaagctgtgtaatatacttgtataacagaaataccttctatacaaacctttttttctacttttagatagaaatgtctactttttcagcagttctgtgaattaaagagcagagtgactgtgggtctggaatggctggtgtacttgggaatgtactatcaggattttacagcaatgctgggaaatgacagggaaaatgacaggaatgaatctcaccagattttttatgtactcagcagagccttgagttacggtgtttattttccaatcaagtgaagatatctcctacttctcctactggaacatctcagcttctgcagtgaagaaaaattcctgtgatagttcagttctttagtttttctatttgaaaaaaaaaaatcatttaaatgatcctttgttcacggctctccttaatgactgagtgaacagttcctatctgtatatttgactaaaccttttcctaagctatctctcatggttcctatgtttttttatcataattaaaagcaaaaccatctggatcacctaacagtcagaggtcagtatctcagcgtgtgaattatagaggaaatacagagagaacctcttccacttttacttttcgtccaaataaaatgcatggtgtaccagaagttgaagatcgggttgaggattggggctagctcgatgacactaaggccccaacatcgcgggacctgctgtggcgcggattcttaggaacgctgttctagccggccccctctccaggggtcgccgtggccggcattatttcctagttcttcttgtaaccctgaggtgccagcgcggggagtgaggaggggtcagggggctaaggatgcaacctctgacgttctgcgccttcctaggagagtcttacatgtgttgagatttcacaagcaatgcgagttgtaaaataccagctctacaagaagctaggctctgtgacggcatagttttcagtagctttatcacaatattcacaatggagaattatatgacatggtagcagaaataggcccttttatgtgttgcttctattttacctcaaattgtagatatagggtaatcaataaaatccatccatgcctttcacacactaagt

SEQ ID NO: 5187 - protein, 538 aa, Homo sapiens; identical to SEQ ID NO: 4183

SEQ ID NO: 5188 - DNA, 4071 bp, Homo sapiens
gggtcttgttctgtctcccaagctggagtgcagtggtgtggtcataggtcactgcagcgtcgaactcctaggctcaagtgatcctcttgcctcaggctcctgagtagctgggacaacaggcgtgtaccacacctggatactttttaaatttttggtagagaagggatctcactctattgccaagctggtgtcgaactcttggtcttaagcagccctcccacgtcagcatcccaaagtgttgggatttcagagggatcatggcccaagttgcaatgtccaccctccccgttgaagatgaggagtcctcggagagcaggatggtggtgacattcctcatgtcagctctcgagtccatgtgtaaagaactggccaagtccaaagccgaagtggcctgcattgcagtgtatgaaacagacgtgtttgtcgtcggaactgaaagaggacgtgcttttgtcaataccagaaaggattttcaaaaagattttgtaaaatattgtgttgaagaagaagaaaaagctgcagagatgcataaaatgaaatctacaacccaggcaaatcggatgagtgtagatgctgtagaaattgaaacactcagaaaaacagttgaggactatttctgcttttgctatgggaaagctttaggcaaatccacagtggtacctgtaccatatgagaagatgctgcgagaccagtcggctgtggtagtgcaggggcttccggaaggtgttgcctttaaacaccccgagaactatgatcttgcaaccctgaaatggattttggagaacaaagcagggatttcattcatcattaagagaccttttttagagccaaagaagcatgtaggtggtcgtgtgatggtaacagatgctgacaggtcaatactatctccaggtggaagttgtggccccatcaaagtgaaaactgaacccacagaagattctggcatttccctggaaatggcagctgtgacagtaaaggaagaatcagaagatcctgattattatcaatataacattcaagcaggcccttctgaaactgatgatgttgatgaaaaacagcccctatcgaagcctttgcaaggaagccaccattcttcagagggcaatgaaggcacagaaatggaagtaccagcagaagatgatgattattctccaccgtctaagagaccaaaggccaatgagctaccgcagccaccagtcccggaacccgccaatgctgggaagcggaaagtgagggagttcaacttcgagaaatggaatgctcgcatcactgatctacgtaaacaagttgaagaattgtttgaaaggaaatatgctcaagccataaaagccaaaggtccggtgacgatcccgtaccctcttttccagtctcatgttgaagatctttatgtagaaggacttcctgaaggaattccttttagaaggccatctacttacggaattcctcgcctggagaggatattacttgcaaaggaaaggattcgttttgtgattaagaaacatgagcttctgaattcaacacgtgaagatttacagcttgataagccagcttcaggagtaaaggaagaatggtatgccagaatcactaaattaagaaagatggtggatcagcttttctgcaaaaaatttgcggaagccttggggagcactgaagccaaggctgtaccgtaccaaaaatttgaggcacacccgaatgatctgtacgtggaaggactgccagaaaacattcctttccgaagtccctcatggtatggaatcccaaggctggaaaaaatcattcaagtgggcaatcgaattaaatttgttattaaaagaccagaacttctgactcacagtaccactgaagttactcagccaagaacgaatacaccagtcaaagaagattggaatgtcagaattaccaagctacggaagcaagtggaagagatttttaatttgaaatttgctcaagctcttggactcaccgaggcagtaaaagtaccatatcctgtgtttgaatcaaacccggagttcttgtatgtggaaggcttgccagaggggattcccttccgaagccctacctggtttggaattccacgacttgaaaggatcgtccgcgggagtaataaaatcaagttcgttgttaaaaaacctgaactagttatttcctacttgcctcctgggatggctagtaaaataaacactaaagctttgcagtcccccaaaagaccacgaagtcctgggagtaattcaaaggttcctgaaattgaggtcaccgtggaaggccctaataacaacaatcctcaaacctcagctgttcgaaccccgacccagactaacggttctaacgttcccttcaagccacgagggagagagttttcctttgaggcctggaatgccaaaatcacggacctaaaacagaaagttgaaaatctcttcaatgagaaatgtggggaagctcttggccttaaacaagctgtgaaggtgccgttcgcgttatttgagtctttcccggaagacttttatgtggaaggcttacctgagggtgtgccattccgaagaccatcgacttttggcattccgaggctggagaagatactcagaaacaaagccaaaattaagttcatcattaaaaagcccgaaatgtttgagacggcgattaaggagagcacctcctctaagagccctcccagaaaaataaattcatcacccaatgttaatactactgcatcaggtgttgaagaccttaacatcattcaggtgacaattccagatgatgataatgaaagactctcgaaagttgaaaaagctagacagctaagagaacaagtgaatgacctctttagtcggaaatttggtgaagctattggtatgggttttcctgtgaaagttccctacaggaaaatcacaattaaccctggctgtgtggtggttgatggcatgcccccgggggtgtccttcaaagcccccagctacctggaaatcagctccatgagaaggatcttagactctgccgagtttatcaaattcacggtcattagaccatttccaggacttgtgattaataaccagctggttgatcagagtgagtcagaaggccccgtgatacaagaatcagctgaaccaagccagttggaagttccagccacagaagaaataaaagagactgatggaagctctcagatcaagcaagaaccagaccccacgtggtagacctcttccctcctaggagccttgagttacggtgtttattttccaatcaagtgaagatatctcctacttctcctactggaacatctcagcttctgcagtgaagaaaaattcctgtgatagttcagttctttagtttttctatttgaaaaaaaaaaatcatttaaatgatcctttgttcacggctctccttaatgactgagtgaacagttcctatctgtatatttgactaaaccttttcctaagctatctctcatggttcctatgtttttttatcataattaaaagcaaaaccatctggatcacctaacagtcagaggtcagtatctcagcgtgtgaattatagaggaaatacagagagaacctcttccacttttacttttcgtccaaataaaatgcatggtgtaccagaagttgaagatcgggttgaggattggggctagctcgatgacactaaggccccaacatcgcgggacctgctgtggcgcggattcttaggaacgctgttctagccggccccctctccaggggtcgccgtggccggcattatttcctagttcttcttgtaaccctgaggtgccagcgcggggagtgaggaggggtcagggggctaaggatgcaacctctgacgttctgcgccttcctaggagagtcttacatgtgttgagatttcacaagcaatgcgagttgtaaaataccagctctacaagaagctaggctctgtgacggcatagttttcagtagctttatcacaatattcacaatggagaattatatgacatggtagcagaaataggcccttttatgtgttgcttctattttacctcaaattgtagatatagggtaatcaataaaatccatccatgcctttcacacactaagt

SEQ ID NO: 5189 - protein, 977 aa, Homo sapiens; identical to SEQ ID NO: 472

SEQ ID NO: 5190 - DNA, 4978 bp, Homo sapiens
gggtcttgttctgtctcccaagctggagtgcagtggtgtggtcataggtcactgcagcgtcgaactcctaggctcaagtgatcctcttgcctcaggctcctgagtagctgggacaacaggcgtgtaccacacctggatactttttaaatttttggtagagaagggatctcactctattgccaagctggtgtcgaactcttggtcttaagcagccctcccacgtcagcatcccaaagtgttgggatttcagagggatcatggcccaagttgcaatgtccaccctccccgttgaagatgaggagtcctcggagagcaggatggtggtgacattcctcatgtcagctctcgagtccatgtgtaaagaactggccaagtccaaagccgaagtggcctgcattgcagtgtatgaaacagacgtgtttgtcgtcggaactgaaagaggacgtgcttttgtcaataccagaaaggattttcaaaaagattttgtaaaatattgtgttgaagaagaagaaaaagctgcagagatgcataaaatgaaatctacaacccaggcaaatcggatgagtgtagatgctgtagaaattgaaacactcagaaaaacagttgaggactatttctgcttttgctatgggaaagctttaggcaaatccacagtggtacctgtaccatatgagaagatgctgcgagaccagtcggctgtggtagtgcaggggcttccggaaggtgttgcctttaaacaccccgagaactatgatcttgcaaccctgaaatggattttggagaacaaagcagggatttcattcatcattaagagaccttttttagagccaaagaagcatgtaggtggtcgtgtgatggtaacagatgctgacaggtcaatactatctccaggtggaagttgtggccccatcaaagtgaaaactgaacccacagaagattctggcatttccctggaaatggcagctgtgacagtaaaggaagaatcagaagatcctgattattatcaatataacattcaaggaagccaccattcttcagagggcaatgaaggcacagaaatggaagtaccagcagaagattctactcaacatgtcccttcagaaacaagtgaggaccctgaagttgaggtgactattgaagatgatgattattctccaccgtctaagagaccaaaggccaatgagctaccgcagccaccagtcccggaacccgccaatgctgggaagcggaaagtgagggagttcaacttcgagaaatggaatgctcgcatcactgatctacgtaaacaagttgaagaattgtttgaaaggaaatatgctcaagccataaaagccaaaggtccggtgacgatcccgtaccctcttttccagtctcatgttgaagatctttatgtagaaggacttcctgaaggaattccttttagaaggccatctacttacggaattcctcgcctggagaggatattacttgcaaaggaaaggattcgttttgtgattaagaaacatgagcttctgaattcaacacgtgaagatttacagcttgataagccagcttcaggagtaaaggaagaatggtatgccagaatcactaaattaagaaagatggtggatcagcttttctgcaaaaaatttgcggaagccttggggagcactgaagccaaggctgtaccgtaccaaaaatttgaggcacacccgaatgatctgtacgtggaaggactgccagaaaacattcctttccgaagtccctcatggtatggaatcccaaggctggaaaaaatcattcaagtgggcaatcgaattaaatttgttattaaaagaccagaacttctgactcacagtaccactgaagttactcagccaagaacgaatacaccagctcaagctcttggactcaccgaggcagtaaaagtaccatatcctgtgtttgaatcaaacccggagttcttgtatgtggaaggcttgccagaggggattcccttccgaagccctacctggtttggaattccacgacttgaaaggatcgtccgcgggagtaataaaatcaagttcgttgttaaaaaacctgaactagttatttcctacttgcctcctgggatggctagtaaaataaacactaaagctttgcagtcccccaaaagaccacgaagtcctgggagtaattcaaaggttcctgaaattgaggtcaccgtggaaggccctaataacaacaatcctcaaacctcagctgttcgaaccccgacccagactaacggttctaacgttcccttcaagccacgagggagagagttttcctttgaggcctggaatgccaaaatcacggacctaaaacagaaagttgaaaatctcttcaatgagaaatgtggggaagctcttggccttaaacaagctgtgaaggtgccgttcgcgttatttgagtctttcccggaagacttttatgtggaaggcttacctgagggtgtgccattccgaagaccatcgacttttggcattccgaggctggagaagatactcagaaacaaagccaaaattaagttcatcattaaaaagcccgaaatgtttgagacggcgattaaggagagcacctcctctaagagccctcccagaaaaataaattcatcacccaatgttaatactactgcatcaggtgttgaagaccttaacatcattcaggtgacaattccagatgatgataatgaaagactctcgaaagttgaaaaagctagacagctaagagaacaagtgaatgacctctttagtcggaaatttggtgaagctattggtatgggttttcctgtgaaagttccctacaggaaaatcacaattaaccctggctgtgtggtggttgatggcatgcccccgggggtgtccttcaaagcccccagctacctggaaatcagctccatgagaaggatcttagactctgccgagtttatcaaattcacggtcattagaccatttccaggacttgtgattaataaccagctggttgatcagagtgagtcagaaggccccgtgatacaagaatcagctgaaccaagccagttggaagttccagccacagaagaaataaaagagactgatggaagctctcagatcaagcaagaaccagaccccacgtggtagacctcttccctcctagggtaaatcagcttctgtgtcagggatgctgtgtggtgtccatctgaaccccctgcatacgcgtagctaatgtgatctccccactttcacataagatggtggccctgccttcagggaatgtgggagccaggtgggagccttcccggatatttaagctagaagattctacagggagattctccttggatcaatatatgtctctcagtcaaagatgtaaaagcacttttgccttaaaaagaatgttctgtttctaaatagagtcaacgttgtcctcctcattggaattcactatgagtcagaatcattagactgacttttttttttccatagtaatagtattttgcagagtctcacagagctgcagatcttttgttcatcttgcagagttaacaagtctgatcctgttagtccagatttcttaaatttggccaagttataataggagcagtagcttgagacccgaagtcaggaaactttgacaatggatttttttttttaatccagagacttgtactggaatttgccttaccctgtcagctcatggacttaaggtttcatcccgctttatgagtgcttctgaatccaagtcattgttacctgaatttgcaaattaagttgtgatattcgtgactgttaaattcctgtaattagattaacctctttgcttgcttgtttgttttctctcctattttagcttaaagtatcagtggttgagaagagcttttcggacctgttactaccccaagctgtgtaatatacttgtataacagaaataccttctatacaaacctttttttctacttttagatagaaatgtctactttttcagcagttctgtgaattaaagagcagagtgactgtgggtctggaatggctggtgtacttgggaatgtactatcaggattttacagcaatgctgggaaatgacagggaaaatgacaggaatgaatctcaccagattttttatgtactcagcagagccttgagttacggtgtttattttccaatcaagtgaagatatctcctacttctcctactggaacatctcagcttctgcagtgaagaaaaattcctgtgatagttcagttctttagtttttctatttgaaaaaaaaaaatcatttaaatgatcctttgttcacggctctccttaatgactgagtgaacagttcctatctgtatatttgactaaaccttttcctaagctatctctcatggttcctatgtttttttatcataattaaaagcaaaaccatctggatcacctaacagtcagaggtcagtatctcagcgtgtgaattatagaggaaatacagagagaacctcttccacttttacttttcgtccaaataaaatgcatggtgtaccagaagttgaagatcgggttgaggattggggctagctcgatgacactaaggccccaacatcgcgggacctgctgtggcgcggattcttaggaacgctgttctagccggccccctctccaggggtcgccgtggccggcattatttcctagttcttcttgtaaccctgaggtgccagcgcggggagtgaggaggggtcagggggctaaggatgcaacctctgacgttctgcgccttcctaggagagtcttacatgtgttgagatttcacaagcaatgcgagttgtaaaataccagctctacaagaagctaggctctgtgacggcatagttttcagtagctttatcacaatattcacaatggagaattatatgacatggtagcagaaataggcccttttatgtgttgcttctattttacctcaaattgtagatatagggtaatcaataaaatccatccatgcctttcacacactaagt

SEQ ID NO: 5191 - protein, 954 aa, Homo sapiens; identical to SEQ ID NO: 4155

SEQ ID NO: 5192 - DNA, 4987 bp, Homo sapiens
gggtcttgttctgtctcccaagctggagtgcagtggtgtggtcataggtcactgcagcgtcgaactcctaggctcaagtgatcctcttgcctcaggctcctgagtagctgggacaacaggcgtgtaccacacctggatactttttaaatttttggtagagaagggatctcactctattgccaagctggtgtcgaactcttggtcttaagcagccctcccacgtcagcatcccaaagtgttgggatttcagagggatcatggcccaagttgcaatgtccaccctccccgttgaagatgaggagtcctcggagagcaggatggtggtgacattcctcatgtcagctctcgagtccatgtgtaaagaactggccaagtccaaagccgaagtggcctgcattgcagtgtatgaaacagacgtgtttgtcgtcggaactgaaagaggacgtgcttttgtcaataccagaaaggattttcaaaaagattttgtaaaatattgtgttgaagaagaagaaaaagctgcagagatgcataaaatgaaatctacaacccaggcaaatcggatgagtgtagatgctgtagaaattgaaacactcagaaaaacagttgaggactatttctgcttttgctatgggaaagctttaggcaaatccacagtggtacctgtaccatatgagaagatgctgcgagaccagtcggctgtggtagtgcaggggcttccggaaggtgttgcctttaaacaccccgagaactatgatcttgcaaccctgaaatggattttggagaacaaagcagggatttcattcatcattaagagaccttttttagagccaaagaagcatgtaggtggtcgtgtgatggtaacagatgctgacaggtcaatactatctccaggtggaagttgtggccccatcaaagtgaaaactgaacccacagaagattctggcatttccctggaaatggcagctgtgacagtaaaggaagaatcagaagatcctgattattatcaatataacattcaaggaagccaccattcttcagagggcaatgaaggcacagaaatggaagtaccagcagaagatgatgattattctccaccgtctaagagaccaaaggccaatgagctaccgcagccaccagtcccggaacccgccaatgctgggaagcggaaagtgagggagttcaacttcgagaaatggaatgctcgcatcactgatctacgtaaacaagttgaagaattgtttgaaaggaaatatgctcaagccataaaagccaaaggtccggtgacgatcccgtaccctcttttccagtctcatgttgaagatctttatgtagaaggacttcctgaaggaattccttttagaaggccatctacttacggaattcctcgcctggagaggatattacttgcaaaggaaaggattcgttttgtgattaagaaacatgagcttctgaattcaacacgtgaagatttacagcttgataagccagcttcaggagtaaaggaagaatggtatgccagaatcactaaattaagaaagatggtggatcagcttttctgcaaaaaatttgcggaagccttggggagcactgaagccaaggctgtaccgtaccaaaaatttgaggcacacccgaatgatctgtacgtggaaggactgccagaaaacattcctttccgaagtccctcatggtatggaatcccaaggctggaaaaaatcattcaagtgggcaatcgaattaaatttgttattaaaagaccagaacttctgactcacagtaccactgaagttactcagccaagaacgaatacaccagtcaaagaagattggaatgtcagaattaccaagctacggaagcaagtggaagagatttttaatttgaaatttgctcaagctcttggactcaccgaggcagtaaaagtaccatatcctgtgtttgaatcaaacccggagttcttgtatgtggaaggcttgccagaggggattcccttccgaagccctacctggtttggaattccacgacttgaaaggatcgtccgcgggagtaataaaatcaagttcgttgttaaaaaacctgaactagttatttcctacttgcctcctgggatggctagtaaaataaacactaaagctttgcagtcccccaaaagaccacgaagtcctgggagtaattcaaaggttcctgaaattgaggtcaccgtggaaggccctaataacaacaatcctcaaacctcagctgttcgaaccccgacccagactaacggttctaacgttcccttcaagccacgagggagagagttttcctttgaggcctggaatgccaaaatcacggacctaaaacagaaagttgaaaatctcttcaatgagaaatgtggggaagctcttggccttaaacaagctgtgaaggtgccgttcgcgttatttgagtctttcccggaagacttttatgtggaaggcttacctgagggtgtgccattccgaagaccatcgacttttggcattccgaggctggagaagatactcagaaacaaagccaaaattaagttcatcattaaaaagcccgaaatgtttgagacggcgattaaggagagcacctcctctaagagccctcccagaaaaataaattcatcacccaatgttaatactactgcatcaggtgttgaagaccttaacatcattcaggtgacaattccagatgatgataatgaaagactctcgaaagttgaaaaagctagacagctaagagaacaagtgaatgacctctttagtcggaaatttggtgaagctattggtatgggttttcctgtgaaagttccctacaggaaaatcacaattaaccctggctgtgtggtggttgatggcatgcccccgggggtgtccttcaaagcccccagctacctggaaatcagctccatgagaaggatcttagactctgccgagtttatcaaattcacggtcattagaccatttccaggacttgtgattaataaccagctggttgatcagagtgagtcagaaggccccgtgatacaagaatcagctgaaccaagccagttggaagttccagccacagaagaaataaaagagactgatggaagctctcagatcaagcaagaaccagaccccacgtggtagacctcttccctcctagggtaaatcagcttctgtgtcagggatgctgtgtggtgtccatctgaaccccctgcatacgcgtagctaatgtgatctccccactttcacataagatggtggccctgccttcagggaatgtgggagccaggtgggagccttcccggatatttaagctagaagattctacagggagattctccttggatcaatatatgtctctcagtcaaagatgtaaaagcacttttgccttaaaaagaatgttctgtttctaaatagagtcaacgttgtcctcctcattggaattcactatgagtcagaatcattagactgacttttttttttccatagtaatagtattttgcagagtctcacagagctgcagatcttttgttcatcttgcagagttaacaagtctgatcctgttagtccagatttcttaaatttggccaagttataataggagcagtagcttgagacccgaagtcaggaaactttgacaatggatttttttttttaatccagagacttgtactggaatttgccttaccctgtcagctcatggacttaaggtttcatcccgctttatgagtgcttctgaatccaagtcattgttacctgaatttgcaaattaagttgtgatattcgtgactgttaaattcctgtaattagattaacctctttgcttgcttgtttgttttctctcctattttagcttaaagtatcagtggttgagaagagcttttcggacctgttactaccccaagctgtgtaatatacttgtataacagaaataccttctatacaaacctttttttctacttttagatagaaatgtctactttttcagcagttctgtgaattaaagagcagagtgactgtgggtctggaatggctggtgtacttgggaatgtactatcaggattttacagcaatgctgggaaatgacagggaaaatgacaggaatgaatctcaccagattttttatgtactcagcagagccttgagttacggtgtttattttccaatcaagtgaagatatctcctacttctcctactggaacatctcagcttctgcagtgaagaaaaattcctgtgatagttcagttctttagtttttctatttgaaaaaaaaaaatcatttaaatgatcctttgttcacggctctccttaatgactgagtgaacagttcctatctgtatatttgactaaaccttttcctaagctatctctcatggttcctatgtttttttatcataattaaaagcaaaaccatctggatcacctaacagtcagaggtcagtatctcagcgtgtgaattatagaggaaatacagagagaacctcttccacttttacttttcgtccaaataaaatgcatggtgtaccagaagttgaagatcgggttgaggattggggctagctcgatgacactaaggccccaacatcgcgggacctgctgtggcgcggattcttaggaacgctgttctagccggccccctctccaggggtcgccgtggccggcattatttcctagttcttcttgtaaccctgaggtgccagcgcggggagtgaggaggggtcagggggctaaggatgcaacctctgacgttctgcgccttcctaggagagtcttacatgtgttgagatttcacaagcaatgcgagttgtaaaataccagctctacaagaagctaggctctgtgacggcatagttttcagtagctttatcacaatattcacaatggagaattatatgacatggtagcagaaataggcccttttatgtgttgcttctattttacctcaaattgtagatatagggtaatcaataaaatccatccatgcctttcacacactaagt

SEQ ID NO: 5193 - protein, 957 aa, Homo sapiens; identical to SEQ ID NO: 4303

SEQ ID NO: 5194 - DNA, 7168 bp, Homo sapiens
gggtcttgttctgtctcccaagctggagtgcagtggtgtggtcataggtcactgcagcgtcgaactcctaggctcaagtgatcctcttgcctcaggctcctgagtagctgggacaacaggcgtgtaccacacctggatactttttaaatttttggtagagaagggatctcactctattgccaagctggtgtcgaactcttggtcttaagcagccctcccacgtcagcatcccaaagtgttgggatttcagagggatcatggcccaagttgcaatgtccaccctccccgttgaagatgaggagtcctcggagagcaggatggtggtgacattcctcatgtcagctctcgagtccatgtgtaaagaactggccaagtccaaagccgaagtggcctgcattgcagtgtatgaaacagacgtgtttgtcgtcggaactgaaagaggacgtgcttttgtcaataccagaaaggattttcaaaaagattttgtaaaatattgtgttgaagaagaagaaaaagctgcagagatgcataaaatgaaatctacaacccaggcaaatcggatgagtgtagatgctgtagaaattgaaacactcagaaaaacagttgaggactatttctgcttttgctatgggaaagctttaggcaaatccacagtggtacctgtaccatatgagaagatgctgcgagaccagtcggctgtggtagtgcaggggcttccggaaggtgttgcctttaaacaccccgagaactatgatcttgcaaccctgaaatggattttggagaacaaagcagggatttcattcatcattaagagaccttttttagagccaaagaagcatgtaggtggtcgtgtgatggtaacagatgctgacaggtcaatactatctccaggtggaagttgtggccccatcaaagtgaaaactgaacccacagaagattctggcatttccctggaaatggcagctgtgacagtaaaggaagaatcagaagatcctgattattatcaatataacattcaaggaagccaccattcttcagagggcaatgaaggcacagaaatggaagtaccagcagaagatgatgattattctccaccgtctaagagaccaaaggccaatgagctaccgcagccaccagtcccggaacccgccaatgctgggaagcggaaagtgagggagttcaacttcgagaaatggaatgctcgcatcactgatctacgtaaacaagttgaagaattgtttgaaaggaaatatgctcaagccataaaagccaaaggtccggtgacgatcccgtaccctcttttccagtctcatgttgaagatctttatgtagaaggacttcctgaaggaattccttttagaaggccatctacttacggaattcctcgcctggagaggatattacttgcaaaggaaaggattcgttttgtgattaagaaacatgagcttctgaattcaacacgtgaagatttacagcttgataagccagcttcaggagtaaaggaagaatggtatgccagaatcactaaattaagaaagatggtggatcagcttttctgcaaaaaatttgcggaagccttggggagcactgaagccaaggctgtaccgtaccaaaaatttgaggcacacccgaatgatctgtacgtggaaggactgccagaaaacattcctttccgaagtccctcatggtatggaatcccaaggctggaaaaaatcattcaagtgggcaatcgaattaaatttgttattaaaagaccagaacttctgactcacagtaccactgaagttactcagccaagaacgaatacaccagtcaaagaagattggaatgtcagaattaccaagctacggaagcaagtggaagagatttttaatttgaaatttgcttagatttgttgacagcggtttcctggagtgctgtcttgagaacgattctgaggaggctcagcaagaaagagtgtttcagttgattgggtgtgtctgtcatggagaaggaactcaagctcttggactcaccgaggcagtaaaagtaccatatcctgtgtttgaatcaaacccggagttcttgtatgtggaaggcttgccagaggggattcccttccgaagccctacctggtttggaattccacgacttgaaaggatcgtccgcgggagtaataaaatcaagttcgttgttaaaaaacctgaactagttatttcctacttgcctcctgggatggctagtaaaataaacactaaagctttgcagtcccccaaaagaccacgaagtcctgggagtaattcaaaggttcctgaaattgaggtcaccgtggaaggccctaataacaacaatcctcaaacctcagctgttcgaaccccgacccagactaacggttctaacgttcccttcaagccacgagggagagagttttcctttgaggcctggaatgccaaaatcacggacctaaaacagaaagttgaaaatctcttcaatgagaaatgtggggaagctcttggccttaaacaagctgtgaaggtgccgttcgcgttatttgagtctttcccggaagacttttatgtggaaggcttacctgagggtgtgccattccgaagaccatcgacttttggcattccgaggctggagaagatactcagaaacaaagccaaaattaagttcatcattaaaaagcccgaaatgtttgagacggcgattaaggagagcacctcctctaagagccctcccagaaaaataaattcatcacccaatgttaatactactgcatcaggtgttgaagaccttaacatcattcaggtgacaattccagatgatgataatgaaagactctcgaaagttgaaaaagctagacagctaagagaacaagtgaatgacctctttagtcggaaatttggtgaagctattggtatgggttttcctgtgaaagttccctacaggaaaatcacaattaaccctggctgtgtggtggttgatggcatgcccccgggggtgtccttcaaagcccccagctacctggaaatcagctccatgagaaggatcttagactctgccgagtttatcaaattcacggtcattaggtaagtgagagtttcctgcttagtcacaggagcgaatctggagctcatgaggctgactcttctaaaatgcagccacaggtagtcatcgaatccggcttcctatgctgtgcaatcaacaaatcaaaataacttgtgtcatcattagaatgtcagatgtgcttctacgaactaagctgactcttttaattctttggcaaagggttggcaaactaggactgtttgccaaattcaggctgcctcctatttttagagtcttcctgaaacacagctacacccgtattatccatggctgctttcctgtcacagtgagtaagtagctgggactgagaaggcatggcctccaaagtctaaaatatttactctctagcactttgtagaaaaaccttagctaggcacagtggctaacgcctgtaatcccagcattttgggaggccaaggcaggcagatcacctgaggtcaggagttccagaccagcctggccaacatggtgaaatcccatctctacaaaaataaaacagttagctgggcatgatggcgggtgcctgtaatcccagctactcgggaggctgaggcaggatagtcgcttgaacccaggaggtggaggttgcaatgagccaagatcatgccactgcactccagcctggacgacagagtgagactccatcacaagaaaaaaagaactttgtcaacctctgtcttagggcgccttgtcacaggcttcgggtcagacggattcaaccttgcatcagccatttgttagccaggtcactctgttctttgtctgtaaatgagattgatcgttgttcccactgagagtgtcagctccttcccgtagagcaggcatgatgattgtactcacctctgacaccattgtgagtgccacattccttcccacgtccttgtcactgtaagagatgcccacctgagcaccaaccccaggttatcttcccctttgtcttccagccccccagaaacagctacgactcaacctacccaatcatttcatcatcagattgccactgtctctagttcaggtctcttgggactggcactcagaaatctcataataaatcctcttgaggcttctcatacactcgtcttcttccaatcttctttccctcaaaatctcatattttggttccacttcacccaccgtcattctccatatcactcccaggagttaggcaaaaagccccttccgttcttccgtatgttaaacttagaatcactctgttccctgctctgcgtttctattttttgtttttcctccatttactagtagcttaacactttctaacagtgttcttattattgatacgtatctatctcttccataagcttataaggtcacggataatacttctcattgtagtacgtaaatgacgtgggctagatatgagttgaataaacagttatacctgtaaattcttacagagtgaaaataaattgttatactttacaatttgtttctctctttagaccatttccaggacttgtgattaataaccgtgagtattttgtgaagtgttttgtttttgttttttcctggggtctgacgtgtgtgcgtgtgagtgtgtatacatgcttaacgtatatcacgttacttcacctatgtcagtaaccaggccaaatacttgttttagccctcagtaaaaacaccaggcacttcctagttgtaaaattattcaagcttcttaacttcctatcctcgatgcacttaatcataaaatggtaataatagcaccgattttgggggagtcgttccagtagatggaaagcatctggaacaggtgtcagcaagctcctgccgacgtgtatgcataaagttttattgaaaccaccatcgtgtccatttgtttatggcagaactgagagatggcagcagcaagtgtgtgcctgcaaaacctaaaatatttactaattggctctgcaagaaaagagtttgcatccccctaacctagaacagtgtctagcctctagtatgtgtttagcctacagtatgtgctcagcgaatacaatctatatttattactgcttttatgactgttataattactgtgcttggatttcgttacaaagtaagtcacaatgtgcctgcttctgttagtatttcagcacagtgcctggcacacatggggctctcaaatattgctgagcgagtgaacaaatgtcctttcaattccttaacgttgatgtcattttcaatagtattttgagccaaacttaattttgcgagtgtgttttgttttcttaactttattattaaaaatgtataaaagtgaggccaggcgtggtggctcacgcctgtaatcccagcagtttgggaggctgaggcaggcggatcagttgaggttgggagttggagaccagcccgtccaacatggtgaaagcctgtctctactaaaaatacaaaaatcagctgggtgtggtggcgcgtgcctgtaatcccagctactcaggaggctgaggcaggagagttgcttgaatcctagaggtggaggttgcagtgagctgagatcgtgccattgcactccagcctgggcaacaagagcaaaactctgtcccaataaataaataaataaaatgttctcttttgttcctgttcttgtgcggtagtgtggtatagagttttatggtaattactgtgaattagtgattctgagggacatatcagaactctgaggtttgtttccttctcatcttgagggaaacagcaaatgtatgttaaaatgcttttccaagggaacaacacatccttacattatttaaaccaatctgcttcattttcagagctggttgatcagagtgagtcagaaggccccgtgatacaagaatcagctgaaccaagccagttggaagttccagccacagaagaaataaaagagactgatggaagctctcagatcaagcaagaaccagaccccacgtggtagacctcttccctcctaggcttaaagtatcagtggttgagaagagcttttcggacctgttactaccccaagctgtgtaatatacttgtataacagaaataccttctatacaaacctttttttctacttttagatagaaatgtctactttttcagcagttctgtgaattaaagagcagagtgactgtgggtctggaatggctggtgtacttgggaatgtactatcaggattttacagcaatgctgggaaatgacagggaaaatgacaggaatgaatctcaccagattttttatgtactcagcagagccttgagttacggtgtttattttccaatcaagtgaagatatctcctacttctcctactggaacatctcagcttctgcagtgaagaaaaattcctgtgatagttcagttctttagtttttctatttgaaaaaaaaaaatcatttaaatgatcctttgttcacggctctccttaatgactgagtgaacagttcctatctgtatatttgactaaaccttttcctaagctatctctcatggttcctatgtttttttatcataattaaaagcaaaaccatctggatcacctaacagtcagaggtcagtatctcagcgtgtgaattatagaggaaatacagagagaacctcttccacttttacttttcgtccaaataaaatgcatggtgtaccagaagttgaagatcgggttgaggattggggctagctcgatgacactaaggccccaacatcgcgggacctgctgtggcgcggattcttaggaacgctgttctagccggccccctctccaggggtcgccgtggccggcattatttcctagttcttcttgtaaccctgaggtgccagcgcggggagtgaggaggggtcagggggctaaggatgcaacctctgacgttctgcgccttcctaggagagtcttacatgtgttgagatttcacaagcaatgcgagttgtaaaataccagctctacaagaagctaggctctgtgacggcatagttttcagtagctttatcacaatattcacaatggagaattatatgacatggtagcagaaataggcccttttatgtgttgcttctattttacctcaaattgtagatatagggtaatcaataaaatccatccatgcctttcacacactaagt

SEQ ID NO: 5195 - protein, 543 aa, Homo sapiens; identical to SEQ ID NO: 4195

SEQ ID NO: 5196 - DNA, 3656 bp, Homo sapiens
gggtcttgttctgtctcccaagctggagtgcagtggtgtggtcataggtcactgcagcgtcgaactcctaggctcaagtgatcctcttgcctcaggctcctgagtagctgggacaacaggcgtgtaccacacctggatactttttaaatttttggtagagaagggatctcactctattgccaagctggtgtcgaactcttggtcttaagcagccctcccacgtcagcatcccaaagtgttgggatttcagagggatcatggcccaagttgcaatgtccaccctccccgttgaagatgaggagtcctcggagagcaggatggtggtgacattcctcatgtcagctctcgagtccatgtgtaaagaactggccaagtccaaagccgaagtggcctgcattgcagtgtatgaaacagacgtgtttgtcgtcggaactgaaagaggacgtgcttttgtcaataccagaaaggattttcaaaaagattttgtaaaatattgtgttgaagaagaagaaaaagctgcagagatgcataaaatgaaatctacaacccaggcaaatcggatgagtgtagatgctgtagaaattgaaacactcagaaaaacagttgaggactatttctgcttttgctatgggaaagctttaggcaaatccacagtggtacctgtaccatatgagaagatgctgcgagaccagtcggctgtggtagtgcaggggcttccggaaggtgttgcctttaaacaccccgagaactatgatcttgcaaccctgaaatggattttggagaacaaagcagggatttcattcatcattaagagaccttttttagagccaaagaagcatgtaggtggtcgtgtgatggtaacagatgctgacaggtcaatactatctccaggtggaagttgtggccccatcaaagtgaaaactgaacccacagaagattctggaagccaccattcttcagagggcaatgaaggcacagaaatggaagtaccagcagaagattctactcaacatgtcccttcagaaacaagtgaggaccctgaagttgaggtgactattgaagatgatgattattctccaccgtctaagagaccaaaggccaatgagctaccgcagccaccagtcccggaacccgccaatgctgggaagcggaaagtgagggagttcaacttcgagaaatggaatgctcgcatcactgatctacgtaaacaagttgaagaattgtttgaaaggaaatatgctcaagccataaaagccaaaggtccggtgacgatcccgtaccctcttttccagtctcatgttgaagatctttatgtagaaggacttcctgaaggaattccttttagaaggccatctacttacggaattcctcgcctggagaggatattacttgcaaaggaaaggattcgttttgtgattaagaaacatgagcttctgaattcaacacgtgaagatttacagcttgataagccagcttcaggagtaaaggaagaatggtatgccagaatcactaaattaagaaagatggtggatcagcttttctgcaaaaaatttgcggaagccttggggagcactgaagccaaggctgtaccgtaccaaaaatttgaggcacacccgaatgatctgtacgtggaaggactgccagaaaacattcctttccgaagtccctcatggtatggaatcccaaggctggaaaaaatcattcaagtgggcaatcgaattaaatttgttattaaaagaccagaacttctgactcacagtaccactgaagttactcagccaagaacgaatacaccagctcaagctcttggactcaccgaggcagtaaaagtaccatatcctgtgtttgaatcaaacccggagttcttgtatgtggaaggcttgccagaggggattcccttccgaagccctacctggtttggaattccacgacttgaaaggatcgtccgcgggagtaataaaatcaagttcgttgttaaaaaacctgaactagttatttcctacttgcctcctgggatggctagtaaaataaacactaaagctttgcagtcccccaaaagaccacgaagtcctgggagtaattcaaaggttcctgaaattgaggtcaccgtggaaggccctaataacaacaatcctcaaacctcagctgttcgaaccccgacccagactaacggttctaacgttcccttcaagccacgagggagagagttttcctttgaggcctggaatgccaaaatcacggacctaaaacagaaagttgaaaatctcttcaatgagaaatgtggggaagctcttggccttaaacaagctgtgaaggtgccgttcgcgttatttgagtctttcccggaagacttttatgtggaaggcttacctgagggtgtgccattccgaagaccatcgacttttggcattccgaggctggagaagatactcagaaacaaagccaaaattaagttcatcattaaaaagcccgaaatgtttgagacggcgattaaggagagcacctcctctaagagccctcccagaaaaataaattcatcacccaatgttaatactactgcatcaggtgttgaagaccttaacatcattcaggtgacaattccagatgatgataatgaaagactctcgaaagttgaaaaagctagacagctaagagaacaagtgaatgacctctttagtcggaaatttggtgaagctattggtatgggttttcctgtgaaagttccctacaggaaaatcacaattaaccctggctgtgtggtggttgatggcatgcccccgggggtgtccttcaaagcccccagctacctggaaatcagctccatgagaaggatcttagactctgccgagtttatcaaattcacggtcattagaccatttccaggacttgtgattaataaccagctggttgatcagagtgagtcagaaggccccgtgatacaagaatcagctgaaccaagccagttggaagttccagccacagaagaaataaaagagactgatggaagctctcagatcaagcaagaaccagaccccacgtggtagacctcttccctcctaggcaaaaccatctggatcacctaacagtcagaggtcagtatctcagcgtgtgaattatagaggaaatacagagagaacctcttccacttttacttttcgtccaaataaaatgcatggtgtaccagaagttgaagatcgggttgaggattggggctagctcgatgacactaaggccccaacatcgcgggacctgctgtggcgcggattcttaggaacgctgttctagccggccccctctccaggggtcgccgtggccggcattatttcctagttcttcttgtaaccctgaggtgccagcgcggggagtgaggaggggtcagggggctaaggatgcaacctctgacgttctgcgccttcctaggagagtcttacatgtgttgagatttcacaagcaatgcgagttgtaaaataccagctctacaagaagctaggctctgtgacggcatagttttcagtagctttatcacaatattcacaatggagaattatatgacatggtagcagaaataggcccttttatgtgttgcttctattttacctcaaattgtagatatagggtaatcaataaaatccatccatgcctttcacacactaagt

SEQ ID NO: 5197 - protein, 928 aa, Homo sapiens; identical to SEQ ID NO: 4237

SEQ ID NO: 5198 - DNA, 4351 bp, Homo sapiens
gggtcttgttctgtctcccaagctggagtgcagtggtgtggtcataggtcactgcagcgtcgaactcctaggctcaagtgatcctcttgcctcaggctcctgagtagctgggacaacaggcgtgtaccacacctggatactttttaaatttttggtagagaagggatctcactctattgccaagctggtgtcgaactcttggtcttaagcagccctcccacgtcagcatcccaaagtgttgggatttcagagggatcatggcccaagttgcaatgtccaccctccccgttgaagatgaggagtcctcggagagcaggatggtggtgacattcctcatgtcagctctcgagtccatgtgtaaagaactggccaagtccaaagccgaagtggcctgcattgcagtgtatgaaacagacgtgtttgtcgtcggaactgaaagaggacgtgcttttgtcaataccagaaaggattttcaaaaagattttgtaaaatattgtgttgaagaagaagaaaaagctgcagagatgcataaaatgaaatctacaacccaggcaaatcggatgagtgtagatgctgtagaaattgaaacactcagaaaaacagttgaggactatttctgcttttgctatgggaaagctttaggcaaatccacagtggtacctgtaccatatgagaagatgctgcgagaccagtcggctgtggtagtgcaggggcttccggaaggtgttgcctttaaacaccccgagaactatgatcttgcaaccctgaaatggattttggagaacaaagcagggatttcattcatcattaagagaccttttttagagccaaagaagcatgtaggtggtcgtgtgatggtaacagatgctgacaggtcaatactatctccaggtggaagttgtggccccatcaaagtgaaaactgaacccacagaagattctggcatttccctggaaatggcagctgtgacagtaaaggaagaatcagaagatcctgattattatcaatataacattcaagcaggcccttctgaaactgatgatgttgatgaaaaacagcccctatcgaagcctttgcaaggaagccaccattcttcagagggcaatgaaggcacagaaatggaagtaccagcagaagattctactcaacatgtcccttcagaaacaagtgaggaccctgaagttgaggtgactattgaagatgatgattattctccaccgtctaagagaccaaaggccaatgagctaccgcagccaccagtcccggaacccgccaatgctgggaagcggaaagtgagggagttcaacttcgagaaatggaatgctcgcatcactgatctacgtaaacaagttgaagaattgtttgaaaggaaatatgctcaagccataaaagccaaaggtccggtgacgatcccgtaccctcttttccagtctcatgttgaagatctttatgtagaaggacttcctgaaggaattccttttagaaggccatctacttacggaattcctcgcctggagaggatattacttgcaaaggaaaggattcgttttgtgattaagaaacatgagcttctgaattcaacacgtgaagatttacagcttgataagccagcttcaggagtaaaggaagaatggtatgccagaatcactaaattaagaaagatggtggatcagcttttctgcaaaaaatttgcggaagccttggggagcactgaagccaaggctgtaccgtaccaaaaatttgaggcacacccgaatgatctgtacgtggaaggactgccagaaaacattcctttccgaagtccctcatggtatggaatcccaaggctggaaaaaatcattcaagtgggcaatcgaattaaatttgttattaaaagaccagaacttctgactcacagtaccactgaagttactcagccaagaacgaatacaccagtcaaagaagattggaatgtcagaattaccaagctacggaagcaagtggaagagatttttaatttgaaatttgctcaagctcttggactcaccgaggcagtaaaagtaccatatcctgtgtttgaatcaaacccggagttcttgaaaggatcgtccgcgggagtaataaaatcaagttcgttgttaaaaaacctgaactagttatttcctacttgcctcctgggatggctagtaaaataaacactaaagctttgcagtcccccaaaagaccacgaagtcctgggagtaattcaaaggttcctgaaattgaggtcaccgtggaaggccctaataacaacaatcctcaaacctcagctgttcgaaccccgacccagactaacggttctaacgttcccttcaagccacgagggagagagttttcctttgaggcctggaatgccaaaatcacggacctaaaacagaaagttgaaaatctcttcaatgagaaatgtggggaagctcttggccttaaacaagctgtgaaggtgccgttcgcgttatttgagtctttcccggaagacttttatgtggaaggcttacctgagggtgtgccattccgaagaccatcgacttttggcattccgaggctggagaagatactcagaaacaaagccaaaattaagttcatcattaaaaagcccgaaatgtttgagacggcgattaaggagagcacctcctctaagagccctcccagaaaaataaattcatcacccaatgttaatactactgcatcaggtgttgaagaccttaacatcattcaggtgacaattccagatgatgataatgaaagactctcgaaagttgaaaaagctagacagctaagagaacaagtgaatgacctctttagtcggaaatttggtgaagctattggtatgggttttcctgtgaaagttccctacaggaaaatcacaattaaccctggctgtgtggtggttgatggcatgcccccgggggtgtccttcaaagcccccagctacctggaaatcagctccatgagaaggatcttagactctgccgagtttatcaaattcacggtcattagaccatttccaggacttgtgattaataaccagctggttgatcagagtgagtcagaaggccccgtgatacaagaatcagctgaaccaagccagttggaagttccagccacagaagaaataaaagagactgatggaagctctcagatcaagcaagaaccagaccccacgtggtagacctcttccctcctaggcttaaagtatcagtggttgagaagagcttttcggacctgttactaccccaagctgtgtaatatacttgtataacagaaataccttctatacaaacctttttttctacttttagatagaaatgtctactttttcagcagttctgtgaattaaagagcagagtgactgtgggtctggaatggctggtgtacttgggaatgtactatcaggattttacagcaatgctgggaaatgacagggaaaatgacaggaatgaatctcaccagattttttatgtactcagcagagccttgagttacggtgtttattttccaatcaagtgaagatatctcctacttctcctactggaacatctcagcttctgcagtgaagaaaaattcctgtgatagttcagttctttagtttttctatttgaaaaaaaaaaatcatttaaatgatcctttgttcacggctctccttaatgactgagtgaacagttcctatctgtatatttgactaaaccttttcctaagctatctctcatggttcctatgtttttttatcataattaaaagcaaaaccatctggatcacctaacagtcagaggtcagtatctcagcgtgtgaattatagaggaaatacagagagaacctcttccacttttacttttcgtccaaataaaatgcatggtgtaccagaagttgaagatcgggttgaggattggggctagctcgatgacactaaggccccaacatcgcgggacctgctgtggcgcggattcttaggaacgctgttctagccggccccctctccaggggtcgccgtggccggcattatttcctagttcttcttgtaaccctgaggtgccagcgcggggagtgaggaggggtcagggggctaaggatgcaacctctgacgttctgcgccttcctaggagagtcttacatgtgttgagatttcacaagcaatgcgagttgtaaaataccagctctacaagaagctaggctctgtgacggcatagttttcagtagctttatcacaatattcacaatggagaattatatgacatggtagcagaaataggcccttttatgtgttgcttctattttacctcaaattgtagatatagggtaatcaataaaatccatccatgcctttcacacactaagt

SEQ ID NO: 5199 - protein, 625 aa, Homo sapiens; identical to SEQ ID NO: 4033

SEQ ID NO: 5200 - DNA, 7112 bp, Homo sapiens
gggtcttgttctgtctcccaagctggagtgcagtggtgtggtcataggtcactgcagcgtcgaactcctaggctcaagtgatcctcttgcctcaggctcctgagtagctgggacaacaggcgtgtaccacacctggatactttttaaatttttggtagagaagggatctcactctattgccaagctggtgtcgaactcttggtcttaagcagccctcccacgtcagcatcccaaagtgttgggatttcagagggatcatggcccaagttgcaatgtccaccctccccgttgaagatgaggagtcctcggagagcaggatggtggtgacattcctcatgtcagctctcgagtccatgtgtaaagaactggccaagtccaaagccgaagtggcctgcattgcagtgtatgaaacagacgtgtttgtcgtcggaactgaaagaggacgtgcttttgtcaataccagaaaggattttcaaaaagattttgtaaaatattgtgttgaagaagaagaaaaagctgcagagatgcataaaatgaaatctacaacccaggcaaatcggatgagtgtagatgctgtagaaattgaaacactcagaaaaacagttgaggactatttctgcttttgctatgggaaagctttaggcaaatccacagtggtacctgtaccatatgagaagatgctgcgagaccagtcggctgtggtagtgcaggggcttccggaaggtgttgcctttaaacaccccgagaactatgatcttgcaaccctgaaatggattttggagaacaaagcagggatttcattcatcattaagagaccttttttagagccaaagaagcatgtaggtggtcgtgtgatggtaacagatgctgacaggtcaatactatctccaggtggaagttgtggccccatcaaagtgaaaactgaacccacagaagattctggcatttccctggaaatggcagctgtgacagtaaaggaagaatcagaagatcctgattattatcaatataacattcaagcaggcccttctgaaactgatgatgttgatgaaaaacagcccctatcgaagcctttgcaaggaagccaccattcttcagagggcaatgaaggcacagaaatggaagtaccagcagaagattctactcaacatgtcccttcagaaacaagtgaggaccctgaagttgaggtgactattgaagatgatgattattctccaccgtctaagagaccaaaggccaatgagctaccgcagccaccagtcccggaacccgccaatgctgggaagcggaaagtgagggagttcaacttcgagaaatggaatgctcgcatcactgatctacgtaaacaagttgaagaattgtttgaaaggaaatatgctcaagccataaaagccaaaggtccggtgacgatcccgtaccctcttttccagtctcatgttgaagatctttatgtagaaggacttcctgaaggaattccttttagaaggccatctacttacggaattcctcgcctggagaggatattacttgcaaaggaaaggattcgttttgtgattaagaaacatgagcttctgaattcaacacgtgaagatttacagcttgataagccagcttcaggagtaaaggaagaatggtatgccagaatcactaaattaagaaagatggtggatcagcttttctgcaaaaaatttgcggaagccttggggagcactgaagccaaggctgtaccgtaccaaaaatttgaggcacacccgaatgatctgtacgtggaaggactgccagaaaacattcctttccgaagtccctcatggtatggaatcccaaggctggaaaaaatcattcaagtgggcaatcgaattaaatttgttattaaaagaccagaacttctgactcacagtaccactgaagttactcagccaagaacgaatacaccagtcaaagaagattggaatgtcagaattaccaagctacggaagcaagtggaagagatttttaatttgaaatttgctcaagctcttggactcaccgaggcagtaaaagtaccatatcctgtgtttgaatcaaacccggagttcttgaaaggatcgtccgcgggagtaataaaatcaagttcgttgttaaaaaacctgaactagttatttcctacttgcctcctgggatggctagtaaaataaacactaaagctttgcagtcccccaaaagaccacgaagtcctgggagtaattcaaaggttcctgaaattgaggtcaccgtggaaggccctaataacaacaatcctcaaacctcagctgttcgaaccccgacccagactaacggttctaacgttcccttcaagccacgagggagagagttttcctttgaggcctggaatgccaaaatcacggacctaaaacagaaagttgaaaatctcttcaatgagaaatgtggggaagctcttggccttaaacaagctgtgaaggtgccgttcgcgttatttgagtctttcccggaagacttttatgtggaaggcttacctgagggtgtgccattccgaagaccatcgacttttggcattccgaggctggagaagatactcagaaacaaagccaaaattaagttcatcattaaaaagcccgaaatgtttgagacggcgattaaggagagcacctcctctaagagccctcccagaaaaataaattcatcacccaatgttaatactactgcatcaggtgttgaagaccttaacatcattcaggtgacaattccagatgatgataatgaaagactctcgaaagttgaaaaagctagacagctaagagaacaagtgaatgacctctttagtcggaaatttggtgaagctattggtatgggttttcctgtgaaagttccctacaggaaaatcacaattaaccctggctgtgtggtggttgatggcatgcccccgggggtgtccttcaaagcccccagctacctggaaatcagctccatgagaaggatcttagactctgccgagtttatcaaattcacggtcattaggtaagtgagagtttcctgcttagtcacaggagcgaatctggagctcatgaggctgactcttctaaaatgcagccacaggtagtcatcgaatccggcttcctatgctgtgcaatcaacaaatcaaaataacttgtgtcatcattagaatgtcagatgtgcttctacgaactaagctgactcttttaattctttggcaaagggttggcaaactaggactgtttgccaaattcaggctgcctcctatttttagagtcttcctgaaacacagctacacccgtattatccatggctgctttcctgtcacagtgagtaagtagctgggactgagaaggcatggcctccaaagtctaaaatatttactctctagcactttgtagaaaaaccttagctaggcacagtggctaacgcctgtaatcccagcattttgggaggccaaggcaggcagatcacctgaggtcaggagttccagaccagcctggccaacatggtgaaatcccatctctacaaaaataaaacagttagctgggcatgatggcgggtgcctgtaatcccagctactcgggaggctgaggcaggatagtcgcttgaacccaggaggtggaggttgcaatgagccaagatcatgccactgcactccagcctggacgacagagtgagactccatcacaagaaaaaaagaactttgtcaacctctgtcttagggcgccttgtcacaggcttcgggtcagacggattcaaccttgcatcagccatttgttagccaggtcactctgttctttgtctgtaaatgagattgatcgttgttcccactgagagtgtcagctccttcccgtagagcaggcatgatgattgtactcacctctgacaccattgtgagtgccacattccttcccacgtccttgtcactgtaagagatgcccacctgagcaccaaccccaggttatcttcccctttgtcttccagccccccagaaacagctacgactcaacctacccaatcatttcatcatcagattgccactgtctctagttcaggtctcttgggactggcactcagaaatctcataataaatcctcttgaggcttctcatacactcgtcttcttccaatcttctttccctcaaaatctcatattttggttccacttcacccaccgtcattctccatatcactcccaggagttaggcaaaaagccccttccgttcttccgtatgttaaacttagaatcactctgttccctgctctgcgtttctattttttgtttttcctccatttactagtagcttaacactttctaacagtgttcttattattgatacgtatctatctcttccataagcttataaggtcacggataatacttctcattgtagtacgtaaatgacgtgggctagatatgagttgaataaacagttatacctgtaaattcttacagagtgaaaataaattgttatactttacaatttgtttctctctttagaccatttccaggacttgtgattaataaccgtgagtattttgtgaagtgttttgtttttgttttttcctggggtctgacgtgtgtgcgtgtgagtgtgtatacatgcttaacgtatatcacgttacttcacctatgtcagtaaccaggccaaatacttgttttagccctcagtaaaaacaccaggcacttcctagttgtaaaattattcaagcttcttaacttcctatcctcgatgcacttaatcataaaatggtaataatagcaccgattttgggggagtcgttccagtagatggaaagcatctggaacaggtgtcagcaagctcctgccgacgtgtatgcataaagttttattgaaaccaccatcgtgtccatttgtttatggcagaactgagagatggcagcagcaagtgtgtgcctgcaaaacctaaaatatttactaattggctctgcaagaaaagagtttgcatccccctaacctagaacagtgtctagcctctagtatgtgtttagcctacagtatgtgctcagcgaatacaatctatatttattactgcttttatgactgttataattactgtgcttggatttcgttacaaagtaagtcacaatgtgcctgcttctgttagtatttcagcacagtgcctggcacacatggggctctcaaatattgctgagcgagtgaacaaatgtcctttcaattccttaacgttgatgtcattttcaatagtattttgagccaaacttaattttgcgagtgtgttttgttttcttaactttattattaaaaatgtataaaagtgaggccaggcgtggtggctcacgcctgtaatcccagcagtttgggaggctgaggcaggcggatcagttgaggttgggagttggagaccagcccgtccaacatggtgaaagcctgtctctactaaaaatacaaaaatcagctgggtgtggtggcgcgtgcctgtaatcccagctactcaggaggctgaggcaggagagttgcttgaatcctagaggtggaggttgcagtgagctgagatcgtgccattgcactccagcctgggcaacaagagcaaaactctgtcccaataaataaataaataaaatgttctcttttgttcctgttcttgtgcggtagtgtggtatagagttttatggtaattactgtgaattagtgattctgagggacatatcagaactctgaggtttgtttccttctcatcttgagggaaacagcaaatgtatgttaaaatgcttttccaagggaacaacacatccttacattatttaaaccaatctgcttcattttcagagctggttgatcagagtgagtcagaaggccccgtgatacaagaatcagctgaaccaagccagttggaagttccagccacagaagaaataaaagagactgatggaagctctcagatcaagcaagaaccagaccccacgtggtagacctcttccctcctaggcttaaagtatcagtggttgagaagagcttttcggacctgttactaccccaagctgtgtaatatacttgtataacagaaataccttctatacaaacctttttttctacttttagatagaaatgtctactttttcagcagttctgtgaattaaagagcagagtgactgtgggtctggaatggctggtgtacttgggaatgtactatcaggattttacagcaatgctgggaaatgacagggaaaatgacaggaatgaatctcaccagattttttatgtactcagcagagccttgagttacggtgtttattttccaatcaagtgaagatatctcctacttctcctactggaacatctcagcttctgcagtgaagaaaaattcctgtgatagttcagttctttagtttttctatttgaaaaaaaaaaatcatttaaatgatcctttgttcacggctctccttaatgactgagtgaacagttcctatctgtatatttgactaaaccttttcctaagctatctctcatggttcctatgtttttttatcataattaaaagcaaaaccatctggatcacctaacagtcagaggtcagtatctcagcgtgtgaattatagaggaaatacagagagaacctcttccacttttacttttcgtccaaataaaatgcatggtgtaccagaagttgaagatcgggttgaggattggggctagctcgatgacactaaggccccaacatcgcgggacctgctgtggcgcggattcttaggaacgctgttctagccggccccctctccaggggtcgccgtggccggcattatttcctagttcttcttgtaaccctgaggtgccagcgcggggagtgaggaggggtcagggggctaaggatgcaacctctgacgttctgcgccttcctaggagagtcttacatgtgttgagatttcacaagcaatgcgagttgtaaaataccagctctacaagaagctaggctctgtgacggcatagttttcagtagctttatcacaatattcacaatggagaattatatgacatggtagcagaaataggcccttttatgtgttgcttctattttacctcaaattgtagatatagggtaatcaataaaatccatccatgcctttcacacactaagt

SEQ ID NO: 5201 - protein, 625 aa, Homo sapiens; identical to SEQ ID NO: 4033

SEQ ID NO: 5202 - DNA, 4134 bp, Homo sapiens
gggtcttgttctgtctcccaagctggagtgcagtggtgtggtcataggtcactgcagcgtcgaactcctaggctcaagtgatcctcttgcctcaggctcctgagtagctgggacaacaggcgtgtaccacacctggatactttttaaatttttggtagagaagggatctcactctattgccaagctggtgtcgaactcttggtcttaagcagccctcccacgtcagcatcccaaagtgttgggatttcagagggatcatggcccaagttgcaatgtccaccctccccgttgaagatgaggagtcctcggagagcaggatggtggtgacattcctcatgtcagctctcgagtccatgtgtaaagaactggccaagtccaaagccgaagtggcctgcattgcagtgtatgaaacagacgtgtttgtcgtcggaactgaaagaggacgtgcttttgtcaataccagaaaggattttcaaaaagattttgtaaaatattgtgttgaagaagaagaaaaagctgcagagatgcataaaatgaaatctacaacccaggcaaatcggatgagtgtagatgctgtagaaattgaaacactcagaaaaacagttgaggactatttctgcttttgctatgggaaagctttaggcaaatccacagtggtacctgtaccatatgagaagatgctgcgagaccagtcggctgtggtagtgcaggggcttccggaaggtgttgcctttaaacaccccgagaactatgatcttgcaaccctgaaatggattttggagaacaaagcagggatttcattcatcattaagagaccttttttagagccaaagaagcatgtaggtggtcgtgtgatggtaacagatgctgacaggtcaatactatctccaggtggaagttgtggccccatcaaagtgaaaactgaacccacagaagattctggcatttccctggaaatggcagctgtgacagtaaaggaagaatcagaagatcctgattattatcaatataacattcaagcaggcccttctgaaactgatgatgttgatgaaaaacagcccctatcgaagcctttgcaaggaagccaccattcttcagagggcaatgaaggcacagaaatggaagtaccagcagaagattctactcaacatgtcccttcagaaacaagtgaggaccctgaagttgaggtgactattgaagatgatgattattctccaccgtctaagagaccaaaggccaatgagctaccgcagccaccagtcccggaacccgccaatgctgggaagcggaaagtgagggagttcaacttcgagaaatggaatgctcgcatcactgatctacgtaaacaagttgaagaattgtttgaaaggaaatatgctcaagccataaaagccaaaggtccggtgacgatcccgtaccctcttttccagtctcatgttgaagatctttatgtagaaggacttcctgaaggaattccttttagaaggccatctacttacggaattcctcgcctggagaggatattacttgcaaaggaaaggattcgttttgtgattaagaaacatgagcttctgaattcaacacgtgaagatttacagcttgataagccagcttcaggagtaaaggaagaatggtatgccagaatcactaaattaagaaagatggtggatcagcttttctgcaaaaaatttgcggaagccttggggagcactgaagccaaggctgtaccgtaccaaaaatttgaggcacacccgaatgatctgtacgtggaaggactgccagaaaacattcctttccgaagtccctcatggtatggaatcccaaggctggaaaaaatcattcaagtgggcaatcgaattaaatttgttattaaaagaccagaacttctgactcacagtaccactgaagttactcagccaagaacgaatacaccagtcaaagaagattggaatgtcagaattaccaagctacggaagcaagtggaagagatttttaatttgaaatttgctcaagctcttggactcaccgaggcagtaaaagtaccatatcctgtgtttgaatcaaacccggagttcttgtatgtggaaggcttgccagaggggattcccttccgaagccctacctggtttggaattccacgacttgaaaggatcgtccgcgggagtaataaaatcaagttcgttgttaaaaaacctgaactagttatttcctacttgcctcctgggatggctagtaaaataaacactaaagctttgcagtcccccaaaagaccacgaagtcctgggagtaattcaaaggttcctgaaattgaggtcaccgtggaaggccctaataacaacaatcctcaaacctcagctgttcgaaccccgacccagactaacggttctaacgttcccttcaagccacgagggagagagttttcctttgaggcctggaatgccaaaatcacggacctaaaacagaaagttgaaaatctcttcaatgagaaatgtggggaagctcttggccttaaacaagctgtgaaggtgccgttcgcgttatttgagtctttcccggaagacttttatgtggaaggcttacctgagggtgtgccattccgaagaccatcgacttttggcattccgaggctggagaagatactcagaaacaaagccaaaattaagttcatcattaaaaagcccgaaatgtttgagacggcgattaaggagagcacctcctctaagagccctcccagaaaaataaattcatcacccaatgttaatactactgcatcaggtgttgaagaccttaacatcattcaggtgacaattccagatgatgataatgaaagactctcgaaagttgaaaaagctagacagctaagagaacaagtgaatgacctctttagtcggaaatttggtgaagctattggtatgggttttcctgtgaaagttccctacaggaaaatcacaattaaccctggctgtgtggtggttgatggcatgcccccgggggtgtccttcaaagcccccagctacctggaaatcagctccatgagaaggatcttagactctgccgagtttatcaaattcacggtcattagaccatttccaggacttgtgattaataaccagctggttgatcagagtgagtcagaaggccccgtgatacaagaatcagctgaaccaagccagttggaagttccagccacagaagaaataaaagagactgatggaagctctcagatcaagcaagaaccagaccccacgtggtagacctcttccctcctaggagccttgagttacggtgtttattttccaatcaagtgaagatatctcctacttctcctactggaacatctcagcttctgcagtgaagaaaaattcctgtgatagttcagttctttagtttttctatttgaaaaaaaaaaatcatttaaatgatcctttgttcacggctctccttaatgactgagtgaacagttcctatctgtatatttgactaaaccttttcctaagctatctctcatggttcctatgtttttttatcataattaaaagcaaaaccatctggatcacctaacagtcagaggtcagtatctcagcgtgtgaattatagaggaaatacagagagaacctcttccacttttacttttcgtccaaataaaatgcatggtgtaccagaagttgaagatcgggttgaggattggggctagctcgatgacactaaggccccaacatcgcgggacctgctgtggcgcggattcttaggaacgctgttctagccggccccctctccaggggtcgccgtggccggcattatttcctagttcttcttgtaaccctgaggtgccagcgcggggagtgaggaggggtcagggggctaaggatgcaacctctgacgttctgcgccttcctaggagagtcttacatgtgttgagatttcacaagcaatgcgagttgtaaaataccagctctacaagaagctaggctctgtgacggcatagttttcagtagctttatcacaatattcacaatggagaattatatgacatggtagcagaaataggcccttttatgtgttgcttctattttacctcaaattgtagatatagggtaatcaataaaatccatccatgcctttcacacactaagt

SEQ ID NO: 5203 - protein, 998 aa, Homo sapiens; identical to SEQ ID NO: 468

SEQ ID NO: 5204 - DNA, 3944 bp, Homo sapiens
gggtcttgttctgtctcccaagctggagtgcagtggtgtggtcataggtcactgcagcgtcgaactcctaggctcaagtgatcctcttgcctcaggctcctgagtagctgggacaacaggcgtgtaccacacctggatactttttaaatttttggtagagaagggatctcactctattgccaagctggtgtcgaactcttggtcttaagcagccctcccacgtcagcatcccaaagtgttgggatttcagagggatcatggcccaagttgcaatgtccaccctccccgttgaagatgaggagtcctcggagagcaggatggtggtgacattcctcatgtcagctctcgagtccatgtgtaaagaactggccaagtccaaagccgaagtggcctgcattgcagtgtatgaaacagacgtgtttgtcgtcggaactgaaagaggacgtgcttttgtcaataccagaaaggattttcaaaaagattttgtaaaatattgtgttgaagaagaagaaaaagctgcagagatgcataaaatgaaatctacaacccaggcaaatcggatgagtgtagatgctgtagaaattgaaacactcagaaaaacagttgaggactatttctgcttttgctatgggaaagctttaggcaaatccacagtggtacctgtaccatatgagaagatgctgcgagaccagtcggctgtggtagtgcaggggcttccggaaggtgttgcctttaaacaccccgagaactatgatcttgcaaccctgaaatggattttggagaacaaagcagggatttcattcatcattaagagaccttttttagagccaaagaagcatgtaggtggtcgtgtgatggtaacagatgctgacaggtcaatactatctccaggtggaagttgtggccccatcaaagtgaaaactgaacccacagaagattctggcatttccctggaaatggcagctgtgacagtaaaggaagaatcagaagatcctgattattatcaatataacattcaaggaagccaccattcttcagagggcaatgaaggcacagaaatggaagtaccagcagaagatgatgattattctccaccgtctaagagaccaaaggccaatgagctaccgcagccaccagtcccggaacccgccaatgctgggaagcggaaagtgagggagttcaacttcgagaaatggaatgctcgcatcactgatctacgtaaacaagttgaagaattgtttgaaaggaaatatgctcaagccataaaagccaaaggtccggtgacgatcccgtaccctcttttccagtctcatgttgaagatctttatgtagaaggacttcctgaaggaattccttttagaaggccatctacttacggaattcctcgcctggagaggatattacttgcaaaggaaaggattcgttttgtgattaagaaacatgagcttctgaattcaacacgtgaagatttacagcttgataagccagcttcaggagtaaaggaagaatggtatgccagaatcactaaattaagaaagatggtggatcagcttttctgcaaaaaatttgcggaagccttggggagcactgaagccaaggctgtaccgtaccaaaaatttgaggcacacccgaatgatctgtacgtggaaggactgccagaaaacattcctttccgaagtccctcatggtatggaatcccaaggctggaaaaaatcattcaagtgggcaatcgaattaaatttgttattaaaagaccagaacttctgactcacagtaccactgaagttactcagccaagaacgaatacaccagtcaaagaagattggaatgtcagaattaccaagctacggaagcaagtggaagagatttttaatttgaaatttgctcaagctcttggactcaccgaggcagtaaaagtaccatatcctgtgtttgaatcaaacccggagttcttgaaaggatcgtccgcgggagtaataaaatcaagttcgttgttaaaaaacctgaactagttatttcctacttgcctcctgggatggctagtaaaataaacactaaagctttgcagtcccccaaaagaccacgaagtcctgggagtaattcaaaggttcctgaaattgaggtcaccgtggaaggccctaataacaacaatcctcaaacctcagctgttcgaaccccgacccagactaacggttctaacgttcccttcaagccacgagggagagagttttcctttgaggcctggaatgccaaaatcacggacctaaaacagaaagttgaaaatctcttcaatgagaaatgtggggaagctcttggccttaaacaagctgtgaaggtgccgttcgcgttatttgagtctttcccggaagacttttatgtggaaggcttacctgagggtgtgccattccgaagaccatcgacttttggcattccgaggctggagaagatactcagaaacaaagccaaaattaagttcatcattaaaaagcccgaaatgtttgagacggcgattaaggagagcacctcctctaagagccctcccagaaaaataaattcatcacccaatgttaatactactgcatcaggtgttgaagaccttaacatcattcaggtgacaattccagatgatgataatgaaagactctcgaaagttgaaaaagctagacagctaagagaacaagtgaatgacctctttagtcggaaatttggtgaagctattggtatgggttttcctgtgaaagttccctacaggaaaatcacaattaaccctggctgtgtggtggttgatggcatgcccccgggggtgtccttcaaagcccccagctacctggaaatcagctccatgagaaggatcttagactctgccgagtttatcaaattcacggtcattagaccatttccaggacttgtgattaataaccagctggttgatcagagtgagtcagaaggccccgtgatacaagaatcagctgaaccaagccagttggaagttccagccacagaagaaataaaagagactgatggaagctctcagatcaagcaagaaccagaccccacgtggtagacctcttccctcctaggagccttgagttacggtgtttattttccaatcaagtgaagatatctcctacttctcctactggaacatctcagcttctgcagtgaagaaaaattcctgtgatagttcagttctttagtttttctatttgaaaaaaaaaaatcatttaaatgatcctttgttcacggctctccttaatgactgagtgaacagttcctatctgtatatttgactaaaccttttcctaagctatctctcatggttcctatgtttttttatcataattaaaagcaaaaccatctggatcacctaacagtcagaggtcagtatctcagcgtgtgaattatagaggaaatacagagagaacctcttccacttttacttttcgtccaaataaaatgcatggtgtaccagaagttgaagatcgggttgaggattggggctagctcgatgacactaaggccccaacatcgcgggacctgctgtggcgcggattcttaggaacgctgttctagccggccccctctccaggggtcgccgtggccggcattatttcctagttcttcttgtaaccctgaggtgccagcgcggggagtgaggaggggtcagggggctaaggatgcaacctctgacgttctgcgccttcctaggagagtcttacatgtgttgagatttcacaagcaatgcgagttgtaaaataccagctctacaagaagctaggctctgtgacggcatagttttcagtagctttatcacaatattcacaatggagaattatatgacatggtagcagaaataggcccttttatgtgttgcttctattttacctcaaattgtagatatagggtaatcaataaaatccatccatgcctttcacacactaagt

SEQ ID NO: 5205 - protein, 584 aa, Homo sapiens; identical to SEQ ID NO: 4173

SEQ ID NO: 5206 - DNA, 4864 bp, Homo sapiens
gggtcttgttctgtctcccaagctggagtgcagtggtgtggtcataggtcactgcagcgtcgaactcctaggctcaagtgatcctcttgcctcaggctcctgagtagctgggacaacaggcgtgtaccacacctggatactttttaaatttttggtagagaagggatctcactctattgccaagctggtgtcgaactcttggtcttaagcagccctcccacgtcagcatcccaaagtgttgggatttcagagggatcatggcccaagttgcaatgtccaccctccccgttgaagatgaggagtcctcggagagcaggatggtggtgacattcctcatgtcagctctcgagtccatgtgtaaagaactggccaagtccaaagccgaagtggcctgcattgcagtgtatgaaacagacgtgtttgtcgtcggaactgaaagaggacgtgcttttgtcaataccagaaaggattttcaaaaagattttgtaaaatattgtgttgaagaagaagaaaaagctgcagagatgcataaaatgaaatctacaacccaggcaaatcggatgagtgtagatgctgtagaaattgaaacactcagaaaaacagttgaggactatttctgcttttgctatgggaaagctttaggcaaatccacagtggtacctgtaccatatgagaagatgctgcgagaccagtcggctgtggtagtgcaggggcttccggaaggtgttgcctttaaacaccccgagaactatgatcttgcaaccctgaaatggattttggagaacaaagcagggatttcattcatcattaagagaccttttttagagccaaagaagcatgtaggtggtcgtgtgatggtaacagatgctgacaggtcaatactatctccaggtggaagttgtggccccatcaaagtgaaaactgaacccacagaagattctggcatttccctggaaatggcagctgtgacagtaaaggaagaatcagaagatcctgattattatcaatataacattcaaggaagccaccattcttcagagggcaatgaaggcacagaaatggaagtaccagcagaagatgatgattattctccaccgtctaagagaccaaaggccaatgagctaccgcagccaccagtcccggaacccgccaatgctgggaagcggaaagtgagggagttcaacttcgagaaatggaatgctcgcatcactgatctacgtaaacaagttgaagaattgtttgaaaggaaatatgctcaagccataaaagccaaaggtccggtgacgatcccgtaccctcttttccagtctcatgttgaagatctttatgtagaaggacttcctgaaggaattccttttagaaggccatctacttacggaattcctcgcctggagaggatattacttgcaaaggaaaggattcgttttgtgattaagaaacatgagcttctgaattcaacacgtgaagatttacagcttgataagccagcttcaggagtaaaggaagaatggtatgccagaatcactaaattaagaaagatggtggatcagcttttctgcaaaaaatttgcggaagccttggggagcactgaagccaaggctgtaccgtaccaaaaatttgaggcacacccgaatgatctgtacgtggaaggactgccagaaaacattcctttccgaagtccctcatggtatggaatcccaaggctggaaaaaatcattcaagtgggcaatcgaattaaatttgttattaaaagaccagaacttctgactcacagtaccactgaagttactcagccaagaacgaatacaccagctcaagctcttggactcaccgaggcagtaaaagtaccatatcctgtgtttgaatcaaacccggagttcttgtatgtggaaggcttgccagaggggattcccttccgaagccctacctggtttggaattccacgacttgaaaggatcgtccgcgggagtaataaaatcaagttcgttgttaaaaaacctgaactagttatttcctacttgcctcctgggatggctagtaaaataaacactaaagctttgcagtcccccaaaagaccacgaagtcctgggagtaattcaaaggttcctgaaattgaggtcaccgtggaaggccctaataacaacaatcctcaaacctcagctgttcgaaccccgacccagactaacggttctaacgttcccttcaagccacgagggagagagttttcctttgaggcctggaatgccaaaatcacggacctaaaacagaaagttgaaaatctcttcaatgagaaatgtggggaagctcttggccttaaacaagctgtgaaggtgccgttcgcgttatttgagtctttcccggaagacttttatgtggaaggcttacctgagggtgtgccattccgaagaccatcgacttttggcattccgaggctggagaagatactcagaaacaaagccaaaattaagttcatcattaaaaagcccgaaatgtttgagacggcgattaaggagagcacctcctctaagagccctcccagaaaaataaattcatcacccaatgttaatactactgcatcaggtgttgaagaccttaacatcattcaggtgacaattccagatgatgataatgaaagactctcgaaagttgaaaaagctagacagctaagagaacaagtgaatgacctctttagtcggaaatttggtgaagctattggtatgggttttcctgtgaaagttccctacaggaaaatcacaattaaccctggctgtgtggtggttgatggcatgcccccgggggtgtccttcaaagcccccagctacctggaaatcagctccatgagaaggatcttagactctgccgagtttatcaaattcacggtcattagaccatttccaggacttgtgattaataaccagctggttgatcagagtgagtcagaaggccccgtgatacaagaatcagctgaaccaagccagttggaagttccagccacagaaggtaaaaggacctcttccctcctagggtaaatcagcttctgtgtcagggatgctgtgtggtgtccatctgaaccccctgcatacgcgtagctaatgtgatctccccactttcacataagatggtggccctgccttcagggaatgtgggagccaggtgggagccttcccggatatttaagctagaagattctacagggagattctccttggatcaatatatgtctctcagtcaaagatgtaaaagcacttttgccttaaaaagaatgttctgtttctaaatagagtcaacgttgtcctcctcattggaattcactatgagtcagaatcattagactgacttttttttttccatagtaatagtattttgcagagtctcacagagctgcagatcttttgttcatcttgcagagttaacaagtctgatcctgttagtccagatttcttaaatttggccaagttataataggagcagtagcttgagacccgaagtcaggaaactttgacaatggatttttttttttaatccagagacttgtactggaatttgccttaccctgtcagctcatggacttaaggtttcatcccgctttatgagtgcttctgaatccaagtcattgttacctgaatttgcaaattaagttgtgatattcgtgactgttaaattcctgtaattagattaacctctttgcttgcttgtttgttttctctcctattttagcttaaagtatcagtggttgagaagagcttttcggacctgttactaccccaagctgtgtaatatacttgtataacagaaataccttctatacaaacctttttttctacttttagatagaaatgtctactttttcagcagttctgtgaattaaagagcagagtgactgtgggtctggaatggctggtgtacttgggaatgtactatcaggattttacagcaatgctgggaaatgacagggaaaatgacaggaatgaatctcaccagattttttatgtactcagcagagccttgagttacggtgtttattttccaatcaagtgaagatatctcctacttctcctactggaacatctcagcttctgcagtgaagaaaaattcctgtgatagttcagttctttagtttttctatttgaaaaaaaaaaatcatttaaatgatcctttgttcacggctctccttaatgactgagtgaacagttcctatctgtatatttgactaaaccttttcctaagctatctctcatggttcctatgtttttttatcataattaaaagcaaaaccatctggatcacctaacagtcagaggtcagtatctcagcgtgtgaattatagaggaaatacagagagaacctcttccacttttacttttcgtccaaataaaatgcatggtgtaccagaagttgaagatcgggttgaggattggggctagctcgatgacactaaggccccaacatcgcgggacctgctgtggcgcggattcttaggaacgctgttctagccggccccctctccaggggtcgccgtggccggcattatttcctagttcttcttgtaaccctgaggtgccagcgcggggagtgaggaggggtcagggggctaaggatgcaacctctgacgttctgcgccttcctaggagagtcttacatgtgttgagatttcacaagcaatgcgagttgtaaaataccagctctacaagaagctaggctctgtgacggcatagttttcagtagctttatcacaatattcacaatggagaattatatgacatggtagcagaaataggcccttttatgtgttgcttctattttacctcaaattgtagatatagggtaatcaataaaatccatccatgcctttcacacactaagt

SEQ ID NO: 5207 - protein, 923 aa, Homo sapiens; identical to SEQ ID NO: 4035

SEQ ID NO: 5208 - DNA, 4239 bp, Homo sapiens
gggtcttgttctgtctcccaagctggagtgcagtggtgtggtcataggtcactgcagcgtcgaactcctaggctcaagtgatcctcttgcctcaggctcctgagtagctgggacaacaggcgtgtaccacacctggatactttttaaatttttggtagagaagggatctcactctattgccaagctggtgtcgaactcttggtcttaagcagccctcccacgtcagcatcccaaagtgttgggatttcagagggatcatggcccaagttgcaatgtccaccctccccgttgaagatgaggagtcctcggagagcaggatggtggtgacattcctcatgtcagctctcgagtccatgtgtaaagaactggccaagtccaaagccgaagtggcctgcattgcagtgtatgaaacagacgtgtttgtcgtcggaactgaaagaggacgtgcttttgtcaataccagaaaggattttcaaaaagattttgtaaaatattgtgttgaagaagaagaaaaagctgcagagatgcataaaatgaaatctacaacccaggcaaatcggatgagtgtagatgctgtagaaattgaaacactcagaaaaacagttgaggactatttctgcttttgctatgggaaagctttaggcaaatccacagtggtacctgtaccatatgagaagatgctgcgagaccagtcggctgtggtagtgcaggggcttccggaaggtgttgcctttaaacaccccgagaactatgatcttgcaaccctgaaatggattttggagaacaaagcagggatttcattcatcattaagagaccttttttagagccaaagaagcatgtaggtggtcgtgtgatggtaacagatgctgacaggtcaatactatctccaggtggaagttgtggccccatcaaagtgaaaactgaacccacagaagattctggcatttccctggaaatggcagctgtgacagtaaaggaagaatcagaagatcctgattattatcaatataacattcaagcaggcccttctgaaactgatgatgttgatgaaaaacagcccctatcgaagcctttgcaaggaagccaccattcttcagagggcaatgaaggcacagaaatggaagtaccagcagaagatgatgattattctccaccgtctaagagaccaaaggccaatgagctaccgcagccaccagtcccggaacccgccaatgctgggaagcggaaagtgagggagttcaacttcgagaaatggaatgctcgcatcactgatctacgtaaacaagttgaagaattgtttgaaaggaaatatgctcaagccataaaagccaaaggtccggtgacgatcccgtaccctcttttccagtctcatgttgaagatctttatgtagaaggacttcctgaaggaattccttttagaaggccatctacttacggaattcctcgcctggagaggatattacttgcaaaggaaaggattcgttttgtgattaagaaacatgagcttctgaattcaacacgtgaagatttacagcttgataagccagcttcaggagtaaaggaagaatggtatgccagaatcactaaattaagaaagatggtggatcagcttttctgcaaaaaatttgcggaagccttggggagcactgaagccaaggctgtaccgtaccaaaaatttgaggcacacccgaatgatctgtacgtggaaggactgccagaaaacattcctttccgaagtccctcatggtatggaatcccaaggctggaaaaaatcattcaagtgggcaatcgaattaaatttgttattaaaagaccagaacttctgactcacagtaccactgaagttactcagccaagaacgaatacaccagtcaaagaagattggaatgtcagaattaccaagctacggaagcaagtggaagagatttttaatttgaaatttgcttagatttgttgacagcggtttcctggagtgctgtcttgagaacgattctgaggaggctcagcaagaaagagtgtttcagttgattgggtgtgtctgtcatggagaaggaactcaagctcttggactcaccgaggcagtaaaagtaccatatcctgtgtttgaatcaaacccggagttcttgtatgtggaaggcttgccagaggggattcccttccgaagccctacctggtttggaattccacgacttgaaaggatcgtccgcgggagtaataaaatcaagttcgttgttaaaaaacctgaactagttatttcctacttgcctcctgggatggctagtaaaataaacactaaagctttgcagtcccccaaaagaccacgaagtcctgggagtaattcaaaggttcctgaaattgaggtcaccgtggaaggccctaataacaacaatcctcaaacctcagctgttcgaaccccgacccagactaacggttctaacgttcccttcaagccacgagggagagagttttcctttgaggcctggaatgccaaaatcacggacctaaaacagaaagttgaaaatctcttcaatgagaaatgtggggaagctcttggccttaaacaagctgtgaaggtgccgttcgcgttatttgagtctttcccggaagacttttatgtggaaggcttacctgagggtgtgccattccgaagaccatcgacttttggcattccgaggctggagaagatactcagaaacaaagccaaaattaagttcatcattaaaaagcccgaaatgtttgagacggcgattaaggagagcacctcctctaagagccctcccagaaaaataaattcatcacccaatgttaatactactgcatcaggtgttgaagaccttaacatcattcaggtgacaattccagatgatgataatgaaagactctcgaaagttgaaaaagctagacagctaagagaacaagtgaatgacctctttagtcggaaatttggtgaagctattggtatgggttttcctgtgaaagttccctacaggaaaatcacaattaaccctggctgtgtggtggttgatggcatgcccccgggggtgtccttcaaagcccccagctacctggaaatcagctccatgagaaggatcttagactctgccgagtttatcaaattcacggtcattagaccatttccaggacttgtgattaataaccagctggttgatcagagtgagtcagaaggccccgtgatacaagaatcagctgaaccaagccagttggaagttccagccacagaagaaataaaagagactgatggaagctctcagatcaagcaagaaccagaccccacgtggtagacctcttccctcctaggcttaaagtatcagtggttgagaagagcttttcggacctgttactaccccaagctgtagccttgagttacggtgtttattttccaatcaagtgaagatatctcctacttctcctactggaacatctcagcttctgcagtgaagaaaaattcctgtgatagttcagttctttagtttttctatttgaaaaaaaaaaatcatttaaatgatcctttgttcacggctctccttaatgactgagtgaacagttcctatctgtatatttgactaaaccttttcctaagctatctctcatggttcctatgtttttttatcataattaaaagcaaaaccatctggatcacctaacagtcagaggtcagtatctcagcgtgtgaattatagaggaaatacagagagaacctcttccacttttacttttcgtccaaataaaatgcatggtgtaccagaagttgaagatcgggttgaggattggggctagctcgatgacactaaggccccaacatcgcgggacctgctgtggcgcggattcttaggaacgctgttctagccggccccctctccaggggtcgccgtggccggcattatttcctagttcttcttgtaaccctgaggtgccagcgcggggagtgaggaggggtcagggggctaaggatgcaacctctgacgttctgcgccttcctaggagagtcttacatgtgttgagatttcacaagcaatgcgagttgtaaaataccagctctacaagaagctaggctctgtgacggcatagttttcagtagctttatcacaatattcacaatggagaattatatgacatggtagcagaaataggcccttttatgtgttgcttctattttacctcaaattgtagatatagggtaatcaataaaatccatccatgcctttcacacactaagt

SEQ ID NO: 5209 - protein, 563 aa, Homo sapiens; identical to SEQ ID NO: 4097

SEQ ID NO: 5210 - DNA, 7811 bp, Homo sapiens
gggtcttgttctgtctcccaagctggagtgcagtggtgtggtcataggtcactgcagcgtcgaactcctaggctcaagtgatcctcttgcctcaggctcctgagtagctgggacaacaggcgtgtaccacacctggatactttttaaatttttggtagagaagggatctcactctattgccaagctggtgtcgaactcttggtcttaagcagccctcccacgtcagcatcccaaagtgttgggatttcagagggatcatggcccaagttgcaatgtccaccctccccgttgaagatgaggagtcctcggagagcaggatggtggtgacattcctcatgtcagctctcgagtccatgtgtaaagaactggccaagtccaaagccgaagtggcctgcattgcagtgtatgaaacagacgtgtttgtcgtcggaactgaaagaggacgtgcttttgtcaataccagaaaggattttcaaaaagattttgtaaaatattgtgttgaagaagaagaaaaagctgcagagatgcataaaatgaaatctacaacccaggcaaatcggatgagtgtagatgctgtagaaattgaaacactcagaaaaacagttgaggactatttctgcttttgctatgggaaagctttaggcaaatccacagtggtacctgtaccatatgagaagatgctgcgagaccagtcggctgtggtagtgcaggggcttccggaaggtgttgcctttaaacaccccgagaactatgatcttgcaaccctgaaatggattttggagaacaaagcagggatttcattcatcattaagagaccttttttagagccaaagaagcatgtaggtggtcgtgtgatggtaacagatgctgacaggtcaatactatctccaggtggaagttgtggccccatcaaagtgaaaactgaacccacagaagattctggcatttccctggaaatggcagctgtgacagtaaaggaagaatcagaagatcctgattattatcaatataacattcaaggaagccaccattcttcagagggcaatgaaggcacagaaatggaagtaccagcagaagattctactcaacatgtcccttcagaaacaagtgaggaccctgaagttgaggtgactattgaagatgatgattattctccaccgtctaagagaccaaaggccaatgagctaccgcagccaccagtcccggaacccgccaatgctgggaagcggaaagtgagggagttcaacttcgagaaatggaatgctcgcatcactgatctacgtaaacaagttgaagaattgtttgaaaggaaatatgctcaagccataaaagccaaaggtccggtgacgatcccgtaccctcttttccagtctcatgttgaagatctttatgtagaaggacttcctgaaggaattccttttagaaggccatctacttacggaattcctcgcctggagaggatattacttgcaaaggaaaggattcgttttgtgattaagaaacatgagcttctgaattcaacacgtgaagatttacagcttgataagccagcttcaggagtaaaggaagaatggtatgccagaatcactaaattaagaaagatggtggatcagcttttctgcaaaaaatttgcggaagccttggggagcactgaagccaaggctgtaccgtaccaaaaatttgaggcacacccgaatgatctgtacgtggaaggactgccagaaaacattcctttccgaagtccctcatggtatggaatcccaaggctggaaaaaatcattcaagtgggcaatcgaattaaatttgttattaaaagaccagaacttctgactcacagtaccactgaagttactcagccaagaacgaatacaccagtcaaagaagattggaatgtcagaattaccaagctacggaagcaagtggaagagatttttaatttgaaatttgctcaagctcttggactcaccgaggcagtaaaagtaccatatcctgtgtttgaatcaaacccggagttcttgtatgtggaaggcttgccagaggggattcccttccgaagccctacctggtttggaattccacgacttgaaaggatcgtccgcgggagtaataaaatcaagttcgttgttaaaaaacctgaactagttatttcctacttgcctcctgggatggctagtaaaataaacactaaagctttgcagtcccccaaaagaccacgaagtcctgggagtaattcaaaggttcctgaaattgaggtcaccgtggaaggccctaataacaacaatcctcaaacctcagctgttcgaaccccgacccagactaacggttctaacgttcccttcaagccacgagggagagagttttcctttgaggcctggaatgccaaaatcacggacctaaaacagaaagttgaaaatctcttcaatgagaaatgtggggaagctcttggccttaaacaagctgtgaaggtgccgttcgcgttatttgagtctttcccggaagacttttatgtggaaggcttacctgagggtgtgccattccgaagaccatcgacttttggcattccgaggctggagaagatactcagaaacaaagccaaaattaagttcatcattaaaaagcccgaaatgtttgagacggcgattaaggagagcacctcctctaagagccctcccagaaaaataaattcatcacccaatgttaatactactgcatcaggtgttgaagaccttaacatcattcaggtgacaattccagatgatgataatgaaagactctcgaaagttgaaaaagctagacagctaagagaacaagtgaatgacctctttagtcggaaatttggtgaagctattggtatgggttttcctgtgaaagttccctacaggaaaatcacaattaaccctggctgtgtggtggttgatggcatgcccccgggggtgtccttcaaagcccccagctacctggaaatcagctccatgagaaggatcttagactctgccgagtttatcaaattcacggtcattaggtaagtgagagtttcctgcttagtcacaggagcgaatctggagctcatgaggctgactcttctaaaatgcagccacaggtagtcatcgaatccggcttcctatgctgtgcaatcaacaaatcaaaataacttgtgtcatcattagaatgtcagatgtgcttctacgaactaagctgactcttttaattctttggcaaagggttggcaaactaggactgtttgccaaattcaggctgcctcctatttttagagtcttcctgaaacacagctacacccgtattatccatggctgctttcctgtcacagtgagtaagtagctgggactgagaaggcatggcctccaaagtctaaaatatttactctctagcactttgtagaaaaaccttagctaggcacagtggctaacgcctgtaatcccagcattttgggaggccaaggcaggcagatcacctgaggtcaggagttccagaccagcctggccaacatggtgaaatcccatctctacaaaaataaaacagttagctgggcatgatggcgggtgcctgtaatcccagctactcgggaggctgaggcaggatagtcgcttgaacccaggaggtggaggttgcaatgagccaagatcatgccactgcactccagcctggacgacagagtgagactccatcacaagaaaaaaagaactttgtcaacctctgtcttagggcgccttgtcacaggcttcgggtcagacggattcaaccttgcatcagccatttgttagccaggtcactctgttctttgtctgtaaatgagattgatcgttgttcccactgagagtgtcagctccttcccgtagagcaggcatgatgattgtactcacctctgacaccattgtgagtgccacattccttcccacgtccttgtcactgtaagagatgcccacctgagcaccaaccccaggttatcttcccctttgtcttccagccccccagaaacagctacgactcaacctacccaatcatttcatcatcagattgccactgtctctagttcaggtctcttgggactggcactcagaaatctcataataaatcctcttgaggcttctcatacactcgtcttcttccaatcttctttccctcaaaatctcatattttggttccacttcacccaccgtcattctccatatcactcccaggagttaggcaaaaagccccttccgttcttccgtatgttaaacttagaatcactctgttccctgctctgcgtttctattttttgtttttcctccatttactagtagcttaacactttctaacagtgttcttattattgatacgtatctatctcttccataagcttataaggtcacggataatacttctcattgtagtacgtaaatgacgtgggctagatatgagttgaataaacagttatacctgtaaattcttacagagtgaaaataaattgttatactttacaatttgtttctctctttagaccatttccaggacttgtgattaataaccgtgagtattttgtgaagtgttttgtttttgttttttcctggggtctgacgtgtgtgcgtgtgagtgtgtatacatgcttaacgtatatcacgttacttcacctatgtcagtaaccaggccaaatacttgttttagccctcagtaaaaacaccaggcacttcctagttgtaaaattattcaagcttcttaacttcctatcctcgatgcacttaatcataaaatggtaataatagcaccgattttgggggagtcgttccagtagatggaaagcatctggaacaggtgtcagcaagctcctgccgacgtgtatgcataaagttttattgaaaccaccatcgtgtccatttgtttatggcagaactgagagatggcagcagcaagtgtgtgcctgcaaaacctaaaatatttactaattggctctgcaagaaaagagtttgcatccccctaacctagaacagtgtctagcctctagtatgtgtttagcctacagtatgtgctcagcgaatacaatctatatttattactgcttttatgactgttataattactgtgcttggatttcgttacaaagtaagtcacaatgtgcctgcttctgttagtatttcagcacagtgcctggcacacatggggctctcaaatattgctgagcgagtgaacaaatgtcctttcaattccttaacgttgatgtcattttcaatagtattttgagccaaacttaattttgcgagtgtgttttgttttcttaactttattattaaaaatgtataaaagtgaggccaggcgtggtggctcacgcctgtaatcccagcagtttgggaggctgaggcaggcggatcagttgaggttgggagttggagaccagcccgtccaacatggtgaaagcctgtctctactaaaaatacaaaaatcagctgggtgtggtggcgcgtgcctgtaatcccagctactcaggaggctgaggcaggagagttgcttgaatcctagaggtggaggttgcagtgagctgagatcgtgccattgcactccagcctgggcaacaagagcaaaactctgtcccaataaataaataaataaaatgttctcttttgttcctgttcttgtgcggtagtgtggtatagagttttatggtaattactgtgaattagtgattctgagggacatatcagaactctgaggtttgtttccttctcatcttgagggaaacagcaaatgtatgttaaaatgcttttccaagggaacaacacatccttacattatttaaaccaatctgcttcattttcagagctggttgatcagagtgagtcagaaggccccgtgatacaagaatcagctgaaccaagccagttggaagttccagccacagaagaaataaaagagactgatggaagctctcagatcaagcaagaaccagaccccacgtggtagacctcttccctcctagggtaaatcagcttctgtgtcagggatgctgtgtggtgtccatctgaaccccctgcatacgcgtagctaatgtgatctccccactttcacataagatggtggccctgccttcagggaatgtgggagccaggtgggagccttcccggatatttaagctagaagattctacagggagattctccttggatcaatatatgtctctcagtcaaagatgtaaaagcacttttgccttaaaaagaatgttctgtttctaaatagagtcaacgttgtcctcctcattggaattcactatgagtcagaatcattagactgacttttttttttccatagtaatagtattttgcagagtctcacagagctgcagatcttttgttcatcttgcagagttaacaagtctgatcctgttagtccagatttcttaaatttggccaagttataataggagcagtagcttgagacccgaagtcaggaaactttgacaatggatttttttttttaatccagagacttgtactggaatttgccttaccctgtcagctcatggacttaaggtttcatcccgctttatgagtgcttctgaatccaagtcattgttacctgaatttgcaaattaagttgtgatattcgtgactgttaaattcctgtaattagattaacctctttgcttgcttgtttgttttctctcctattttagcttaaagtatcagtggttgagaagagcttttcggacctgttactaccccaagctgtgtaatatacttgtataacagaaataccttctatacaaacctttttttctacttttagatagaaatgtctactttttcagcagttctgtgaattaaagagcagagtgactgtgggtctggaatggctggtgtacttgggaatgtactatcaggattttacagcaatgctgggaaatgacagggaaaatgacaggaatgaatctcaccagattttttatgtactcagcagagccttgagttacggtgtttattttccaatcaagtgaagatatctcctacttctcctactggaacatctcagcttctgcagtgaagaaaaattcctgtgatagttcagttctttagtttttctatttgaaaaaaaaaaatcatttaaatgatcctttgttcacggctctccttaatgactgagtgaacagttcctatctgtatatttgactaaaccttttcctaagctatctctcatggttcctatgtttttttatcataattaaaagcaaaaccatctggatcacctaacagtcagaggtcagtatctcagcgtgtgaattatagaggaaatacagagagaacctcttccacttttacttttcgtccaaataaaatgcatggtgtaccagaagttgaagatcgggttgaggattggggctagctcgatgacactaaggccccaacatcgcgggacctgctgtggcgcggattcttaggaacgctgttctagccggccccctctccaggggtcgccgtggccggcattatttcctagttcttcttgtaaccctgaggtgccagcgcggggagtgaggaggggtcagggggctaaggatgcaacctctgacgttctgcgccttcctaggagagtcttacatgtgttgagatttcacaagcaatgcgagttgtaaaataccagctctacaagaagctaggctctgtgacggcatagttttcagtagctttatcacaatattcacaatggagaattatatgacatggtagcagaaataggcccttttatgtgttgcttctattttacctcaaattgtagatatagggtaatcaataaaatccatccatgcctttcacacactaagt

SEQ ID NO: 5211 - protein, 922 aa, Homo sapiens; identical to SEQ ID NO: 4059

SEQ ID NO: 5212 - DNA, 4392 bp, Homo sapiens
gggtcttgttctgtctcccaagctggagtgcagtggtgtggtcataggtcactgcagcgtcgaactcctaggctcaagtgatcctcttgcctcaggctcctgagtagctgggacaacaggcgtgtaccacacctggatactttttaaatttttggtagagaagggatctcactctattgccaagctggtgtcgaactcttggtcttaagcagccctcccacgtcagcatcccaaagtgttgggatttcagagggatcatggcccaagttgcaatgtccaccctccccgttgaagatgaggagtcctcggagagcaggatggtggtgacattcctcatgtcagctctcgagtccatgtgtaaagaactggccaagtccaaagccgaagtggcctgcattgcagtgtatgaaacagacgtgtttgtcgtcggaactgaaagaggacgtgcttttgtcaataccagaaaggattttcaaaaagattttgtaaaatattgtgttgaagaagaagaaaaagctgcagagatgcataaaatgaaatctacaacccaggcaaatcggatgagtgtagatgctgtagaaattgaaacactcagaaaaacagttgaggactatttctgcttttgctatgggaaagctttaggcaaatccacagtggtacctgtaccatatgagaagatgctgcgagaccagtcggctgtggtagtgcaggggcttccggaaggtgttgcctttaaacaccccgagaactatgatcttgcaaccctgaaatggattttggagaacaaagcagggatttcattcatcattaagagaccttttttagagccaaagaagcatgtaggtggtcgtgtgatggtaacagatgctgacaggtcaatactatctccaggtggaagttgtggccccatcaaagtgaaaactgaacccacagaagattctggaagccaccattcttcagagggcaatgaaggcacagaaatggaagtaccagcagaagattctactcaacatgtcccttcagaaacaagtgaggaccctgaagttgaggtgactattgaagatgatgattattctccaccgtctaagagaccaaaggccaatgagctaccgcagccaccagtcccggaacccgccaatgctgggaagcggaaagtgagggagttcaacttcgagaaatggaatgctcgcatcactgatctacgtaaacaagttgaagaattgtttgaaaggaaatatgctcaagccataaaagccaaaggtccggtgacgatcccgtaccctcttttccagtctcatgttgaagatctttatgtagaaggacttcctgaaggaattccttttagaaggccatctacttacggaattcctcgcctggagaggatattacttgcaaaggaaaggattcgttttgtgattaagaaacatgagcttctgaattcaacacgtgaagatttacagcttgataagccagcttcaggagtaaaggaagaatggtatgccagaatcactaaattaagaaagatggtggatcagcttttctgcaaaaaatttgcggaagccttggggagcactgaagccaaggctgtaccgtaccaaaaatttgaggcacacccgaatgatctgtacgtggaaggactgccagaaaacattcctttccgaagtccctcatggtatggaatcccaaggctggaaaaaatcattcaagtgggcaatcgaattaaatttgttattaaaagaccagaacttctgactcacagtaccactgaagttactcagccaagaacgaatacaccagtcaaagaagattggaatgtcagaattaccaagctacggaagcaagtggaagagatttttaatttgaaatttgcttagatttgttgacagcggtttcctggagtgctgtcttgagaacgattctgaggaggctcagcaagaaagagtgtttcagttgattgggtgtgtctgtcatggagaaggaactcaagctcttggactcaccgaggcagtaaaagtaccatatcctgtgtttgaatcaaacccggagttcttgtatgtggaaggcttgccagaggggattcccttccgaagccctacctggtttggaattccacgacttgaaaggatcgtccgcgggagtaataaaatcaagttcgttgttaaaaaacctgaactagttatttcctacttgcctcctgggatggctagtaaaataaacactaaagctttgcagtcccccaaaagaccacgaagtcctgggagtaattcaaaggttcctgaaattgaggtcaccgtggaaggccctaataacaacaatcctcaaacctcagctgttcgaaccccgacccagactaacggttctaacgttcccttcaagccacgagggagagagttttcctttgaggcctggaatgccaaaatcacggacctaaaacagaaagttgaaaatctcttcaatgagaaatgtggggaagctcttggccttaaacaagctgtgaaggtgccgttcgcgttatttgagtctttcccggaagacttttatgtggaaggcttacctgagggtgtgccattccgaagaccatcgacttttggcattccgaggctggagaagatactcagaaacaaagccaaaattaagttcatcattaaaaagcccgaaatgtttgagacggcgattaaggagagcacctcctctaagagccctcccagaaaaataaattcatcacccaatgttaatactactgcatcaggtgttgaagaccttaacatcattcaggtgacaattccagatgatgataatgaaagactctcgaaagttgaaaaagctagacagctaagagaacaagtgaatgacctctttagtcggaaatttggtgaagctattggtatgggttttcctgtgaaagttccctacaggaaaatcacaattaaccctggctgtgtggtggttgatggcatgcccccgggggtgtccttcaaagcccccagctacctggaaatcagctccatgagaaggatcttagactctgccgagtttatcaaattcacggtcattagaccatttccaggacttgtgattaataaccagctggttgatcagagtgagtcagaaggccccgtgatacaagaatcagctgaaccaagccagttggaagttccagccacagaagaaataaaagagactgatggaagctctcagatcaagcaagaaccagaccccacgtggtagacctcttccctcctaggcttaaagtatcagtggttgagaagagcttttcggacctgttactaccccaagctgtgtaatatacttgtataacagaaataccttctatacaaacctttttttctacttttagatagaaatgtctactttttcagcagttctgtgaattaaagagcagagtgactgtgggtctggaatggctggtgtacttgggaatgtactatcaggattttacagcaatgctgggaaatgacagggaaaatgacaggaatgaatctcaccagattttttatgtactcagcagagccttgagttacggtgtttattttccaatcaagtgaagatatctcctacttctcctactggaacatctcagcttctgcagtgaagaaaaattcctgtgatagttcagttctttagtttttctatttgaaaaaaaaaaatcatttaaatgatcctttgttcacggctctccttaatgactgagtgaacagttcctatctgtatatttgactaaaccttttcctaagctatctctcatggttcctatgtttttttatcataattaaaagcaaaaccatctggatcacctaacagtcagaggtcagtatctcagcgtgtgaattatagaggaaatacagagagaacctcttccacttttacttttcgtccaaataaaatgcatggtgtaccagaagttgaagatcgggttgaggattggggctagctcgatgacactaaggccccaacatcgcgggacctgctgtggcgcggattcttaggaacgctgttctagccggccccctctccaggggtcgccgtggccggcattatttcctagttcttcttgtaaccctgaggtgccagcgcggggagtgaggaggggtcagggggctaaggatgcaacctctgacgttctgcgccttcctaggagagtcttacatgtgttgagatttcacaagcaatgcgagttgtaaaataccagctctacaagaagctaggctctgtgacggcatagttttcagtagctttatcacaatattcacaatggagaattatatgacatggtagcagaaataggcccttttatgtgttgcttctattttacctcaaattgtagatatagggtaatcaataaaatccatccatgcctttcacacactaagt

SEQ ID NO: 5213 - protein, 538 aa, Homo sapiens; identical to SEQ ID NO: 4183

SEQ ID NO: 5214 - DNA, 4183 bp, Homo sapiens
gggtcttgttctgtctcccaagctggagtgcagtggtgtggtcataggtcactgcagcgtcgaactcctaggctcaagtgatcctcttgcctcaggctcctgagtagctgggacaacaggcgtgtaccacacctggatactttttaaatttttggtagagaagggatctcactctattgccaagctggtgtcgaactcttggtcttaagcagccctcccacgtcagcatcccaaagtgttgggatttcagagggatcatggcccaagttgcaatgtccaccctccccgttgaagatgaggagtcctcggagagcaggatggtggtgacattcctcatgtcagctctcgagtccatgtgtaaagaactggccaagtccaaagccgaagtggcctgcattgcagtgtatgaaacagacgtgtttgtcgtcggaactgaaagaggacgtgcttttgtcaataccagaaaggattttcaaaaagattttgtaaaatattgtgttgaagaagaagaaaaagctgcagagatgcataaaatgaaatctacaacccaggcaaatcggatgagtgtagatgctgtagaaattgaaacactcagaaaaacagttgaggactatttctgcttttgctatgggaaagctttaggcaaatccacagtggtacctgtaccatatgagaagatgctgcgagaccagtcggctgtggtagtgcaggggcttccggaaggtgttgcctttaaacaccccgagaactatgatcttgcaaccctgaaatggattttggagaacaaagcagggatttcattcatcattaagagaccttttttagagccaaagaagcatgtaggtggtcgtgtgatggtaacagatgctgacaggtcaatactatctccaggtggaagttgtggccccatcaaagtgaaaactgaacccacagaagattctggcatttccctggaaatggcagctgtgacagtaaaggaagaatcagaagatcctgattattatcaatataacattcaagcaggcccttctgaaactgatgatgttgatgaaaaacagcccctatcgaagcctttgcaaggaagccaccattcttcagagggcaatgaaggcacagaaatggaagtaccagcagaagatgatgattattctccaccgtctaagagaccaaaggccaatgagctaccgcagccaccagtcccggaacccgccaatgctgggaagcggaaagtgagggagttcaacttcgagaaatggaatgctcgcatcactgatctacgtaaacaagttgaagaattgtttgaaaggaaatatgctcaagccataaaagccaaaggtccggtgacgatcccgtaccctcttttccagtctcatgttgaagatctttatgtagaaggacttcctgaaggaattccttttagaaggccatctacttacggaattcctcgcctggagaggatattacttgcaaaggaaaggattcgttttgtgattaagaaacatgagcttctgaattcaacacgtgaagatttacagcttgataagccagcttcaggagtaaaggaagaatggtatgccagaatcactaaattaagaaagatggtggatcagcttttctgcaaaaaatttgcggaagccttggggagcactgaagccaaggctgtaccgtaccaaaaatttgaggcacacccgaatgatctgtacgtggaaggactgccagaaaacattcctttccgaagtccctcatggtatggaatcccaaggctggaaaaaatcattcaagtgggcaatcgaattaaatttgttattaaaagaccagaacttctgactcacagtaccactgaagttactcagccaagaacgaatacaccagtcaaagaagattggaatgtcagaattaccaagctacggaagcaagtggaagagatttttaatttgaaatttgcttagatttgttgacagcggtttcctggagtgctgtcttgagaacgattctgaggaggctcagcaagaaagagtgtttcagttgattgggtgtgtctgtcatggagaaggaactcaagctcttggactcaccgaggcagtaaaagtaccatatcctgtgtttgaatcaaacccggagttcttgtatgtggaaggcttgccagaggggattcccttccgaagccctacctggtttggaattccacgacttgaaaggatcgtccgcgggagtaataaaatcaagttcgttgttaaaaaacctgaactagttatttcctacttgcctcctgggatggctagtaaaataaacactaaagctttgcagtcccccaaaagaccacgaagtcctgggagtaattcaaaggttcctgaaattgaggtcaccgtggaaggccctaataacaacaatcctcaaacctcagctgttcgaaccccgacccagactaacggttctaacgttcccttcaagccacgagggagagagttttcctttgaggcctggaatgccaaaatcacggacctaaaacagaaagttgaaaatctcttcaatgagaaatgtggggaagctcttggccttaaacaagctgtgaaggtgccgttcgcgttatttgagtctttcccggaagacttttatgtggaaggcttacctgagggtgtgccattccgaagaccatcgacttttggcattccgaggctggagaagatactcagaaacaaagccaaaattaagttcatcattaaaaagcccgaaatgtttgagacggcgattaaggagagcacctcctctaagagccctcccagaaaaataaattcatcacccaatgttaatactactgcatcaggtgttgaagaccttaacatcattcaggtgacaattccagatgatgataatgaaagactctcgaaagttgaaaaagctagacagctaagagaacaagtgaatgacctctttagtcggaaatttggtgaagctattggtatgggttttcctgtgaaagttccctacaggaaaatcacaattaaccctggctgtgtggtggttgatggcatgcccccgggggtgtccttcaaagcccccagctacctggaaatcagctccatgagaaggatcttagactctgccgagtttatcaaattcacggtcattagaccatttccaggacttgtgattaataaccagctggttgatcagagtgagtcagaaggccccgtgatacaagaatcagctgaaccaagccagttggaagttccagccacagaagaaataaaagagactgatggaagctctcagatcaagcaagaaccagaccccacgtggtagacctcttccctcctaggagccttgagttacggtgtttattttccaatcaagtgaagatatctcctacttctcctactggaacatctcagcttctgcagtgaagaaaaattcctgtgatagttcagttctttagtttttctatttgaaaaaaaaaaatcatttaaatgatcctttgttcacggctctccttaatgactgagtgaacagttcctatctgtatatttgactaaaccttttcctaagctatctctcatggttcctatgtttttttatcataattaaaagcaaaaccatctggatcacctaacagtcagaggtcagtatctcagcgtgtgaattatagaggaaatacagagagaacctcttccacttttacttttcgtccaaataaaatgcatggtgtaccagaagttgaagatcgggttgaggattggggctagctcgatgacactaaggccccaacatcgcgggacctgctgtggcgcggattcttaggaacgctgttctagccggccccctctccaggggtcgccgtggccggcattatttcctagttcttcttgtaaccctgaggtgccagcgcggggagtgaggaggggtcagggggctaaggatgcaacctctgacgttctgcgccttcctaggagagtcttacatgtgttgagatttcacaagcaatgcgagttgtaaaataccagctctacaagaagctaggctctgtgacggcatagttttcagtagctttatcacaatattcacaatggagaattatatgacatggtagcagaaataggcccttttatgtgttgcttctattttacctcaaattgtagatatagggtaatcaataaaatccatccatgcctttcacacactaagt

SEQ ID NO: 5215 - protein, 563 aa, Homo sapiens; identical to SEQ ID NO: 4097

SEQ ID NO: 5216 - DNA, 3939 bp, Homo sapiens
gggtcttgttctgtctcccaagctggagtgcagtggtgtggtcataggtcactgcagcgtcgaactcctaggctcaagtgatcctcttgcctcaggctcctgagtagctgggacaacaggcgtgtaccacacctggatactttttaaatttttggtagagaagggatctcactctattgccaagctggtgtcgaactcttggtcttaagcagccctcccacgtcagcatcccaaagtgttgggatttcagagggatcatggcccaagttgcaatgtccaccctccccgttgaagatgaggagtcctcggagagcaggatggtggtgacattcctcatgtcagctctcgagtccatgtgtaaagaactggccaagtccaaagccgaagtggcctgcattgcagtgtatgaaacagacgtgtttgtcgtcggaactgaaagaggacgtgcttttgtcaataccagaaaggattttcaaaaagattttgtaaaatattgtgttgaagaagaagaaaaagctgcagagatgcataaaatgaaatctacaacccaggcaaatcggatgagtgtagatgctgtagaaattgaaacactcagaaaaacagttgaggactatttctgcttttgctatgggaaagctttaggcaaatccacagtggtacctgtaccatatgagaagatgctgcgagaccagtcggctgtggtagtgcaggggcttccggaaggtgttgcctttaaacaccccgagaactatgatcttgcaaccctgaaatggattttggagaacaaagcagggatttcattcatcattaagagaccttttttagagccaaagaagcatgtaggtggtcgtgtgatggtaacagatgctgacaggtcaatactatctccaggtggaagttgtggccccatcaaagtgaaaactgaacccacagaagattctggcatttccctggaaatggcagctgtgacagtaaaggaagaatcagaagatcctgattattatcaatataacattcaaggaagccaccattcttcagagggcaatgaaggcacagaaatggaagtaccagcagaagatgatgattattctccaccgtctaagagaccaaaggccaatgagctaccgcagccaccagtcccggaacccgccaatgctgggaagcggaaagtgagggagttcaacttcgagaaatggaatgctcgcatcactgatctacgtaaacaagttgaagaattgtttgaaaggaaatatgctcaagccataaaagccaaaggtccggtgacgatcccgtaccctcttttccagtctcatgttgaagatctttatgtagaaggacttcctgaaggaattccttttagaaggccatctacttacggaattcctcgcctggagaggatattacttgcaaaggaaaggattcgttttgtgattaagaaacatgagcttctgaattcaacacgtgaagatttacagcttgataagccagcttcaggagtaaaggaagaatggtatgccagaatcactaaattaagaaagatggtggatcagcttttctgcaaaaaatttgcggaagccttggggagcactgaagccaaggctgtaccgtaccaaaaatttgaggcacacccgaatgatctgtacgtggaaggactgccagaaaacattcctttccgaagtccctcatggtatggaatcccaaggctggaaaaaatcattcaagtgggcaatcgaattaaatttgttattaaaagaccagaacttctgactcacagtaccactgaagttactcagccaagaacgaatacaccagctcaagctcttggactcaccgaggcagtaaaagtaccatatcctgtgtttgaatcaaacccggagttcttgtatgtggaaggcttgccagaggggattcccttccgaagccctacctggtttggaattccacgacttgaaaggatcgtccgcgggagtaataaaatcaagttcgttgttaaaaaacctgaactagttatttcctacttgcctcctgggatggctagtaaaataaacactaaagctttgcagtcccccaaaagaccacgaagtcctgggagtaattcaaaggttcctgaaattgaggtcaccgtggaaggccctaataacaacaatcctcaaacctcagctgttcgaaccccgacccagactaacggttctaacgttcccttcaagccacgagggagagagttttcctttgaggcctggaatgccaaaatcacggacctaaaacagaaagttgaaaatctcttcaatgagaaatgtggggaagctcttggccttaaacaagctgtgaaggtgccgttcgcgttatttgagtctttcccggaagacttttatgtggaaggcttacctgagggtgtgccattccgaagaccatcgacttttggcattccgaggctggagaagatactcagaaacaaagccaaaattaagttcatcattaaaaagcccgaaatgtttgagacggcgattaaggagagcacctcctctaagagccctcccagaaaaataaattcatcacccaatgttaatactactgcatcaggtgttgaagaccttaacatcattcaggtgacaattccagatgatgataatgaaagactctcgaaagttgaaaaagctagacagctaagagaacaagtgaatgacctctttagtcggaaatttggtgaagctattggtatgggttttcctgtgaaagttccctacaggaaaatcacaattaaccctggctgtgtggtggttgatggcatgcccccgggggtgtccttcaaagcccccagctacctggaaatcagctccatgagaaggatcttagactctgccgagtttatcaaattcacggtcattagaccatttccaggacttgtgattaataaccagctggttgatcagagtgagtcagaaggccccgtgatacaagaatcagctgaaccaagccagttggaagttccagccacagaagaaataaaagagactgatggaagctctcagatcaagcaagaaccagaccccacgtggtagacctcttccctcctaggagccttgagttacggtgtttattttccaatcaagtgaagatatctcctacttctcctactggaacatctcagcttctgcagtgaagaaaaattcctgtgatagttcagttctttagtttttctatttgaaaaaaaaaaatcatttaaatgatcctttgttcacggctctccttaatgactgagtgaacagttcctatctgtatatttgactaaaccttttcctaagctatctctcatggttcctatgtttttttatcataattaaaagcaaaaccatctggatcacctaacagtcagaggtcagtatctcagcgtgtgaattatagaggaaatacagagagaacctcttccacttttacttttcgtccaaataaaatgcatggtgtaccagaagttgaagatcgggttgaggattggggctagctcgatgacactaaggccccaacatcgcgggacctgctgtggcgcggattcttaggaacgctgttctagccggccccctctccaggggtcgccgtggccggcattatttcctagttcttcttgtaaccctgaggtgccagcgcggggagtgaggaggggtcagggggctaaggatgcaacctctgacgttctgcgccttcctaggagagtcttacatgtgttgagatttcacaagcaatgcgagttgtaaaataccagctctacaagaagctaggctctgtgacggcatagttttcagtagctttatcacaatattcacaatggagaattatatgacatggtagcagaaataggcccttttatgtgttgcttctattttacctcaaattgtagatatagggtaatcaataaaatccatccatgcctttcacacactaagt

SEQ ID NO: 5217 - protein, 933 aa, Homo sapiens; identical to SEQ ID NO: 4067

SEQ ID NO: 5218 - DNA, 5108 bp, Homo sapiens
gggtcttgttctgtctcccaagctggagtgcagtggtgtggtcataggtcactgcagcgtcgaactcctaggctcaagtgatcctcttgcctcaggctcctgagtagctgggacaacaggcgtgtaccacacctggatactttttaaatttttggtagagaagggatctcactctattgccaagctggtgtcgaactcttggtcttaagcagccctcccacgtcagcatcccaaagtgttgggatttcagagggatcatggcccaagttgcaatgtccaccctccccgttgaagatgaggagtcctcggagagcaggatggtggtgacattcctcatgtcagctctcgagtccatgtgtaaagaactggccaagtccaaagccgaagtggcctgcattgcagtgtatgaaacagacgtgtttgtcgtcggaactgaaagaggacgtgcttttgtcaataccagaaaggattttcaaaaagattttgtaaaatattgtgttgaagaagaagaaaaagctgcagagatgcataaaatgaaatctacaacccaggcaaatcggatgagtgtagatgctgtagaaattgaaacactcagaaaaacagttgaggactatttctgcttttgctatgggaaagctttaggcaaatccacagtggtacctgtaccatatgagaagatgctgcgagaccagtcggctgtggtagtgcaggggcttccggaaggtgttgcctttaaacaccccgagaactatgatcttgcaaccctgaaatggattttggagaacaaagcagggatttcattcatcattaagagaccttttttagagccaaagaagcatgtaggtggtcgtgtgatggtaacagatgctgacaggtcaatactatctccaggtggaagttgtggccccatcaaagtgaaaactgaacccacagaagattctggcatttccctggaaatggcagctgtgacagtaaaggaagaatcagaagatcctgattattatcaatataacattcaagcaggcccttctgaaactgatgatgttgatgaaaaacagcccctatcgaagcctttgcaaggaagccaccattcttcagagggcaatgaaggcacagaaatggaagtaccagcagaagatgatgattattctccaccgtctaagagaccaaaggccaatgagctaccgcagccaccagtcccggaacccgccaatgctgggaagcggaaagtgagggagttcaacttcgagaaatggaatgctcgcatcactgatctacgtaaacaagttgaagaattgtttgaaaggaaatatgctcaagccataaaagccaaaggtccggtgacgatcccgtaccctcttttccagtctcatgttgaagatctttatgtagaaggacttcctgaaggaattccttttagaaggccatctacttacggaattcctcgcctggagaggatattacttgcaaaggaaaggattcgttttgtgattaagaaacatgagcttctgaattcaacacgtgaagatttacagcttgataagccagcttcaggagtaaaggaagaatggtatgccagaatcactaaattaagaaagatggtggatcagcttttctgcaaaaaatttgcggaagccttggggagcactgaagccaaggctgtaccgtaccaaaaatttgaggcacacccgaatgatctgtacgtggaaggactgccagaaaacattcctttccgaagtccctcatggtatggaatcccaaggctggaaaaaatcattcaagtgggcaatcgaattaaatttgttattaaaagaccagaacttctgactcacagtaccactgaagttactcagccaagaacgaatacaccagtcaaagaagattggaatgtcagaattaccaagctacggaagcaagtggaagagatttttaatttgaaatttgcttagatttgttgacagcggtttcctggagtgctgtcttgagaacgattctgaggaggctcagcaagaaagagtgtttcagttgattgggtgtgtctgtcatggagaaggaactcaagctcttggactcaccgaggcagtaaaagtaccatatcctgtgtttgaatcaaacccggagttcttgtatgtggaaggcttgccagaggggattcccttccgaagccctacctggtttggaattccacgacttgaaaggatcgtccgcgggagtaataaaatcaagttcgttgttaaaaaacctgaactagttatttcctacttgcctcctgggatggctagtaaaataaacactaaagctttgcagtcccccaaaagaccacgaagtcctgggagtaattcaaaggttcctgaaattgaggtcaccgtggaaggccctaataacaacaatcctcaaacctcagctgttcgaaccccgacccagactaacggttctaacgttcccttcaagccacgagggagagagttttcctttgaggcctggaatgccaaaatcacggacctaaaacagaaagttgaaaatctcttcaatgagaaatgtggggaagctcttggccttaaacaagctgtgaaggtgccgttcgcgttatttgagtctttcccggaagacttttatgtggaaggcttacctgagggtgtgccattccgaagaccatcgacttttggcattccgaggctggagaagatactcagaaacaaagccaaaattaagttcatcattaaaaagcccgaaatgtttgagacggcgattaaggagagcacctcctctaagagccctcccagaaaaataaattcatcacccaatgttaatactactgcatcaggtgttgaagaccttaacatcattcaggtgacaattccagatgatgataatgaaagactctcgaaagttgaaaaagctagacagctaagagaacaagtgaatgacctctttagtcggaaatttggtgaagctattggtatgggttttcctgtgaaagttccctacaggaaaatcacaattaaccctggctgtgtggtggttgatggcatgcccccgggggtgtccttcaaagcccccagctacctggaaatcagctccatgagaaggatcttagactctgccgagtttatcaaattcacggtcattagaccatttccaggacttgtgattaataaccagctggttgatcagagtgagtcagaaggccccgtgatacaagaatcagctgaaccaagccagttggaagttccagccacagaaggtaaaaggacctcttccctcctagggtaaatcagcttctgtgtcagggatgctgtgtggtgtccatctgaaccccctgcatacgcgtagctaatgtgatctccccactttcacataagatggtggccctgccttcagggaatgtgggagccaggtgggagccttcccggatatttaagctagaagattctacagggagattctccttggatcaatatatgtctctcagtcaaagatgtaaaagcacttttgccttaaaaagaatgttctgtttctaaatagagtcaacgttgtcctcctcattggaattcactatgagtcagaatcattagactgacttttttttttccatagtaatagtattttgcagagtctcacagagctgcagatcttttgttcatcttgcagagttaacaagtctgatcctgttagtccagatttcttaaatttggccaagttataataggagcagtagcttgagacccgaagtcaggaaactttgacaatggatttttttttttaatccagagacttgtactggaatttgccttaccctgtcagctcatggacttaaggtttcatcccgctttatgagtgcttctgaatccaagtcattgttacctgaatttgcaaattaagttgtgatattcgtgactgttaaattcctgtaattagattaacctctttgcttgcttgtttgttttctctcctattttagcttaaagtatcagtggttgagaagagcttttcggacctgttactaccccaagctgtgtaatatacttgtataacagaaataccttctatacaaacctttttttctacttttagatagaaatgtctactttttcagcagttctgtgaattaaagagcagagtgactgtgggtctggaatggctggtgtacttgggaatgtactatcaggattttacagcaatgctgggaaatgacagggaaaatgacaggaatgaatctcaccagattttttatgtactcagcagagccttgagttacggtgtttattttccaatcaagtgaagatatctcctacttctcctactggaacatctcagcttctgcagtgaagaaaaattcctgtgatagttcagttctttagtttttctatttgaaaaaaaaaaatcatttaaatgatcctttgttcacggctctccttaatgactgagtgaacagttcctatctgtatatttgactaaaccttttcctaagctatctctcatggttcctatgtttttttatcataattaaaagcaaaaccatctggatcacctaacagtcagaggtcagtatctcagcgtgtgaattatagaggaaatacagagagaacctcttccacttttacttttcgtccaaataaaatgcatggtgtaccagaagttgaagatcgggttgaggattggggctagctcgatgacactaaggccccaacatcgcgggacctgctgtggcgcggattcttaggaacgctgttctagccggccccctctccaggggtcgccgtggccggcattatttcctagttcttcttgtaaccctgaggtgccagcgcggggagtgaggaggggtcagggggctaaggatgcaacctctgacgttctgcgccttcctaggagagtcttacatgtgttgagatttcacaagcaatgcgagttgtaaaataccagctctacaagaagctaggctctgtgacggcatagttttcagtagctttatcacaatattcacaatggagaattatatgacatggtagcagaaataggcccttttatgtgttgcttctattttacctcaaattgtagatatagggtaatcaataaaatccatccatgcctttcacacactaagt

SEQ ID NO: 5219 - protein, 563 aa, Homo sapiens; identical to SEQ ID NO: 4097

SEQ ID NO: 5220 - DNA, 3996 bp, Homo sapiens
gggtcttgttctgtctcccaagctggagtgcagtggtgtggtcataggtcactgcagcgtcgaactcctaggctcaagtgatcctcttgcctcaggctcctgagtagctgggacaacaggcgtgtaccacacctggatactttttaaatttttggtagagaagggatctcactctattgccaagctggtgtcgaactcttggtcttaagcagccctcccacgtcagcatcccaaagtgttgggatttcagagggatcatggcccaagttgcaatgtccaccctccccgttgaagatgaggagtcctcggagagcaggatggtggtgacattcctcatgtcagctctcgagtccatgtgtaaagaactggccaagtccaaagccgaagtggcctgcattgcagtgtatgaaacagacgtgtttgtcgtcggaactgaaagaggacgtgcttttgtcaataccagaaaggattttcaaaaagattttgtaaaatattgtgttgaagaagaagaaaaagctgcagagatgcataaaatgaaatctacaacccaggcaaatcggatgagtgtagatgctgtagaaattgaaacactcagaaaaacagttgaggactatttctgcttttgctatgggaaagctttaggcaaatccacagtggtacctgtaccatatgagaagatgctgcgagaccagtcggctgtggtagtgcaggggcttccggaaggtgttgcctttaaacaccccgagaactatgatcttgcaaccctgaaatggattttggagaacaaagcagggatttcattcatcattaagagaccttttttagagccaaagaagcatgtaggtggtcgtgtgatggtaacagatgctgacaggtcaatactatctccaggtggaagttgtggccccatcaaagtgaaaactgaacccacagaagattctggaagccaccattcttcagagggcaatgaaggcacagaaatggaagtaccagcagaagattctactcaacatgtcccttcagaaacaagtgaggaccctgaagttgaggtgactattgaagatgatgattattctccaccgtctaagagaccaaaggccaatgagctaccgcagccaccagtcccggaacccgccaatgctgggaagcggaaagtgagggagttcaacttcgagaaatggaatgctcgcatcactgatctacgtaaacaagttgaagaattgtttgaaaggaaatatgctcaagccataaaagccaaaggtccggtgacgatcccgtaccctcttttccagtctcatgttgaagatctttatgtagaaggacttcctgaaggaattccttttagaaggccatctacttacggaattcctcgcctggagaggatattacttgcaaaggaaaggattcgttttgtgattaagaaacatgagcttctgaattcaacacgtgaagatttacagcttgataagccagcttcaggagtaaaggaagaatggtatgccagaatcactaaattaagaaagatggtggatcagcttttctgcaaaaaatttgcggaagccttggggagcactgaagccaaggctgtaccgtaccaaaaatttgaggcacacccgaatgatctgtacgtggaaggactgccagaaaacattcctttccgaagtccctcatggtatggaatcccaaggctggaaaaaatcattcaagtgggcaatcgaattaaatttgttattaaaagaccagaacttctgactcacagtaccactgaagttactcagccaagaacgaatacaccagtcaaagaagattggaatgtcagaattaccaagctacggaagcaagtggaagagatttttaatttgaaatttgctcaagctcttggactcaccgaggcagtaaaagtaccatatcctgtgtttgaatcaaacccggagttcttgtatgtggaaggcttgccagaggggattcccttccgaagccctacctggtttggaattccacgacttgaaaggatcgtccgcgggagtaataaaatcaagttcgttgttaaaaaacctgaactagttatttcctacttgcctcctgggatggctagtaaaataaacactaaagctttgcagtcccccaaaagaccacgaagtcctgggagtaattcaaaggttcctgaaattgaggtcaccgtggaaggccctaataacaacaatcctcaaacctcagctgttcgaaccccgacccagactaacggttctaacgttcccttcaagccacgagggagagagttttcctttgaggcctggaatgccaaaatcacggacctaaaacagaaagttgaaaatctcttcaatgagaaatgtggggaagctcttggccttaaacaagctgtgaaggtgccgttcgcgttatttgagtctttcccggaagacttttatgtggaaggcttacctgagggtgtgccattccgaagaccatcgacttttggcattccgaggctggagaagatactcagaaacaaagccaaaattaagttcatcattaaaaagcccgaaatgtttgagacggcgattaaggagagcacctcctctaagagccctcccagaaaaataaattcatcacccaatgttaatactactgcatcaggtgttgaagaccttaacatcattcaggtgacaattccagatgatgataatgaaagactctcgaaagttgaaaaagctagacagctaagagaacaagtgaatgacctctttagtcggaaatttggtgaagctattggtatgggttttcctgtgaaagttccctacaggaaaatcacaattaaccctggctgtgtggtggttgatggcatgcccccgggggtgtccttcaaagcccccagctacctggaaatcagctccatgagaaggatcttagactctgccgagtttatcaaattcacggtcattagaccatttccaggacttgtgattaataaccagctggttgatcagagtgagtcagaaggccccgtgatacaagaatcagctgaaccaagccagttggaagttccagccacagaagaaataaaagagactgatggaagctctcagatcaagcaagaaccagaccccacgtggtagacctcttccctcctaggagccttgagttacggtgtttattttccaatcaagtgaagatatctcctacttctcctactggaacatctcagcttctgcagtgaagaaaaattcctgtgatagttcagttctttagtttttctatttgaaaaaaaaaaatcatttaaatgatcctttgttcacggctctccttaatgactgagtgaacagttcctatctgtatatttgactaaaccttttcctaagctatctctcatggttcctatgtttttttatcataattaaaagcaaaaccatctggatcacctaacagtcagaggtcagtatctcagcgtgtgaattatagaggaaatacagagagaacctcttccacttttacttttcgtccaaataaaatgcatggtgtaccagaagttgaagatcgggttgaggattggggctagctcgatgacactaaggccccaacatcgcgggacctgctgtggcgcggattcttaggaacgctgttctagccggccccctctccaggggtcgccgtggccggcattatttcctagttcttcttgtaaccctgaggtgccagcgcggggagtgaggaggggtcagggggctaaggatgcaacctctgacgttctgcgccttcctaggagagtcttacatgtgttgagatttcacaagcaatgcgagttgtaaaataccagctctacaagaagctaggctctgtgacggcatagttttcagtagctttatcacaatattcacaatggagaattatatgacatggtagcagaaataggcccttttatgtgttgcttctattttacctcaaattgtagatatagggtaatcaataaaatccatccatgcctttcacacactaagt

SEQ ID NO: 5221 - protein, 952 aa, Homo sapiens; identical to SEQ ID NO: 4069

SEQ ID NO: 5222 - DNA, 7049 bp, Homo sapiens
gggtcttgttctgtctcccaagctggagtgcagtggtgtggtcataggtcactgcagcgtcgaactcctaggctcaagtgatcctcttgcctcaggctcctgagtagctgggacaacaggcgtgtaccacacctggatactttttaaatttttggtagagaagggatctcactctattgccaagctggtgtcgaactcttggtcttaagcagccctcccacgtcagcatcccaaagtgttgggatttcagagggatcatggcccaagttgcaatgtccaccctccccgttgaagatgaggagtcctcggagagcaggatggtggtgacattcctcatgtcagctctcgagtccatgtgtaaagaactggccaagtccaaagccgaagtggcctgcattgcagtgtatgaaacagacgtgtttgtcgtcggaactgaaagaggacgtgcttttgtcaataccagaaaggattttcaaaaagattttgtaaaatattgtgttgaagaagaagaaaaagctgcagagatgcataaaatgaaatctacaacccaggcaaatcggatgagtgtagatgctgtagaaattgaaacactcagaaaaacagttgaggactatttctgcttttgctatgggaaagctttaggcaaatccacagtggtacctgtaccatatgagaagatgctgcgagaccagtcggctgtggtagtgcaggggcttccggaaggtgttgcctttaaacaccccgagaactatgatcttgcaaccctgaaatggattttggagaacaaagcagggatttcattcatcattaagagaccttttttagagccaaagaagcatgtaggtggtcgtgtgatggtaacagatgctgacaggtcaatactatctccaggtggaagttgtggccccatcaaagtgaaaactgaacccacagaagattctggcatttccctggaaatggcagctgtgacagtaaaggaagaatcagaagatcctgattattatcaatataacattcaagcaggcccttctgaaactgatgatgttgatgaaaaacagcccctatcgaagcctttgcaaggaagccaccattcttcagagggcaatgaaggcacagaaatggaagtaccagcagaagatgatgattattctccaccgtctaagagaccaaaggccaatgagctaccgcagccaccagtcccggaacccgccaatgctgggaagcggaaagtgagggagttcaacttcgagaaatggaatgctcgcatcactgatctacgtaaacaagttgaagaattgtttgaaaggaaatatgctcaagccataaaagccaaaggtccggtgacgatcccgtaccctcttttccagtctcatgttgaagatctttatgtagaaggacttcctgaaggaattccttttagaaggccatctacttacggaattcctcgcctggagaggatattacttgcaaaggaaaggattcgttttgtgattaagaaacatgagcttctgaattcaacacgtgaagatttacagcttgataagccagcttcaggagtaaaggaagaatggtatgccagaatcactaaattaagaaagatggtggatcagcttttctgcaaaaaatttgcggaagccttggggagcactgaagccaaggctgtaccgtaccaaaaatttgaggcacacccgaatgatctgtacgtggaaggactgccagaaaacattcctttccgaagtccctcatggtatggaatcccaaggctggaaaaaatcattcaagtgggcaatcgaattaaatttgttattaaaagaccagaacttctgactcacagtaccactgaagttactcagccaagaacgaatacaccagtcaaagaagattggaatgtcagaattaccaagctacggaagcaagtggaagagatttttaatttgaaatttgctcaagctcttggactcaccgaggcagtaaaagtaccatatcctgtgtttgaatcaaacccggagttcttgaaaggatcgtccgcgggagtaataaaatcaagttcgttgttaaaaaacctgaactagttatttcctacttgcctcctgggatggctagtaaaataaacactaaagctttgcagtcccccaaaagaccacgaagtcctgggagtaattcaaaggttcctgaaattgaggtcaccgtggaaggccctaataacaacaatcctcaaacctcagctgttcgaaccccgacccagactaacggttctaacgttcccttcaagccacgagggagagagttttcctttgaggcctggaatgccaaaatcacggacctaaaacagaaagttgaaaatctcttcaatgagaaatgtggggaagctcttggccttaaacaagctgtgaaggtgccgttcgcgttatttgagtctttcccggaagacttttatgtggaaggcttacctgagggtgtgccattccgaagaccatcgacttttggcattccgaggctggagaagatactcagaaacaaagccaaaattaagttcatcattaaaaagcccgaaatgtttgagacggcgattaaggagagcacctcctctaagagccctcccagaaaaataaattcatcacccaatgttaatactactgcatcaggtgttgaagaccttaacatcattcaggtgacaattccagatgatgataatgaaagactctcgaaagttgaaaaagctagacagctaagagaacaagtgaatgacctctttagtcggaaatttggtgaagctattggtatgggttttcctgtgaaagttccctacaggaaaatcacaattaaccctggctgtgtggtggttgatggcatgcccccgggggtgtccttcaaagcccccagctacctggaaatcagctccatgagaaggatcttagactctgccgagtttatcaaattcacggtcattaggtaagtgagagtttcctgcttagtcacaggagcgaatctggagctcatgaggctgactcttctaaaatgcagccacaggtagtcatcgaatccggcttcctatgctgtgcaatcaacaaatcaaaataacttgtgtcatcattagaatgtcagatgtgcttctacgaactaagctgactcttttaattctttggcaaagggttggcaaactaggactgtttgccaaattcaggctgcctcctatttttagagtcttcctgaaacacagctacacccgtattatccatggctgctttcctgtcacagtgagtaagtagctgggactgagaaggcatggcctccaaagtctaaaatatttactctctagcactttgtagaaaaaccttagctaggcacagtggctaacgcctgtaatcccagcattttgggaggccaaggcaggcagatcacctgaggtcaggagttccagaccagcctggccaacatggtgaaatcccatctctacaaaaataaaacagttagctgggcatgatggcgggtgcctgtaatcccagctactcgggaggctgaggcaggatagtcgcttgaacccaggaggtggaggttgcaatgagccaagatcatgccactgcactccagcctggacgacagagtgagactccatcacaagaaaaaaagaactttgtcaacctctgtcttagggcgccttgtcacaggcttcgggtcagacggattcaaccttgcatcagccatttgttagccaggtcactctgttctttgtctgtaaatgagattgatcgttgttcccactgagagtgtcagctccttcccgtagagcaggcatgatgattgtactcacctctgacaccattgtgagtgccacattccttcccacgtccttgtcactgtaagagatgcccacctgagcaccaaccccaggttatcttcccctttgtcttccagccccccagaaacagctacgactcaacctacccaatcatttcatcatcagattgccactgtctctagttcaggtctcttgggactggcactcagaaatctcataataaatcctcttgaggcttctcatacactcgtcttcttccaatcttctttccctcaaaatctcatattttggttccacttcacccaccgtcattctccatatcactcccaggagttaggcaaaaagccccttccgttcttccgtatgttaaacttagaatcactctgttccctgctctgcgtttctattttttgtttttcctccatttactagtagcttaacactttctaacagtgttcttattattgatacgtatctatctcttccataagcttataaggtcacggataatacttctcattgtagtacgtaaatgacgtgggctagatatgagttgaataaacagttatacctgtaaattcttacagagtgaaaataaattgttatactttacaatttgtttctctctttagaccatttccaggacttgtgattaataaccgtgagtattttgtgaagtgttttgtttttgttttttcctggggtctgacgtgtgtgcgtgtgagtgtgtatacatgcttaacgtatatcacgttacttcacctatgtcagtaaccaggccaaatacttgttttagccctcagtaaaaacaccaggcacttcctagttgtaaaattattcaagcttcttaacttcctatcctcgatgcacttaatcataaaatggtaataatagcaccgattttgggggagtcgttccagtagatggaaagcatctggaacaggtgtcagcaagctcctgccgacgtgtatgcataaagttttattgaaaccaccatcgtgtccatttgtttatggcagaactgagagatggcagcagcaagtgtgtgcctgcaaaacctaaaatatttactaattggctctgcaagaaaagagtttgcatccccctaacctagaacagtgtctagcctctagtatgtgtttagcctacagtatgtgctcagcgaatacaatctatatttattactgcttttatgactgttataattactgtgcttggatttcgttacaaagtaagtcacaatgtgcctgcttctgttagtatttcagcacagtgcctggcacacatggggctctcaaatattgctgagcgagtgaacaaatgtcctttcaattccttaacgttgatgtcattttcaatagtattttgagccaaacttaattttgcgagtgtgttttgttttcttaactttattattaaaaatgtataaaagtgaggccaggcgtggtggctcacgcctgtaatcccagcagtttgggaggctgaggcaggcggatcagttgaggttgggagttggagaccagcccgtccaacatggtgaaagcctgtctctactaaaaatacaaaaatcagctgggtgtggtggcgcgtgcctgtaatcccagctactcaggaggctgaggcaggagagttgcttgaatcctagaggtggaggttgcagtgagctgagatcgtgccattgcactccagcctgggcaacaagagcaaaactctgtcccaataaataaataaataaaatgttctcttttgttcctgttcttgtgcggtagtgtggtatagagttttatggtaattactgtgaattagtgattctgagggacatatcagaactctgaggtttgtttccttctcatcttgagggaaacagcaaatgtatgttaaaatgcttttccaagggaacaacacatccttacattatttaaaccaatctgcttcattttcagagctggttgatcagagtgagtcagaaggccccgtgatacaagaatcagctgaaccaagccagttggaagttccagccacagaagaaataaaagagactgatggaagctctcagatcaagcaagaaccagaccccacgtggtagacctcttccctcctaggcttaaagtatcagtggttgagaagagcttttcggacctgttactaccccaagctgtgtaatatacttgtataacagaaataccttctatacaaacctttttttctacttttagatagaaatgtctactttttcagcagttctgtgaattaaagagcagagtgactgtgggtctggaatggctggtgtacttgggaatgtactatcaggattttacagcaatgctgggaaatgacagggaaaatgacaggaatgaatctcaccagattttttatgtactcagcagagccttgagttacggtgtttattttccaatcaagtgaagatatctcctacttctcctactggaacatctcagcttctgcagtgaagaaaaattcctgtgatagttcagttctttagtttttctatttgaaaaaaaaaaatcatttaaatgatcctttgttcacggctctccttaatgactgagtgaacagttcctatctgtatatttgactaaaccttttcctaagctatctctcatggttcctatgtttttttatcataattaaaagcaaaaccatctggatcacctaacagtcagaggtcagtatctcagcgtgtgaattatagaggaaatacagagagaacctcttccacttttacttttcgtccaaataaaatgcatggtgtaccagaagttgaagatcgggttgaggattggggctagctcgatgacactaaggccccaacatcgcgggacctgctgtggcgcggattcttaggaacgctgttctagccggccccctctccaggggtcgccgtggccggcattatttcctagttcttcttgtaaccctgaggtgccagcgcggggagtgaggaggggtcagggggctaaggatgcaacctctgacgttctgcgccttcctaggagagtcttacatgtgttgagatttcacaagcaatgcgagttgtaaaataccagctctacaagaagctaggctctgtgacggcatagttttcagtagctttatcacaatattcacaatggagaattatatgacatggtagcagaaataggcccttttatgtgttgcttctattttacctcaaattgtagatatagggtaatcaataaaatccatccatgcctttcacacactaagt

SEQ ID NO: 5223 - protein, 604 aa, Homo sapiens; identical to SEQ ID NO: 4117

SEQ ID NO: 5224 - DNA, 3999 bp, Homo sapiens
gggtcttgttctgtctcccaagctggagtgcagtggtgtggtcataggtcactgcagcgtcgaactcctaggctcaagtgatcctcttgcctcaggctcctgagtagctgggacaacaggcgtgtaccacacctggatactttttaaatttttggtagagaagggatctcactctattgccaagctggtgtcgaactcttggtcttaagcagccctcccacgtcagcatcccaaagtgttgggatttcagagggatcatggcccaagttgcaatgtccaccctccccgttgaagatgaggagtcctcggagagcaggatggtggtgacattcctcatgtcagctctcgagtccatgtgtaaagaactggccaagtccaaagccgaagtggcctgcattgcagtgtatgaaacagacgtgtttgtcgtcggaactgaaagaggacgtgcttttgtcaataccagaaaggattttcaaaaagattttgtaaaatattgtgttgaagaagaagaaaaagctgcagagatgcataaaatgaaatctacaacccaggcaaatcggatgagtgtagatgctgtagaaattgaaacactcagaaaaacagttgaggactatttctgcttttgctatgggaaagctttaggcaaatccacagtggtacctgtaccatatgagaagatgctgcgagaccagtcggctgtggtagtgcaggggcttccggaaggtgttgcctttaaacaccccgagaactatgatcttgcaaccctgaaatggattttggagaacaaagcagggatttcattcatcattaagagaccttttttagagccaaagaagcatgtaggtggtcgtgtgatggtaacagatgctgacaggtcaatactatctccaggtggaagttgtggccccatcaaagtgaaaactgaacccacagaagattctggcatttccctggaaatggcagctgtgacagtaaaggaagaatcagaagatcctgattattatcaatataacattcaagcaggcccttctgaaactgatgatgttgatgaaaaacagcccctatcgaagcctttgcaaggaagccaccattcttcagagggcaatgaaggcacagaaatggaagtaccagcagaagatgatgattattctccaccgtctaagagaccaaaggccaatgagctaccgcagccaccagtcccggaacccgccaatgctgggaagcggaaagtgagggagttcaacttcgagaaatggaatgctcgcatcactgatctacgtaaacaagttgaagaattgtttgaaaggaaatatgctcaagccataaaagccaaaggtccggtgacgatcccgtaccctcttttccagtctcatgttgaagatctttatgtagaaggacttcctgaaggaattccttttagaaggccatctacttacggaattcctcgcctggagaggatattacttgcaaaggaaaggattcgttttgtgattaagaaacatgagcttctgaattcaacacgtgaagatttacagcttgataagccagcttcaggagtaaaggaagaatggtatgccagaatcactaaattaagaaagatggtggatcagcttttctgcaaaaaatttgcggaagccttggggagcactgaagccaaggctgtaccgtaccaaaaatttgaggcacacccgaatgatctgtacgtggaaggactgccagaaaacattcctttccgaagtccctcatggtatggaatcccaaggctggaaaaaatcattcaagtgggcaatcgaattaaatttgttattaaaagaccagaacttctgactcacagtaccactgaagttactcagccaagaacgaatacaccagctcaagctcttggactcaccgaggcagtaaaagtaccatatcctgtgtttgaatcaaacccggagttcttgtatgtggaaggcttgccagaggggattcccttccgaagccctacctggtttggaattccacgacttgaaaggatcgtccgcgggagtaataaaatcaagttcgttgttaaaaaacctgaactagttatttcctacttgcctcctgggatggctagtaaaataaacactaaagctttgcagtcccccaaaagaccacgaagtcctgggagtaattcaaaggttcctgaaattgaggtcaccgtggaaggccctaataacaacaatcctcaaacctcagctgttcgaaccccgacccagactaacggttctaacgttcccttcaagccacgagggagagagttttcctttgaggcctggaatgccaaaatcacggacctaaaacagaaagttgaaaatctcttcaatgagaaatgtggggaagctcttggccttaaacaagctgtgaaggtgccgttcgcgttatttgagtctttcccggaagacttttatgtggaaggcttacctgagggtgtgccattccgaagaccatcgacttttggcattccgaggctggagaagatactcagaaacaaagccaaaattaagttcatcattaaaaagcccgaaatgtttgagacggcgattaaggagagcacctcctctaagagccctcccagaaaaataaattcatcacccaatgttaatactactgcatcaggtgttgaagaccttaacatcattcaggtgacaattccagatgatgataatgaaagactctcgaaagttgaaaaagctagacagctaagagaacaagtgaatgacctctttagtcggaaatttggtgaagctattggtatgggttttcctgtgaaagttccctacaggaaaatcacaattaaccctggctgtgtggtggttgatggcatgcccccgggggtgtccttcaaagcccccagctacctggaaatcagctccatgagaaggatcttagactctgccgagtttatcaaattcacggtcattagaccatttccaggacttgtgattaataaccagctggttgatcagagtgagtcagaaggccccgtgatacaagaatcagctgaaccaagccagttggaagttccagccacagaagaaataaaagagactgatggaagctctcagatcaagcaagaaccagaccccacgtggtagacctcttccctcctaggagccttgagttacggtgtttattttccaatcaagtgaagatatctcctacttctcctactggaacatctcagcttctgcagtgaagaaaaattcctgtgatagttcagttctttagtttttctatttgaaaaaaaaaaatcatttaaatgatcctttgttcacggctctccttaatgactgagtgaacagttcctatctgtatatttgactaaaccttttcctaagctatctctcatggttcctatgtttttttatcataattaaaagcaaaaccatctggatcacctaacagtcagaggtcagtatctcagcgtgtgaattatagaggaaatacagagagaacctcttccacttttacttttcgtccaaataaaatgcatggtgtaccagaagttgaagatcgggttgaggattggggctagctcgatgacactaaggccccaacatcgcgggacctgctgtggcgcggattcttaggaacgctgttctagccggccccctctccaggggtcgccgtggccggcattatttcctagttcttcttgtaaccctgaggtgccagcgcggggagtgaggaggggtcagggggctaaggatgcaacctctgacgttctgcgccttcctaggagagtcttacatgtgttgagatttcacaagcaatgcgagttgtaaaataccagctctacaagaagctaggctctgtgacggcatagttttcagtagctttatcacaatattcacaatggagaattatatgacatggtagcagaaataggcccttttatgtgttgcttctattttacctcaaattgtagatatagggtaatcaataaaatccatccatgcctttcacacactaagt

SEQ ID NO: 5225 - protein, 953 aa, Homo sapiens; identical to SEQ ID NO: 4179

SEQ ID NO: 5226 - DNA, 4996 bp, Homo sapiens
gggtcttgttctgtctcccaagctggagtgcagtggtgtggtcataggtcactgcagcgtcgaactcctaggctcaagtgatcctcttgcctcaggctcctgagtagctgggacaacaggcgtgtaccacacctggatactttttaaatttttggtagagaagggatctcactctattgccaagctggtgtcgaactcttggtcttaagcagccctcccacgtcagcatcccaaagtgttgggatttcagagggatcatggcccaagttgcaatgtccaccctccccgttgaagatgaggagtcctcggagagcaggatggtggtgacattcctcatgtcagctctcgagtccatgtgtaaagaactggccaagtccaaagccgaagtggcctgcattgcagtgtatgaaacagacgtgtttgtcgtcggaactgaaagaggacgtgcttttgtcaataccagaaaggattttcaaaaagattttgtaaaatattgtgttgaagaagaagaaaaagctgcagagatgcataaaatgaaatctacaacccaggcaaatcggatgagtgtagatgctgtagaaattgaaacactcagaaaaacagttgaggactatttctgcttttgctatgggaaagctttaggcaaatccacagtggtacctgtaccatatgagaagatgctgcgagaccagtcggctgtggtagtgcaggggcttccggaaggtgttgcctttaaacaccccgagaactatgatcttgcaaccctgaaatggattttggagaacaaagcagggatttcattcatcattaagagaccttttttagagccaaagaagcatgtaggtggtcgtgtgatggtaacagatgctgacaggtcaatactatctccaggtggaagttgtggccccatcaaagtgaaaactgaacccacagaagattctggcatttccctggaaatggcagctgtgacagtaaaggaagaatcagaagatcctgattattatcaatataacattcaagcaggcccttctgaaactgatgatgttgatgaaaaacagcccctatcgaagcctttgcaaggaagccaccattcttcagagggcaatgaaggcacagaaatggaagtaccagcagaagatgatgattattctccaccgtctaagagaccaaaggccaatgagctaccgcagccaccagtcccggaacccgccaatgctgggaagcggaaagtgagggagttcaacttcgagaaatggaatgctcgcatcactgatctacgtaaacaagttgaagaattgtttgaaaggaaatatgctcaagccataaaagccaaaggtccggtgacgatcccgtaccctcttttccagtctcatgttgaagatctttatgtagaaggacttcctgaaggaattccttttagaaggccatctacttacggaattcctcgcctggagaggatattacttgcaaaggaaaggattcgttttgtgattaagaaacatgagcttctgaattcaacacgtgaagatttacagcttgataagccagcttcaggagtaaaggaagaatggtatgccagaatcactaaattaagaaagatggtggatcagcttttctgcaaaaaatttgcggaagccttggggagcactgaagccaaggctgtaccgtaccaaaaatttgaggcacacccgaatgatctgtacgtggaaggactgccagaaaacattcctttccgaagtccctcatggtatggaatcccaaggctggaaaaaatcattcaagtgggcaatcgaattaaatttgttattaaaagaccagaacttctgactcacagtaccactgaagttactcagccaagaacgaatacaccagtcaaagaagattggaatgtcagaattaccaagctacggaagcaagtggaagagatttttaatttgaaatttgctcaagctcttggactcaccgaggcagtaaaagtaccatatcctgtgtttgaatcaaacccggagttcttgtatgtggaaggcttgccagaggggattcccttccgaagccctacctggtttggaattccacgacttgaaaggatcgtccgcgggagtaataaaatcaagttcgttgttaaaaaacctgaactagttatttcctacttgcctcctgggatggctagtaaaataaacactaaagctttgcagtcccccaaaagaccacgaagtcctgggagtaattcaaaggttcctgaaattgaggtcaccgtggaaggccctaataacaacaatcctcaaacctcagctgttcgaaccccgacccagactaacggttctaacgttcccttcaagccacgagggagagagttttcctttgaggcctggaatgccaaaatcacggacctaaaacagaaagttgaaaatctcttcaatgagaaatgtggggaagctcttggccttaaacaagctgtgaaggtgccgttcgcgttatttgagtctttcccggaagacttttatgtggaaggcttacctgagggtgtgccattccgaagaccatcgacttttggcattccgaggctggagaagatactcagaaacaaagccaaaattaagttcatcattaaaaagcccgaaatgtttgagacggcgattaaggagagcacctcctctaagagccctcccagaaaaataaattcatcacccaatgttaatactactgcatcaggtgttgaagaccttaacatcattcaggtgacaattccagatgatgataatgaaagactctcgaaagttgaaaaagctagacagctaagagaacaagtgaatgacctctttagtcggaaatttggtgaagctattggtatgggttttcctgtgaaagttccctacaggaaaatcacaattaaccctggctgtgtggtggttgatggcatgcccccgggggtgtccttcaaagcccccagctacctggaaatcagctccatgagaaggatcttagactctgccgagtttatcaaattcacggtcattagaccatttccaggacttgtgattaataaccagctggttgatcagagtgagtcagaaggccccgtgatacaagaatcagctgaaccaagccagttggaagttccagccacagaaggtaaaaggacctcttccctcctagggtaaatcagcttctgtgtcagggatgctgtgtggtgtccatctgaaccccctgcatacgcgtagctaatgtgatctccccactttcacataagatggtggccctgccttcagggaatgtgggagccaggtgggagccttcccggatatttaagctagaagattctacagggagattctccttggatcaatatatgtctctcagtcaaagatgtaaaagcacttttgccttaaaaagaatgttctgtttctaaatagagtcaacgttgtcctcctcattggaattcactatgagtcagaatcattagactgacttttttttttccatagtaatagtattttgcagagtctcacagagctgcagatcttttgttcatcttgcagagttaacaagtctgatcctgttagtccagatttcttaaatttggccaagttataataggagcagtagcttgagacccgaagtcaggaaactttgacaatggatttttttttttaatccagagacttgtactggaatttgccttaccctgtcagctcatggacttaaggtttcatcccgctttatgagtgcttctgaatccaagtcattgttacctgaatttgcaaattaagttgtgatattcgtgactgttaaattcctgtaattagattaacctctttgcttgcttgtttgttttctctcctattttagcttaaagtatcagtggttgagaagagcttttcggacctgttactaccccaagctgtgtaatatacttgtataacagaaataccttctatacaaacctttttttctacttttagatagaaatgtctactttttcagcagttctgtgaattaaagagcagagtgactgtgggtctggaatggctggtgtacttgggaatgtactatcaggattttacagcaatgctgggaaatgacagggaaaatgacaggaatgaatctcaccagattttttatgtactcagcagagccttgagttacggtgtttattttccaatcaagtgaagatatctcctacttctcctactggaacatctcagcttctgcagtgaagaaaaattcctgtgatagttcagttctttagtttttctatttgaaaaaaaaaaatcatttaaatgatcctttgttcacggctctccttaatgactgagtgaacagttcctatctgtatatttgactaaaccttttcctaagctatctctcatggttcctatgtttttttatcataattaaaagcaaaaccatctggatcacctaacagtcagaggtcagtatctcagcgtgtgaattatagaggaaatacagagagaacctcttccacttttacttttcgtccaaataaaatgcatggtgtaccagaagttgaagatcgggttgaggattggggctagctcgatgacactaaggccccaacatcgcgggacctgctgtggcgcggattcttaggaacgctgttctagccggccccctctccaggggtcgccgtggccggcattatttcctagttcttcttgtaaccctgaggtgccagcgcggggagtgaggaggggtcagggggctaaggatgcaacctctgacgttctgcgccttcctaggagagtcttacatgtgttgagatttcacaagcaatgcgagttgtaaaataccagctctacaagaagctaggctctgtgacggcatagttttcagtagctttatcacaatattcacaatggagaattatatgacatggtagcagaaataggcccttttatgtgttgcttctattttacctcaaattgtagatatagggtaatcaataaaatccatccatgcctttcacacactaagt

SEQ ID NO: 5227 - protein, 967 aa, Homo sapiens; identical to SEQ ID NO: 4229

SEQ ID NO: 5228 - DNA, 7920 bp, Homo sapiens
gggtcttgttctgtctcccaagctggagtgcagtggtgtggtcataggtcactgcagcgtcgaactcctaggctcaagtgatcctcttgcctcaggctcctgagtagctgggacaacaggcgtgtaccacacctggatactttttaaatttttggtagagaagggatctcactctattgccaagctggtgtcgaactcttggtcttaagcagccctcccacgtcagcatcccaaagtgttgggatttcagagggatcatggcccaagttgcaatgtccaccctccccgttgaagatgaggagtcctcggagagcaggatggtggtgacattcctcatgtcagctctcgagtccatgtgtaaagaactggccaagtccaaagccgaagtggcctgcattgcagtgtatgaaacagacgtgtttgtcgtcggaactgaaagaggacgtgcttttgtcaataccagaaaggattttcaaaaagattttgtaaaatattgtgttgaagaagaagaaaaagctgcagagatgcataaaatgaaatctacaacccaggcaaatcggatgagtgtagatgctgtagaaattgaaacactcagaaaaacagttgaggactatttctgcttttgctatgggaaagctttaggcaaatccacagtggtacctgtaccatatgagaagatgctgcgagaccagtcggctgtggtagtgcaggggcttccggaaggtgttgcctttaaacaccccgagaactatgatcttgcaaccctgaaatggattttggagaacaaagcagggatttcattcatcattaagagaccttttttagagccaaagaagcatgtaggtggtcgtgtgatggtaacagatgctgacaggtcaatactatctccaggtggaagttgtggccccatcaaagtgaaaactgaacccacagaagattctggcatttccctggaaatggcagctgtgacagtaaaggaagaatcagaagatcctgattattatcaatataacattcaagcaggcccttctgaaactgatgatgttgatgaaaaacagcccctatcgaagcctttgcaaggaagccaccattcttcagagggcaatgaaggcacagaaatggaagtaccagcagaagatgatgattattctccaccgtctaagagaccaaaggccaatgagctaccgcagccaccagtcccggaacccgccaatgctgggaagcggaaagtgagggagttcaacttcgagaaatggaatgctcgcatcactgatctacgtaaacaagttgaagaattgtttgaaaggaaatatgctcaagccataaaagccaaaggtccggtgacgatcccgtaccctcttttccagtctcatgttgaagatctttatgtagaaggacttcctgaaggaattccttttagaaggccatctacttacggaattcctcgcctggagaggatattacttgcaaaggaaaggattcgttttgtgattaagaaacatgagcttctgaattcaacacgtgaagatttacagcttgataagccagcttcaggagtaaaggaagaatggtatgccagaatcactaaattaagaaagatggtggatcagcttttctgcaaaaaatttgcggaagccttggggagcactgaagccaaggctgtaccgtaccaaaaatttgaggcacacccgaatgatctgtacgtggaaggactgccagaaaacattcctttccgaagtccctcatggtatggaatcccaaggctggaaaaaatcattcaagtgggcaatcgaattaaatttgttattaaaagaccagaacttctgactcacagtaccactgaagttactcagccaagaacgaatacaccagtcaaagaagattggaatgtcagaattaccaagctacggaagcaagtggaagagatttttaatttgaaatttgcttagatttgttgacagcggtttcctggagtgctgtcttgagaacgattctgaggaggctcagcaagaaagagtgtttcagttgattgggtgtgtctgtcatggagaaggaactcaagctcttggactcaccgaggcagtaaaagtaccatatcctgtgtttgaatcaaacccggagttcttgtatgtggaaggcttgccagaggggattcccttccgaagccctacctggtttggaattccacgacttgaaaggatcgtccgcgggagtaataaaatcaagttcgttgttaaaaaacctgaactagttatttcctacttgcctcctgggatggctagtaaaataaacactaaagctttgcagtcccccaaaagaccacgaagtcctgggagtaattcaaaggttcctgaaattgaggtcaccgtggaaggccctaataacaacaatcctcaaacctcagctgttcgaaccccgacccagactaacggttctaacgttcccttcaagccacgagggagagagttttcctttgaggcctggaatgccaaaatcacggacctaaaacagaaagttgaaaatctcttcaatgagaaatgtggggaagctcttggccttaaacaagctgtgaaggtgccgttcgcgttatttgagtctttcccggaagacttttatgtggaaggcttacctgagggtgtgccattccgaagaccatcgacttttggcattccgaggctggagaagatactcagaaacaaagccaaaattaagttcatcattaaaaagcccgaaatgtttgagacggcgattaaggagagcacctcctctaagagccctcccagaaaaataaattcatcacccaatgttaatactactgcatcaggtgttgaagaccttaacatcattcaggtgacaattccagatgatgataatgaaagactctcgaaagttgaaaaagctagacagctaagagaacaagtgaatgacctctttagtcggaaatttggtgaagctattggtatgggttttcctgtgaaagttccctacaggaaaatcacaattaaccctggctgtgtggtggttgatggcatgcccccgggggtgtccttcaaagcccccagctacctggaaatcagctccatgagaaggatcttagactctgccgagtttatcaaattcacggtcattaggtaagtgagagtttcctgcttagtcacaggagcgaatctggagctcatgaggctgactcttctaaaatgcagccacaggtagtcatcgaatccggcttcctatgctgtgcaatcaacaaatcaaaataacttgtgtcatcattagaatgtcagatgtgcttctacgaactaagctgactcttttaattctttggcaaagggttggcaaactaggactgtttgccaaattcaggctgcctcctatttttagagtcttcctgaaacacagctacacccgtattatccatggctgctttcctgtcacagtgagtaagtagctgggactgagaaggcatggcctccaaagtctaaaatatttactctctagcactttgtagaaaaaccttagctaggcacagtggctaacgcctgtaatcccagcattttgggaggccaaggcaggcagatcacctgaggtcaggagttccagaccagcctggccaacatggtgaaatcccatctctacaaaaataaaacagttagctgggcatgatggcgggtgcctgtaatcccagctactcgggaggctgaggcaggatagtcgcttgaacccaggaggtggaggttgcaatgagccaagatcatgccactgcactccagcctggacgacagagtgagactccatcacaagaaaaaaagaactttgtcaacctctgtcttagggcgccttgtcacaggcttcgggtcagacggattcaaccttgcatcagccatttgttagccaggtcactctgttctttgtctgtaaatgagattgatcgttgttcccactgagagtgtcagctccttcccgtagagcaggcatgatgattgtactcacctctgacaccattgtgagtgccacattccttcccacgtccttgtcactgtaagagatgcccacctgagcaccaaccccaggttatcttcccctttgtcttccagccccccagaaacagctacgactcaacctacccaatcatttcatcatcagattgccactgtctctagttcaggtctcttgggactggcactcagaaatctcataataaatcctcttgaggcttctcatacactcgtcttcttccaatcttctttccctcaaaatctcatattttggttccacttcacccaccgtcattctccatatcactcccaggagttaggcaaaaagccccttccgttcttccgtatgttaaacttagaatcactctgttccctgctctgcgtttctattttttgtttttcctccatttactagtagcttaacactttctaacagtgttcttattattgatacgtatctatctcttccataagcttataaggtcacggataatacttctcattgtagtacgtaaatgacgtgggctagatatgagttgaataaacagttatacctgtaaattcttacagagtgaaaataaattgttatactttacaatttgtttctctctttagaccatttccaggacttgtgattaataaccgtgagtattttgtgaagtgttttgtttttgttttttcctggggtctgacgtgtgtgcgtgtgagtgtgtatacatgcttaacgtatatcacgttacttcacctatgtcagtaaccaggccaaatacttgttttagccctcagtaaaaacaccaggcacttcctagttgtaaaattattcaagcttcttaacttcctatcctcgatgcacttaatcataaaatggtaataatagcaccgattttgggggagtcgttccagtagatggaaagcatctggaacaggtgtcagcaagctcctgccgacgtgtatgcataaagttttattgaaaccaccatcgtgtccatttgtttatggcagaactgagagatggcagcagcaagtgtgtgcctgcaaaacctaaaatatttactaattggctctgcaagaaaagagtttgcatccccctaacctagaacagtgtctagcctctagtatgtgtttagcctacagtatgtgctcagcgaatacaatctatatttattactgcttttatgactgttataattactgtgcttggatttcgttacaaagtaagtcacaatgtgcctgcttctgttagtatttcagcacagtgcctggcacacatggggctctcaaatattgctgagcgagtgaacaaatgtcctttcaattccttaacgttgatgtcattttcaatagtattttgagccaaacttaattttgcgagtgtgttttgttttcttaactttattattaaaaatgtataaaagtgaggccaggcgtggtggctcacgcctgtaatcccagcagtttgggaggctgaggcaggcggatcagttgaggttgggagttggagaccagcccgtccaacatggtgaaagcctgtctctactaaaaatacaaaaatcagctgggtgtggtggcgcgtgcctgtaatcccagctactcaggaggctgaggcaggagagttgcttgaatcctagaggtggaggttgcagtgagctgagatcgtgccattgcactccagcctgggcaacaagagcaaaactctgtcccaataaataaataaataaaatgttctcttttgttcctgttcttgtgcggtagtgtggtatagagttttatggtaattactgtgaattagtgattctgagggacatatcagaactctgaggtttgtttccttctcatcttgagggaaacagcaaatgtatgttaaaatgcttttccaagggaacaacacatccttacattatttaaaccaatctgcttcattttcagagctggttgatcagagtgagtcagaaggccccgtgatacaagaatcagctgaaccaagccagttggaagttccagccacagaagaaataaaagagactgatggaagctctcagatcaagcaagaaccagaccccacgtggtagacctcttccctcctagggtaaatcagcttctgtgtcagggatgctgtgtggtgtccatctgaaccccctgcatacgcgtagctaatgtgatctccccactttcacataagatggtggccctgccttcagggaatgtgggagccaggtgggagccttcccggatatttaagctagaagattctacagggagattctccttggatcaatatatgtctctcagtcaaagatgtaaaagcacttttgccttaaaaagaatgttctgtttctaaatagagtcaacgttgtcctcctcattggaattcactatgagtcagaatcattagactgacttttttttttccatagtaatagtattttgcagagtctcacagagctgcagatcttttgttcatcttgcagagttaacaagtctgatcctgttagtccagatttcttaaatttggccaagttataataggagcagtagcttgagacccgaagtcaggaaactttgacaatggatttttttttttaatccagagacttgtactggaatttgccttaccctgtcagctcatggacttaaggtttcatcccgctttatgagtgcttctgaatccaagtcattgttacctgaatttgcaaattaagttgtgatattcgtgactgttaaattcctgtaattagattaacctctttgcttgcttgtttgttttctctcctattttagcttaaagtatcagtggttgagaagagcttttcggacctgttactaccccaagctgtgtaatatacttgtataacagaaataccttctatacaaacctttttttctacttttagatagaaatgtctactttttcagcagttctgtgaattaaagagcagagtgactgtgggtctggaatggctggtgtacttgggaatgtactatcaggattttacagcaatgctgggaaatgacagggaaaatgacaggaatgaatctcaccagattttttatgtactcagcagagccttgagttacggtgtttattttccaatcaagtgaagatatctcctacttctcctactggaacatctcagcttctgcagtgaagaaaaattcctgtgatagttcagttctttagtttttctatttgaaaaaaaaaaatcatttaaatgatcctttgttcacggctctccttaatgactgagtgaacagttcctatctgtatatttgactaaaccttttcctaagctatctctcatggttcctatgtttttttatcataattaaaagcaaaaccatctggatcacctaacagtcagaggtcagtatctcagcgtgtgaattatagaggaaatacagagagaacctcttccacttttacttttcgtccaaataaaatgcatggtgtaccagaagttgaagatcgggttgaggattggggctagctcgatgacactaaggccccaacatcgcgggacctgctgtggcgcggattcttaggaacgctgttctagccggccccctctccaggggtcgccgtggccggcattatttcctagttcttcttgtaaccctgaggtgccagcgcggggagtgaggaggggtcagggggctaaggatgcaacctctgacgttctgcgccttcctaggagagtcttacatgtgttgagatttcacaagcaatgcgagttgtaaaataccagctctacaagaagctaggctctgtgacggcatagttttcagtagctttatcacaatattcacaatggagaattatatgacatggtagcagaaataggcccttttatgtgttgcttctattttacctcaaattgtagatatagggtaatcaataaaatccatccatgcctttcacacactaagt

SEQ ID NO: 5229 - protein, 563 aa, Homo sapiens; identical to SEQ ID NO: 4097

SEQ ID NO: 5230 - DNA, 3806 bp, Homo sapiens
gggtcttgttctgtctcccaagctggagtgcagtggtgtggtcataggtcactgcagcgtcgaactcctaggctcaagtgatcctcttgcctcaggctcctgagtagctgggacaacaggcgtgtaccacacctggatactttttaaatttttggtagagaagggatctcactctattgccaagctggtgtcgaactcttggtcttaagcagccctcccacgtcagcatcccaaagtgttgggatttcagagggatcatggcccaagttgcaatgtccaccctccccgttgaagatgaggagtcctcggagagcaggatggtggtgacattcctcatgtcagctctcgagtccatgtgtaaagaactggccaagtccaaagccgaagtggcctgcattgcagtgtatgaaacagacgtgtttgtcgtcggaactgaaagaggacgtgcttttgtcaataccagaaaggattttcaaaaagattttgtaaaatattgtgttgaagaagaagaaaaagctgcagagatgcataaaatgaaatctacaacccaggcaaatcggatgagtgtagatgctgtagaaattgaaacactcagaaaaacagttgaggactatttctgcttttgctatgggaaagctttaggcaaatccacagtggtacctgtaccatatgagaagatgctgcgagaccagtcggctgtggtagtgcaggggcttccggaaggtgttgcctttaaacaccccgagaactatgatcttgcaaccctgaaatggattttggagaacaaagcagggatttcattcatcattaagagaccttttttagagccaaagaagcatgtaggtggtcgtgtgatggtaacagatgctgacaggtcaatactatctccaggtggaagttgtggccccatcaaagtgaaaactgaacccacagaagattctggcatttccctggaaatggcagctgtgacagtaaaggaagaatcagaagatcctgattattatcaatataacattcaaggaagccaccattcttcagagggcaatgaaggcacagaaatggaagtaccagcagaagattctactcaacatgtcccttcagaaacaagtgaggaccctgaagttgaggtgactattgaagatgatgattattctccaccgtctaagagaccaaaggccaatgagctaccgcagccaccagtcccggaacccgccaatgctgggaagcggaaagtgagggagttcaacttcgagaaatggaatgctcgcatcactgatctacgtaaacaagttgaagaattgtttgaaaggaaatatgctcaagccataaaagccaaaggtccggtgacgatcccgtaccctcttttccagtctcatgttgaagatctttatgtagaaggacttcctgaaggaattccttttagaaggccatctacttacggaattcctcgcctggagaggatattacttgcaaaggaaaggattcgttttgtgattaagaaacatgagcttctgaattcaacacgtgaagatttacagcttgataagccagcttcaggagtaaaggaagaatggtatgccagaatcactaaattaagaaagatggtggatcagcttttctgcaaaaaatttgcggaagccttggggagcactgaagccaaggctgtaccgtaccaaaaatttgaggcacacccgaatgatctgtacgtggaaggactgccagaaaacattcctttccgaagtccctcatggtatggaatcccaaggctggaaaaaatcattcaagtgggcaatcgaattaaatttgttattaaaagaccagaacttctgactcacagtaccactgaagttactcagccaagaacgaatacaccagtcaaagaagattggaatgtcagaattaccaagctacggaagcaagtggaagagatttttaatttgaaatttgctcaagctcttggactcaccgaggcagtaaaagtaccatatcctgtgtttgaatcaaacccggagttcttgtatgtggaaggcttgccagaggggattcccttccgaagccctacctggtttggaattccacgacttgaaaggatcgtccgcgggagtaataaaatcaagttcgttgttaaaaaacctgaactagttatttcctacttgcctcctgggatggctagtaaaataaacactaaagctttgcagtcccccaaaagaccacgaagtcctgggagtaattcaaaggttcctgaaattgaggtcaccgtggaaggccctaataacaacaatcctcaaacctcagctgttcgaaccccgacccagactaacggttctaacgttcccttcaagccacgagggagagagttttcctttgaggcctggaatgccaaaatcacggacctaaaacagaaagttgaaaatctcttcaatgagaaatgtggggaagctcttggccttaaacaagctgtgaaggtgccgttcgcgttatttgagtctttcccggaagacttttatgtggaaggcttacctgagggtgtgccattccgaagaccatcgacttttggcattccgaggctggagaagatactcagaaacaaagccaaaattaagttcatcattaaaaagcccgaaatgtttgagacggcgattaaggagagcacctcctctaagagccctcccagaaaaataaattcatcacccaatgttaatactactgcatcaggtgttgaagaccttaacatcattcaggtgacaattccagatgatgataatgaaagactctcgaaagttgaaaaagctagacagctaagagaacaagtgaatgacctctttagtcggaaatttggtgaagctattggtatgggttttcctgtgaaagttccctacaggaaaatcacaattaaccctggctgtgtggtggttgatggcatgcccccgggggtgtccttcaaagcccccagctacctggaaatcagctccatgagaaggatcttagactctgccgagtttatcaaattcacggtcattagaccatttccaggacttgtgattaataaccagctggttgatcagagtgagtcagaaggccccgtgatacaagaatcagctgaaccaagccagttggaagttccagccacagaagaaataaaagagactgatggaagctctcagatcaagcaagaaccagaccccacgtggtagacctcttccctcctaggcaaaaccatctggatcacctaacagtcagaggtcagtatctcagcgtgtgaattatagaggaaatacagagagaacctcttccacttttacttttcgtccaaataaaatgcatggtgtaccagaagttgaagatcgggttgaggattggggctagctcgatgacactaaggccccaacatcgcgggacctgctgtggcgcggattcttaggaacgctgttctagccggccccctctccaggggtcgccgtggccggcattatttcctagttcttcttgtaaccctgaggtgccagcgcggggagtgaggaggggtcagggggctaaggatgcaacctctgacgttctgcgccttcctaggagagtcttacatgtgttgagatttcacaagcaatgcgagttgtaaaataccagctctacaagaagctaggctctgtgacggcatagttttcagtagctttatcacaatattcacaatggagaattatatgacatggtagcagaaataggcccttttatgtgttgcttctattttacctcaaattgtagatatagggtaatcaataaaatccatccatgcctttcacacactaagt

SEQ ID NO: 5231 - protein, 978 aa, Homo sapiens; identical to SEQ ID NO: 470

SEQ ID NO: 5232 - DNA, 5043 bp, Homo sapiens
gggtcttgttctgtctcccaagctggagtgcagtggtgtggtcataggtcactgcagcgtcgaactcctaggctcaagtgatcctcttgcctcaggctcctgagtagctgggacaacaggcgtgtaccacacctggatactttttaaatttttggtagagaagggatctcactctattgccaagctggtgtcgaactcttggtcttaagcagccctcccacgtcagcatcccaaagtgttgggatttcagagggatcatggcccaagttgcaatgtccaccctccccgttgaagatgaggagtcctcggagagcaggatggtggtgacattcctcatgtcagctctcgagtccatgtgtaaagaactggccaagtccaaagccgaagtggcctgcattgcagtgtatgaaacagacgtgtttgtcgtcggaactgaaagaggacgtgcttttgtcaataccagaaaggattttcaaaaagattttgtaaaatattgtgttgaagaagaagaaaaagctgcagagatgcataaaatgaaatctacaacccaggcaaatcggatgagtgtagatgctgtagaaattgaaacactcagaaaaacagttgaggactatttctgcttttgctatgggaaagctttaggcaaatccacagtggtacctgtaccatatgagaagatgctgcgagaccagtcggctgtggtagtgcaggggcttccggaaggtgttgcctttaaacaccccgagaactatgatcttgcaaccctgaaatggattttggagaacaaagcagggatttcattcatcattaagagaccttttttagagccaaagaagcatgtaggtggtcgtgtgatggtaacagatgctgacaggtcaatactatctccaggtggaagttgtggccccatcaaagtgaaaactgaacccacagaagattctggcatttccctggaaatggcagctgtgacagtaaaggaagaatcagaagatcctgattattatcaatataacattcaagcaggcccttctgaaactgatgatgttgatgaaaaacagcccctatcgaagcctttgcaaggaagccaccattcttcagagggcaatgaaggcacagaaatggaagtaccagcagaagattctactcaacatgtcccttcagaaacaagtgaggaccctgaagttgaggtgactattgaagatgatgattattctccaccgtctaagagaccaaaggccaatgagctaccgcagccaccagtcccggaacccgccaatgctgggaagcggaaagtgagggagttcaacttcgagaaatggaatgctcgcatcactgatctacgtaaacaagttgaagaattgtttgaaaggaaatatgctcaagccataaaagccaaaggtccggtgacgatcccgtaccctcttttccagtctcatgttgaagatctttatgtagaaggacttcctgaaggaattccttttagaaggccatctacttacggaattcctcgcctggagaggatattacttgcaaaggaaaggattcgttttgtgattaagaaacatgagcttctgaattcaacacgtgaagatttacagcttgataagccagcttcaggagtaaaggaagaatggtatgccagaatcactaaattaagaaagatggtggatcagcttttctgcaaaaaatttgcggaagccttggggagcactgaagccaaggctgtaccgtaccaaaaatttgaggcacacccgaatgatctgtacgtggaaggactgccagaaaacattcctttccgaagtccctcatggtatggaatcccaaggctggaaaaaatcattcaagtgggcaatcgaattaaatttgttattaaaagaccagaacttctgactcacagtaccactgaagttactcagccaagaacgaatacaccagtcaaagaagattggaatgtcagaattaccaagctacggaagcaagtggaagagatttttaatttgaaatttgctcaagctcttggactcaccgaggcagtaaaagtaccatatcctgtgtttgaatcaaacccggagttcttgaaaggatcgtccgcgggagtaataaaatcaagttcgttgttaaaaaacctgaactagttatttcctacttgcctcctgggatggctagtaaaataaacactaaagctttgcagtcccccaaaagaccacgaagtcctgggagtaattcaaaggttcctgaaattgaggtcaccgtggaaggccctaataacaacaatcctcaaacctcagctgttcgaaccccgacccagactaacggttctaacgttcccttcaagccacgagggagagagttttcctttgaggcctggaatgccaaaatcacggacctaaaacagaaagttgaaaatctcttcaatgagaaatgtggggaagctcttggccttaaacaagctgtgaaggtgccgttcgcgttatttgagtctttcccggaagacttttatgtggaaggcttacctgagggtgtgccattccgaagaccatcgacttttggcattccgaggctggagaagatactcagaaacaaagccaaaattaagttcatcattaaaaagcccgaaatgtttgagacggcgattaaggagagcacctcctctaagagccctcccagaaaaataaattcatcacccaatgttaatactactgcatcaggtgttgaagaccttaacatcattcaggtgacaattccagatgatgataatgaaagactctcgaaagttgaaaaagctagacagctaagagaacaagtgaatgacctctttagtcggaaatttggtgaagctattggtatgggttttcctgtgaaagttccctacaggaaaatcacaattaaccctggctgtgtggtggttgatggcatgcccccgggggtgtccttcaaagcccccagctacctggaaatcagctccatgagaaggatcttagactctgccgagtttatcaaattcacggtcattagaccatttccaggacttgtgattaataaccagctggttgatcagagtgagtcagaaggccccgtgatacaagaatcagctgaaccaagccagttggaagttccagccacagaagaaataaaagagactgatggaagctctcagatcaagcaagaaccagaccccacgtggtagacctcttccctcctagggtaaatcagcttctgtgtcagggatgctgtgtggtgtccatctgaaccccctgcatacgcgtagctaatgtgatctccccactttcacataagatggtggccctgccttcagggaatgtgggagccaggtgggagccttcccggatatttaagctagaagattctacagggagattctccttggatcaatatatgtctctcagtcaaagatgtaaaagcacttttgccttaaaaagaatgttctgtttctaaatagagtcaacgttgtcctcctcattggaattcactatgagtcagaatcattagactgacttttttttttccatagtaatagtattttgcagagtctcacagagctgcagatcttttgttcatcttgcagagttaacaagtctgatcctgttagtccagatttcttaaatttggccaagttataataggagcagtagcttgagacccgaagtcaggaaactttgacaatggatttttttttttaatccagagacttgtactggaatttgccttaccctgtcagctcatggacttaaggtttcatcccgctttatgagtgcttctgaatccaagtcattgttacctgaatttgcaaattaagttgtgatattcgtgactgttaaattcctgtaattagattaacctctttgcttgcttgtttgttttctctcctattttagcttaaagtatcagtggttgagaagagcttttcggacctgttactaccccaagctgtgtaatatacttgtataacagaaataccttctatacaaacctttttttctacttttagatagaaatgtctactttttcagcagttctgtgaattaaagagcagagtgactgtgggtctggaatggctggtgtacttgggaatgtactatcaggattttacagcaatgctgggaaatgacagggaaaatgacaggaatgaatctcaccagattttttatgtactcagcagagccttgagttacggtgtttattttccaatcaagtgaagatatctcctacttctcctactggaacatctcagcttctgcagtgaagaaaaattcctgtgatagttcagttctttagtttttctatttgaaaaaaaaaaatcatttaaatgatcctttgttcacggctctccttaatgactgagtgaacagttcctatctgtatatttgactaaaccttttcctaagctatctctcatggttcctatgtttttttatcataattaaaagcaaaaccatctggatcacctaacagtcagaggtcagtatctcagcgtgtgaattatagaggaaatacagagagaacctcttccacttttacttttcgtccaaataaaatgcatggtgtaccagaagttgaagatcgggttgaggattggggctagctcgatgacactaaggccccaacatcgcgggacctgctgtggcgcggattcttaggaacgctgttctagccggccccctctccaggggtcgccgtggccggcattatttcctagttcttcttgtaaccctgaggtgccagcgcggggagtgaggaggggtcagggggctaaggatgcaacctctgacgttctgcgccttcctaggagagtcttacatgtgttgagatttcacaagcaatgcgagttgtaaaataccagctctacaagaagctaggctctgtgacggcatagttttcagtagctttatcacaatattcacaatggagaattatatgacatggtagcagaaataggcccttttatgtgttgcttctattttacctcaaattgtagatatagggtaatcaataaaatccatccatgcctttcacacactaagt

SEQ ID NO: 5233 - protein, 625 aa, Homo sapiens; identical to SEQ ID NO: 4033

SEQ ID NO: 5234 - DNA, 3799 bp, Homo sapiens
gggtcttgttctgtctcccaagctggagtgcagtggtgtggtcataggtcactgcagcgtcgaactcctaggctcaagtgatcctcttgcctcaggctcctgagtagctgggacaacaggcgtgtaccacacctggatactttttaaatttttggtagagaagggatctcactctattgccaagctggtgtcgaactcttggtcttaagcagccctcccacgtcagcatcccaaagtgttgggatttcagagggatcatggcccaagttgcaatgtccaccctccccgttgaagatgaggagtcctcggagagcaggatggtggtgacattcctcatgtcagctctcgagtccatgtgtaaagaactggccaagtccaaagccgaagtggcctgcattgcagtgtatgaaacagacgtgtttgtcgtcggaactgaaagaggacgtgcttttgtcaataccagaaaggattttcaaaaagattttgtaaaatattgtgttgaagaagaagaaaaagctgcagagatgcataaaatgaaatctacaacccaggcaaatcggatgagtgtagatgctgtagaaattgaaacactcagaaaaacagttgaggactatttctgcttttgctatgggaaagctttaggcaaatccacagtggtacctgtaccatatgagaagatgctgcgagaccagtcggctgtggtagtgcaggggcttccggaaggtgttgcctttaaacaccccgagaactatgatcttgcaaccctgaaatggattttggagaacaaagcagggatttcattcatcattaagagaccttttttagagccaaagaagcatgtaggtggtcgtgtgatggtaacagatgctgacaggtcaatactatctccaggtggaagttgtggccccatcaaagtgaaaactgaacccacagaagattctggcatttccctggaaatggcagctgtgacagtaaaggaagaatcagaagatcctgattattatcaatataacattcaagcaggcccttctgaaactgatgatgttgatgaaaaacagcccctatcgaagcctttgcaaggaagccaccattcttcagagggcaatgaaggcacagaaatggaagtaccagcagaagattctactcaacatgtcccttcagaaacaagtgaggaccctgaagttgaggtgactattgaagatgatgattattctccaccgtctaagagaccaaaggccaatgagctaccgcagccaccagtcccggaacccgccaatgctgggaagcggaaagtgagggagttcaacttcgagaaatggaatgctcgcatcactgatctacgtaaacaagttgaagaattgtttgaaaggaaatatgctcaagccataaaagccaaaggtccggtgacgatcccgtaccctcttttccagtctcatgttgaagatctttatgtagaaggacttcctgaaggaattccttttagaaggccatctacttacggaattcctcgcctggagaggatattacttgcaaaggaaaggattcgttttgtgattaagaaacatgagcttctgaattcaacacgtgaagatttacagcttgataagccagcttcaggagtaaaggaagaatggtatgccagaatcactaaattaagaaagatggtggatcagcttttctgcaaaaaatttgcggaagccttggggagcactgaagccaaggctgtaccgtaccaaaaatttgaggcacacccgaatgatctgtacgtggaaggactgccagaaaacattcctttccgaagtccctcatggtatggaatcccaaggctggaaaaaatcattcaagtgggcaatcgaattaaatttgttattaaaagaccagaacttctgactcacagtaccactgaagttactcagccaagaacgaatacaccagtcaaagaagattggaatgtcagaattaccaagctacggaagcaagtggaagagatttttaatttgaaatttgctcaagctcttggactcaccgaggcagtaaaagtaccatatcctgtgtttgaatcaaacccggagttcttgaaaggatcgtccgcgggagtaataaaatcaagttcgttgttaaaaaacctgaactagttatttcctacttgcctcctgggatggctagtaaaataaacactaaagctttgcagtcccccaaaagaccacgaagtcctgggagtaattcaaaggttcctgaaattgaggtcaccgtggaaggccctaataacaacaatcctcaaacctcagctgttcgaaccccgacccagactaacggttctaacgttcccttcaagccacgagggagagagttttcctttgaggcctggaatgccaaaatcacggacctaaaacagaaagttgaaaatctcttcaatgagaaatgtggggaagctcttggccttaaacaagctgtgaaggtgccgttcgcgttatttgagtctttcccggaagacttttatgtggaaggcttacctgagggtgtgccattccgaagaccatcgacttttggcattccgaggctggagaagatactcagaaacaaagccaaaattaagttcatcattaaaaagcccgaaatgtttgagacggcgattaaggagagcacctcctctaagagccctcccagaaaaataaattcatcacccaatgttaatactactgcatcaggtgttgaagaccttaacatcattcaggtgacaattccagatgatgataatgaaagactctcgaaagttgaaaaagctagacagctaagagaacaagtgaatgacctctttagtcggaaatttggtgaagctattggtatgggttttcctgtgaaagttccctacaggaaaatcacaattaaccctggctgtgtggtggttgatggcatgcccccgggggtgtccttcaaagcccccagctacctggaaatcagctccatgagaaggatcttagactctgccgagtttatcaaattcacggtcattagaccatttccaggacttgtgattaataaccagctggttgatcagagtgagtcagaaggccccgtgatacaagaatcagctgaaccaagccagttggaagttccagccacagaagaaataaaagagactgatggaagctctcagatcaagcaagaaccagaccccacgtggtagacctcttccctcctaggcaaaaccatctggatcacctaacagtcagaggtcagtatctcagcgtgtgaattatagaggaaatacagagagaacctcttccacttttacttttcgtccaaataaaatgcatggtgtaccagaagttgaagatcgggttgaggattggggctagctcgatgacactaaggccccaacatcgcgggacctgctgtggcgcggattcttaggaacgctgttctagccggccccctctccaggggtcgccgtggccggcattatttcctagttcttcttgtaaccctgaggtgccagcgcggggagtgaggaggggtcagggggctaaggatgcaacctctgacgttctgcgccttcctaggagagtcttacatgtgttgagatttcacaagcaatgcgagttgtaaaataccagctctacaagaagctaggctctgtgacggcatagttttcagtagctttatcacaatattcacaatggagaattatatgacatggtagcagaaataggcccttttatgtgttgcttctattttacctcaaattgtagatatagggtaatcaataaaatccatccatgcctttcacacactaagt

SEQ ID NO: 5235 - protein, 625 aa, Homo sapiens; identical to SEQ ID NO: 4033

SEQ ID NO: 5236 - DNA, 5050 bp, Homo sapiens
gggtcttgttctgtctcccaagctggagtgcagtggtgtggtcataggtcactgcagcgtcgaactcctaggctcaagtgatcctcttgcctcaggctcctgagtagctgggacaacaggcgtgtaccacacctggatactttttaaatttttggtagagaagggatctcactctattgccaagctggtgtcgaactcttggtcttaagcagccctcccacgtcagcatcccaaagtgttgggatttcagagggatcatggcccaagttgcaatgtccaccctccccgttgaagatgaggagtcctcggagagcaggatggtggtgacattcctcatgtcagctctcgagtccatgtgtaaagaactggccaagtccaaagccgaagtggcctgcattgcagtgtatgaaacagacgtgtttgtcgtcggaactgaaagaggacgtgcttttgtcaataccagaaaggattttcaaaaagattttgtaaaatattgtgttgaagaagaagaaaaagctgcagagatgcataaaatgaaatctacaacccaggcaaatcggatgagtgtagatgctgtagaaattgaaacactcagaaaaacagttgaggactatttctgcttttgctatgggaaagctttaggcaaatccacagtggtacctgtaccatatgagaagatgctgcgagaccagtcggctgtggtagtgcaggggcttccggaaggtgttgcctttaaacaccccgagaactatgatcttgcaaccctgaaatggattttggagaacaaagcagggatttcattcatcattaagagaccttttttagagccaaagaagcatgtaggtggtcgtgtgatggtaacagatgctgacaggtcaatactatctccaggtggaagttgtggccccatcaaagtgaaaactgaacccacagaagattctggcatttccctggaaatggcagctgtgacagtaaaggaagaatcagaagatcctgattattatcaatataacattcaaggaagccaccattcttcagagggcaatgaaggcacagaaatggaagtaccagcagaagattctactcaacatgtcccttcagaaacaagtgaggaccctgaagttgaggtgactattgaagatgatgattattctccaccgtctaagagaccaaaggccaatgagctaccgcagccaccagtcccggaacccgccaatgctgggaagcggaaagtgagggagttcaacttcgagaaatggaatgctcgcatcactgatctacgtaaacaagttgaagaattgtttgaaaggaaatatgctcaagccataaaagccaaaggtccggtgacgatcccgtaccctcttttccagtctcatgttgaagatctttatgtagaaggacttcctgaaggaattccttttagaaggccatctacttacggaattcctcgcctggagaggatattacttgcaaaggaaaggattcgttttgtgattaagaaacatgagcttctgaattcaacacgtgaagatttacagcttgataagccagcttcaggagtaaaggaagaatggtatgccagaatcactaaattaagaaagatggtggatcagcttttctgcaaaaaatttgcggaagccttggggagcactgaagccaaggctgtaccgtaccaaaaatttgaggcacacccgaatgatctgtacgtggaaggactgccagaaaacattcctttccgaagtccctcatggtatggaatcccaaggctggaaaaaatcattcaagtgggcaatcgaattaaatttgttattaaaagaccagaacttctgactcacagtaccactgaagttactcagccaagaacgaatacaccagtcaaagaagattggaatgtcagaattaccaagctacggaagcaagtggaagagatttttaatttgaaatttgctcaagctcttggactcaccgaggcagtaaaagtaccatatcctgtgtttgaatcaaacccggagttcttgtatgtggaaggcttgccagaggggattcccttccgaagccctacctggtttggaattccacgacttgaaaggatcgtccgcgggagtaataaaatcaagttcgttgttaaaaaacctgaactagttatttcctacttgcctcctgggatggctagtaaaataaacactaaagctttgcagtcccccaaaagaccacgaagtcctgggagtaattcaaaggttcctgaaattgaggtcaccgtggaaggccctaataacaacaatcctcaaacctcagctgttcgaaccccgacccagactaacggttctaacgttcccttcaagccacgagggagagagttttcctttgaggcctggaatgccaaaatcacggacctaaaacagaaagttgaaaatctcttcaatgagaaatgtggggaagctcttggccttaaacaagctgtgaaggtgccgttcgcgttatttgagtctttcccggaagacttttatgtggaaggcttacctgagggtgtgccattccgaagaccatcgacttttggcattccgaggctggagaagatactcagaaacaaagccaaaattaagttcatcattaaaaagcccgaaatgtttgagacggcgattaaggagagcacctcctctaagagccctcccagaaaaataaattcatcacccaatgttaatactactgcatcaggtgttgaagaccttaacatcattcaggtgacaattccagatgatgataatgaaagactctcgaaagttgaaaaagctagacagctaagagaacaagtgaatgacctctttagtcggaaatttggtgaagctattggtatgggttttcctgtgaaagttccctacaggaaaatcacaattaaccctggctgtgtggtggttgatggcatgcccccgggggtgtccttcaaagcccccagctacctggaaatcagctccatgagaaggatcttagactctgccgagtttatcaaattcacggtcattagaccatttccaggacttgtgattaataaccagctggttgatcagagtgagtcagaaggccccgtgatacaagaatcagctgaaccaagccagttggaagttccagccacagaagaaataaaagagactgatggaagctctcagatcaagcaagaaccagaccccacgtggtagacctcttccctcctagggtaaatcagcttctgtgtcagggatgctgtgtggtgtccatctgaaccccctgcatacgcgtagctaatgtgatctccccactttcacataagatggtggccctgccttcagggaatgtgggagccaggtgggagccttcccggatatttaagctagaagattctacagggagattctccttggatcaatatatgtctctcagtcaaagatgtaaaagcacttttgccttaaaaagaatgttctgtttctaaatagagtcaacgttgtcctcctcattggaattcactatgagtcagaatcattagactgacttttttttttccatagtaatagtattttgcagagtctcacagagctgcagatcttttgttcatcttgcagagttaacaagtctgatcctgttagtccagatttcttaaatttggccaagttataataggagcagtagcttgagacccgaagtcaggaaactttgacaatggatttttttttttaatccagagacttgtactggaatttgccttaccctgtcagctcatggacttaaggtttcatcccgctttatgagtgcttctgaatccaagtcattgttacctgaatttgcaaattaagttgtgatattcgtgactgttaaattcctgtaattagattaacctctttgcttgcttgtttgttttctctcctattttagcttaaagtatcagtggttgagaagagcttttcggacctgttactaccccaagctgtgtaatatacttgtataacagaaataccttctatacaaacctttttttctacttttagatagaaatgtctactttttcagcagttctgtgaattaaagagcagagtgactgtgggtctggaatggctggtgtacttgggaatgtactatcaggattttacagcaatgctgggaaatgacagggaaaatgacaggaatgaatctcaccagattttttatgtactcagcagagccttgagttacggtgtttattttccaatcaagtgaagatatctcctacttctcctactggaacatctcagcttctgcagtgaagaaaaattcctgtgatagttcagttctttagtttttctatttgaaaaaaaaaaatcatttaaatgatcctttgttcacggctctccttaatgactgagtgaacagttcctatctgtatatttgactaaaccttttcctaagctatctctcatggttcctatgtttttttatcataattaaaagcaaaaccatctggatcacctaacagtcagaggtcagtatctcagcgtgtgaattatagaggaaatacagagagaacctcttccacttttacttttcgtccaaataaaatgcatggtgtaccagaagttgaagatcgggttgaggattggggctagctcgatgacactaaggccccaacatcgcgggacctgctgtggcgcggattcttaggaacgctgttctagccggccccctctccaggggtcgccgtggccggcattatttcctagttcttcttgtaaccctgaggtgccagcgcggggagtgaggaggggtcagggggctaaggatgcaacctctgacgttctgcgccttcctaggagagtcttacatgtgttgagatttcacaagcaatgcgagttgtaaaataccagctctacaagaagctaggctctgtgacggcatagttttcagtagctttatcacaatattcacaatggagaattatatgacatggtagcagaaataggcccttttatgtgttgcttctattttacctcaaattgtagatatagggtaatcaataaaatccatccatgcctttcacacactaagt

SEQ ID NO: 5237 - protein, 978 aa, Homo sapiens; identical to SEQ ID NO: 470

SEQ ID NO: 5238 - DNA, 4291 bp, Homo sapiens
gggtcttgttctgtctcccaagctggagtgcagtggtgtggtcataggtcactgcagcgtcgaactcctaggctcaagtgatcctcttgcctcaggctcctgagtagctgggacaacaggcgtgtaccacacctggatactttttaaatttttggtagagaagggatctcactctattgccaagctggtgtcgaactcttggtcttaagcagccctcccacgtcagcatcccaaagtgttgggatttcagagggatcatggcccaagttgcaatgtccaccctccccgttgaagatgaggagtcctcggagagcaggatggtggtgacattcctcatgtcagctctcgagtccatgtgtaaagaactggccaagtccaaagccgaagtggcctgcattgcagtgtatgaaacagacgtgtttgtcgtcggaactgaaagaggacgtgcttttgtcaataccagaaaggattttcaaaaagattttgtaaaatattgtgttgaagaagaagaaaaagctgcagagatgcataaaatgaaatctacaacccaggcaaatcggatgagtgtagatgctgtagaaattgaaacactcagaaaaacagttgaggactatttctgcttttgctatgggaaagctttaggcaaatccacagtggtacctgtaccatatgagaagatgctgcgagaccagtcggctgtggtagtgcaggggcttccggaaggtgttgcctttaaacaccccgagaactatgatcttgcaaccctgaaatggattttggagaacaaagcagggatttcattcatcattaagagaccttttttagagccaaagaagcatgtaggtggtcgtgtgatggtaacagatgctgacaggtcaatactatctccaggtggaagttgtggccccatcaaagtgaaaactgaacccacagaagattctggcatttccctggaaatggcagctgtgacagtaaaggaagaatcagaagatcctgattattatcaatataacattcaaggaagccaccattcttcagagggcaatgaaggcacagaaatggaagtaccagcagaagattctactcaacatgtcccttcagaaacaagtgaggaccctgaagttgaggtgactattgaagatgatgattattctccaccgtctaagagaccaaaggccaatgagctaccgcagccaccagtcccggaacccgccaatgctgggaagcggaaagtgagggagttcaacttcgagaaatggaatgctcgcatcactgatctacgtaaacaagttgaagaattgtttgaaaggaaatatgctcaagccataaaagccaaaggtccggtgacgatcccgtaccctcttttccagtctcatgttgaagatctttatgtagaaggacttcctgaaggaattccttttagaaggccatctacttacggaattcctcgcctggagaggatattacttgcaaaggaaaggattcgttttgtgattaagaaacatgagcttctgaattcaacacgtgaagatttacagcttgataagccagcttcaggagtaaaggaagaatggtatgccagaatcactaaattaagaaagatggtggatcagcttttctgcaaaaaatttgcggaagccttggggagcactgaagccaaggctgtaccgtaccaaaaatttgaggcacacccgaatgatctgtacgtggaaggactgccagaaaacattcctttccgaagtccctcatggtatggaatcccaaggctggaaaaaatcattcaagtgggcaatcgaattaaatttgttattaaaagaccagaacttctgactcacagtaccactgaagttactcagccaagaacgaatacaccagtcaaagaagattggaatgtcagaattaccaagctacggaagcaagtggaagagatttttaatttgaaatttgctcaagctcttggactcaccgaggcagtaaaagtaccatatcctgtgtttgaatcaaacccggagttcttgaaaggatcgtccgcgggagtaataaaatcaagttcgttgttaaaaaacctgaactagttatttcctacttgcctcctgggatggctagtaaaataaacactaaagctttgcagtcccccaaaagaccacgaagtcctgggagtaattcaaaggttcctgaaattgaggtcaccgtggaaggccctaataacaacaatcctcaaacctcagctgttcgaaccccgacccagactaacggttctaacgttcccttcaagccacgagggagagagttttcctttgaggcctggaatgccaaaatcacggacctaaaacagaaagttgaaaatctcttcaatgagaaatgtggggaagctcttggccttaaacaagctgtgaaggtgccgttcgcgttatttgagtctttcccggaagacttttatgtggaaggcttacctgagggtgtgccattccgaagaccatcgacttttggcattccgaggctggagaagatactcagaaacaaagccaaaattaagttcatcattaaaaagcccgaaatgtttgagacggcgattaaggagagcacctcctctaagagccctcccagaaaaataaattcatcacccaatgttaatactactgcatcaggtgttgaagaccttaacatcattcaggtgacaattccagatgatgataatgaaagactctcgaaagttgaaaaagctagacagctaagagaacaagtgaatgacctctttagtcggaaatttggtgaagctattggtatgggttttcctgtgaaagttccctacaggaaaatcacaattaaccctggctgtgtggtggttgatggcatgcccccgggggtgtccttcaaagcccccagctacctggaaatcagctccatgagaaggatcttagactctgccgagtttatcaaattcacggtcattagaccatttccaggacttgtgattaataaccagctggttgatcagagtgagtcagaaggccccgtgatacaagaatcagctgaaccaagccagttggaagttccagccacagaagaaataaaagagactgatggaagctctcagatcaagcaagaaccagaccccacgtggtagacctcttccctcctaggcttaaagtatcagtggttgagaagagcttttcggacctgttactaccccaagctgtgtaatatacttgtataacagaaataccttctatacaaacctttttttctacttttagatagaaatgtctactttttcagcagttctgtgaattaaagagcagagtgactgtgggtctggaatggctggtgtacttgggaatgtactatcaggattttacagcaatgctgggaaatgacagggaaaatgacaggaatgaatctcaccagattttttatgtactcagcagagccttgagttacggtgtttattttccaatcaagtgaagatatctcctacttctcctactggaacatctcagcttctgcagtgaagaaaaattcctgtgatagttcagttctttagtttttctatttgaaaaaaaaaaatcatttaaatgatcctttgttcacggctctccttaatgactgagtgaacagttcctatctgtatatttgactaaaccttttcctaagctatctctcatggttcctatgtttttttatcataattaaaagcaaaaccatctggatcacctaacagtcagaggtcagtatctcagcgtgtgaattatagaggaaatacagagagaacctcttccacttttacttttcgtccaaataaaatgcatggtgtaccagaagttgaagatcgggttgaggattggggctagctcgatgacactaaggccccaacatcgcgggacctgctgtggcgcggattcttaggaacgctgttctagccggccccctctccaggggtcgccgtggccggcattatttcctagttcttcttgtaaccctgaggtgccagcgcggggagtgaggaggggtcagggggctaaggatgcaacctctgacgttctgcgccttcctaggagagtcttacatgtgttgagatttcacaagcaatgcgagttgtaaaataccagctctacaagaagctaggctctgtgacggcatagttttcagtagctttatcacaatattcacaatggagaattatatgacatggtagcagaaataggcccttttatgtgttgcttctattttacctcaaattgtagatatagggtaatcaataaaatccatccatgcctttcacacactaagt

SEQ ID NO: 5239 - protein, 605 aa, Homo sapiens; identical to SEQ ID NO: 4221

SEQ ID NO: 5240 - DNA, 7676 bp, Homo sapiens
gggtcttgttctgtctcccaagctggagtgcagtggtgtggtcataggtcactgcagcgtcgaactcctaggctcaagtgatcctcttgcctcaggctcctgagtagctgggacaacaggcgtgtaccacacctggatactttttaaatttttggtagagaagggatctcactctattgccaagctggtgtcgaactcttggtcttaagcagccctcccacgtcagcatcccaaagtgttgggatttcagagggatcatggcccaagttgcaatgtccaccctccccgttgaagatgaggagtcctcggagagcaggatggtggtgacattcctcatgtcagctctcgagtccatgtgtaaagaactggccaagtccaaagccgaagtggcctgcattgcagtgtatgaaacagacgtgtttgtcgtcggaactgaaagaggacgtgcttttgtcaataccagaaaggattttcaaaaagattttgtaaaatattgtgttgaagaagaagaaaaagctgcagagatgcataaaatgaaatctacaacccaggcaaatcggatgagtgtagatgctgtagaaattgaaacactcagaaaaacagttgaggactatttctgcttttgctatgggaaagctttaggcaaatccacagtggtacctgtaccatatgagaagatgctgcgagaccagtcggctgtggtagtgcaggggcttccggaaggtgttgcctttaaacaccccgagaactatgatcttgcaaccctgaaatggattttggagaacaaagcagggatttcattcatcattaagagaccttttttagagccaaagaagcatgtaggtggtcgtgtgatggtaacagatgctgacaggtcaatactatctccaggtggaagttgtggccccatcaaagtgaaaactgaacccacagaagattctggcatttccctggaaatggcagctgtgacagtaaaggaagaatcagaagatcctgattattatcaatataacattcaaggaagccaccattcttcagagggcaatgaaggcacagaaatggaagtaccagcagaagatgatgattattctccaccgtctaagagaccaaaggccaatgagctaccgcagccaccagtcccggaacccgccaatgctgggaagcggaaagtgagggagttcaacttcgagaaatggaatgctcgcatcactgatctacgtaaacaagttgaagaattgtttgaaaggaaatatgctcaagccataaaagccaaaggtccggtgacgatcccgtaccctcttttccagtctcatgttgaagatctttatgtagaaggacttcctgaaggaattccttttagaaggccatctacttacggaattcctcgcctggagaggatattacttgcaaaggaaaggattcgttttgtgattaagaaacatgagcttctgaattcaacacgtgaagatttacagcttgataagccagcttcaggagtaaaggaagaatggtatgccagaatcactaaattaagaaagatggtggatcagcttttctgcaaaaaatttgcggaagccttggggagcactgaagccaaggctgtaccgtaccaaaaatttgaggcacacccgaatgatctgtacgtggaaggactgccagaaaacattcctttccgaagtccctcatggtatggaatcccaaggctggaaaaaatcattcaagtgggcaatcgaattaaatttgttattaaaagaccagaacttctgactcacagtaccactgaagttactcagccaagaacgaatacaccagctcaagctcttggactcaccgaggcagtaaaagtaccatatcctgtgtttgaatcaaacccggagttcttgtatgtggaaggcttgccagaggggattcccttccgaagccctacctggtttggaattccacgacttgaaaggatcgtccgcgggagtaataaaatcaagttcgttgttaaaaaacctgaactagttatttcctacttgcctcctgggatggctagtaaaataaacactaaagctttgcagtcccccaaaagaccacgaagtcctgggagtaattcaaaggttcctgaaattgaggtcaccgtggaaggccctaataacaacaatcctcaaacctcagctgttcgaaccccgacccagactaacggttctaacgttcccttcaagccacgagggagagagttttcctttgaggcctggaatgccaaaatcacggacctaaaacagaaagttgaaaatctcttcaatgagaaatgtggggaagctcttggccttaaacaagctgtgaaggtgccgttcgcgttatttgagtctttcccggaagacttttatgtggaaggcttacctgagggtgtgccattccgaagaccatcgacttttggcattccgaggctggagaagatactcagaaacaaagccaaaattaagttcatcattaaaaagcccgaaatgtttgagacggcgattaaggagagcacctcctctaagagccctcccagaaaaataaattcatcacccaatgttaatactactgcatcaggtgttgaagaccttaacatcattcaggtgacaattccagatgatgataatgaaagactctcgaaagttgaaaaagctagacagctaagagaacaagtgaatgacctctttagtcggaaatttggtgaagctattggtatgggttttcctgtgaaagttccctacaggaaaatcacaattaaccctggctgtgtggtggttgatggcatgcccccgggggtgtccttcaaagcccccagctacctggaaatcagctccatgagaaggatcttagactctgccgagtttatcaaattcacggtcattaggtaagtgagagtttcctgcttagtcacaggagcgaatctggagctcatgaggctgactcttctaaaatgcagccacaggtagtcatcgaatccggcttcctatgctgtgcaatcaacaaatcaaaataacttgtgtcatcattagaatgtcagatgtgcttctacgaactaagctgactcttttaattctttggcaaagggttggcaaactaggactgtttgccaaattcaggctgcctcctatttttagagtcttcctgaaacacagctacacccgtattatccatggctgctttcctgtcacagtgagtaagtagctgggactgagaaggcatggcctccaaagtctaaaatatttactctctagcactttgtagaaaaaccttagctaggcacagtggctaacgcctgtaatcccagcattttgggaggccaaggcaggcagatcacctgaggtcaggagttccagaccagcctggccaacatggtgaaatcccatctctacaaaaataaaacagttagctgggcatgatggcgggtgcctgtaatcccagctactcgggaggctgaggcaggatagtcgcttgaacccaggaggtggaggttgcaatgagccaagatcatgccactgcactccagcctggacgacagagtgagactccatcacaagaaaaaaagaactttgtcaacctctgtcttagggcgccttgtcacaggcttcgggtcagacggattcaaccttgcatcagccatttgttagccaggtcactctgttctttgtctgtaaatgagattgatcgttgttcccactgagagtgtcagctccttcccgtagagcaggcatgatgattgtactcacctctgacaccattgtgagtgccacattccttcccacgtccttgtcactgtaagagatgcccacctgagcaccaaccccaggttatcttcccctttgtcttccagccccccagaaacagctacgactcaacctacccaatcatttcatcatcagattgccactgtctctagttcaggtctcttgggactggcactcagaaatctcataataaatcctcttgaggcttctcatacactcgtcttcttccaatcttctttccctcaaaatctcatattttggttccacttcacccaccgtcattctccatatcactcccaggagttaggcaaaaagccccttccgttcttccgtatgttaaacttagaatcactctgttccctgctctgcgtttctattttttgtttttcctccatttactagtagcttaacactttctaacagtgttcttattattgatacgtatctatctcttccataagcttataaggtcacggataatacttctcattgtagtacgtaaatgacgtgggctagatatgagttgaataaacagttatacctgtaaattcttacagagtgaaaataaattgttatactttacaatttgtttctctctttagaccatttccaggacttgtgattaataaccgtgagtattttgtgaagtgttttgtttttgttttttcctggggtctgacgtgtgtgcgtgtgagtgtgtatacatgcttaacgtatatcacgttacttcacctatgtcagtaaccaggccaaatacttgttttagccctcagtaaaaacaccaggcacttcctagttgtaaaattattcaagcttcttaacttcctatcctcgatgcacttaatcataaaatggtaataatagcaccgattttgggggagtcgttccagtagatggaaagcatctggaacaggtgtcagcaagctcctgccgacgtgtatgcataaagttttattgaaaccaccatcgtgtccatttgtttatggcagaactgagagatggcagcagcaagtgtgtgcctgcaaaacctaaaatatttactaattggctctgcaagaaaagagtttgcatccccctaacctagaacagtgtctagcctctagtatgtgtttagcctacagtatgtgctcagcgaatacaatctatatttattactgcttttatgactgttataattactgtgcttggatttcgttacaaagtaagtcacaatgtgcctgcttctgttagtatttcagcacagtgcctggcacacatggggctctcaaatattgctgagcgagtgaacaaatgtcctttcaattccttaacgttgatgtcattttcaatagtattttgagccaaacttaattttgcgagtgtgttttgttttcttaactttattattaaaaatgtataaaagtgaggccaggcgtggtggctcacgcctgtaatcccagcagtttgggaggctgaggcaggcggatcagttgaggttgggagttggagaccagcccgtccaacatggtgaaagcctgtctctactaaaaatacaaaaatcagctgggtgtggtggcgcgtgcctgtaatcccagctactcaggaggctgaggcaggagagttgcttgaatcctagaggtggaggttgcagtgagctgagatcgtgccattgcactccagcctgggcaacaagagcaaaactctgtcccaataaataaataaataaaatgttctcttttgttcctgttcttgtgcggtagtgtggtatagagttttatggtaattactgtgaattagtgattctgagggacatatcagaactctgaggtttgtttccttctcatcttgagggaaacagcaaatgtatgttaaaatgcttttccaagggaacaacacatccttacattatttaaaccaatctgcttcattttcagagctggttgatcagagtgagtcagaaggccccgtgatacaagaatcagctgaaccaagccagttggaagttccagccacagaagaaataaaagagactgatggaagctctcagatcaagcaagaaccagaccccacgtggtagacctcttccctcctagggtaaatcagcttctgtgtcagggatgctgtgtggtgtccatctgaaccccctgcatacgcgtagctaatgtgatctccccactttcacataagatggtggccctgccttcagggaatgtgggagccaggtgggagccttcccggatatttaagctagaagattctacagggagattctccttggatcaatatatgtctctcagtcaaagatgtaaaagcacttttgccttaaaaagaatgttctgtttctaaatagagtcaacgttgtcctcctcattggaattcactatgagtcagaatcattagactgacttttttttttccatagtaatagtattttgcagagtctcacagagctgcagatcttttgttcatcttgcagagttaacaagtctgatcctgttagtccagatttcttaaatttggccaagttataataggagcagtagcttgagacccgaagtcaggaaactttgacaatggatttttttttttaatccagagacttgtactggaatttgccttaccctgtcagctcatggacttaaggtttcatcccgctttatgagtgcttctgaatccaagtcattgttacctgaatttgcaaattaagttgtgatattcgtgactgttaaattcctgtaattagattaacctctttgcttgcttgtttgttttctctcctattttagcttaaagtatcagtggttgagaagagcttttcggacctgttactaccccaagctgtgtaatatacttgtataacagaaataccttctatacaaacctttttttctacttttagatagaaatgtctactttttcagcagttctgtgaattaaagagcagagtgactgtgggtctggaatggctggtgtacttgggaatgtactatcaggattttacagcaatgctgggaaatgacagggaaaatgacaggaatgaatctcaccagattttttatgtactcagcagagccttgagttacggtgtttattttccaatcaagtgaagatatctcctacttctcctactggaacatctcagcttctgcagtgaagaaaaattcctgtgatagttcagttctttagtttttctatttgaaaaaaaaaaatcatttaaatgatcctttgttcacggctctccttaatgactgagtgaacagttcctatctgtatatttgactaaaccttttcctaagctatctctcatggttcctatgtttttttatcataattaaaagcaaaaccatctggatcacctaacagtcagaggtcagtatctcagcgtgtgaattatagaggaaatacagagagaacctcttccacttttacttttcgtccaaataaaatgcatggtgtaccagaagttgaagatcgggttgaggattggggctagctcgatgacactaaggccccaacatcgcgggacctgctgtggcgcggattcttaggaacgctgttctagccggccccctctccaggggtcgccgtggccggcattatttcctagttcttcttgtaaccctgaggtgccagcgcggggagtgaggaggggtcagggggctaaggatgcaacctctgacgttctgcgccttcctaggagagtcttacatgtgttgagatttcacaagcaatgcgagttgtaaaataccagctctacaagaagctaggctctgtgacggcatagttttcagtagctttatcacaatattcacaatggagaattatatgacatggtagcagaaataggcccttttatgtgttgcttctattttacctcaaattgtagatatagggtaatcaataaaatccatccatgcctttcacacactaagt

SEQ ID NO: 5241 - protein, 877 aa, Homo sapiens; identical to SEQ ID NO: 4525

SEQ ID NO: 5242 - DNA, 3739 bp, Homo sapiens
gggtcttgttctgtctcccaagctggagtgcagtggtgtggtcataggtcactgcagcgtcgaactcctaggctcaagtgatcctcttgcctcaggctcctgagtagctgggacaacaggcgtgtaccacacctggatactttttaaatttttggtagagaagggatctcactctattgccaagctggtgtcgaactcttggtcttaagcagccctcccacgtcagcatcccaaagtgttgggatttcagagggatcatggcccaagttgcaatgtccaccctccccgttgaagatgaggagtcctcggagagcaggatggtggtgacattcctcatgtcagctctcgagtccatgtgtaaagaactggccaagtccaaagccgaagtggcctgcattgcagtgtatgaaacagacgtgtttgtcgtcggaactgaaagaggacgtgcttttgtcaataccagaaaggattttcaaaaagattttgtaaaatattgtgttgaagaagaagaaaaagctgcagagatgcataaaatgaaatctacaacccaggcaaatcggatgagtgtagatgctgtagaaattgaaacactcagaaaaacagttgaggactatttctgcttttgctatgggaaagctttaggcaaatccacagtggtacctgtaccatatgagaagatgctgcgagaccagtcggctgtggtagtgcaggggcttccggaaggtgttgcctttaaacaccccgagaactatgatcttgcaaccctgaaatggattttggagaacaaagcagggatttcattcatcattaagagaccttttttagagccaaagaagcatgtaggtggtcgtgtgatggtaacagatgctgacaggtcaatactatctccaggtggaagttgtggccccatcaaagtgaaaactgaacccacagaagattctggcatttccctggaaatggcagctgtgacagtaaaggaagaatcagaagatcctgattattatcaatataacattcaaggaagccaccattcttcagagggcaatgaaggcacagaaatggaagtaccagcagaagattctactcaacatgtcccttcagaaacaagtgaggaccctgaagttgaggtgactattgaagatgatgattattctccaccgtctaagagaccaaaggccaatgagctaccgcagccaccagtcccggaacccgccaatgctgggaagcggaaagtgagggagttcaacttcgagaaatggaatgctcgcatcactgatctacgtaaacaagttgaagaattgtttgaaaggaaatatgctcaagccataaaagccaaaggtccggtgacgatcccgtaccctcttttccagtctcatgttgaagatctttatgtagaaggacttcctgaaggaattccttttagaaggccatctacttacggaattcctcgcctggagaggatattacttgcaaaggaaaggattcgttttgtgattaagaaacatgagcttctgaattcaacacgtgaagatttacagcttgataagccagcttcaggagtaaaggaagaatggtatgccagaatcactaaattaagaaagatggtggatcagcttttctgcaaaaaatttgcggaagccttggggagcactgaagccaaggctgtaccgtaccaaaaatttgaggcacacccgaatgatctgtacgtggaaggactgccagaaaacattcctttccgaagtccctcatggtatggaatcccaaggctggaaaaaatcattcaagtgggcaatcgaattaaatttgttattaaaagaccagaacttctgactcacagtaccactgaagttactcagccaagaacgaatacaccagtcaaagaagattggaatgtcagaattaccaagctacggaagcaagtggaagagatttttaatttgaaatttgctcaagctcttggactcaccgaggcagtaaaagtaccatatcctgtgtttgaatcaaacccggagttcttgaaaggatcgtccgcgggagtaataaaatcaagttcgttgttaaaaaacctgaactagttatttcctacttgcctcctgggatggctagtaaaataaacactaaagctttgcagtcccccaaaagaccacgaagtcctgggagtaattcaaaggttcctgaaattgaggtcaccgtggaaggccctaataacaacaatcctcaaacctcagctgttcgaaccccgacccagactaacggttctaacgttcccttcaagccacgagggagagagttttcctttgaggcctggaatgccaaaatcacggacctaaaacagaaagttgaaaatctcttcaatgagaaatgtggggaagctcttggccttaaacaagctgtgaaggtgccgttcgcgttatttgagtctttcccggaagacttttatgtggaaggcttacctgagggtgtgccattccgaagaccatcgacttttggcattccgaggctggagaagatactcagaaacaaagccaaaattaagttcatcattaaaaagcccgaaatgtttgagacggcgattaaggagagcacctcctctaagagccctcccagaaaaataaattcatcacccaatgttaatactactgcatcaggtgttgaagaccttaacatcattcaggtgacaattccagatgatgataatgaaagactctcgaaagttgaaaaagctagacagctaagagaacaagtgaatgacctctttagtcggaaatttggtgaagctattggtatgggttttcctgtgaaagttccctacaggaaaatcacaattaaccctggctgtgtggtggttgatggcatgcccccgggggtgtccttcaaagcccccagctacctggaaatcagctccatgagaaggatcttagactctgccgagtttatcaaattcacggtcattagaccatttccaggacttgtgattaataaccagctggttgatcagagtgagtcagaaggccccgtgatacaagaatcagctgaaccaagccagttggaagttccagccacagaagaaataaaagagactgatggaagctctcagatcaagcaagaaccagaccccacgtggtagacctcttccctcctaggcaaaaccatctggatcacctaacagtcagaggtcagtatctcagcgtgtgaattatagaggaaatacagagagaacctcttccacttttacttttcgtccaaataaaatgcatggtgtaccagaagttgaagatcgggttgaggattggggctagctcgatgacactaaggccccaacatcgcgggacctgctgtggcgcggattcttaggaacgctgttctagccggccccctctccaggggtcgccgtggccggcattatttcctagttcttcttgtaaccctgaggtgccagcgcggggagtgaggaggggtcagggggctaaggatgcaacctctgacgttctgcgccttcctaggagagtcttacatgtgttgagatttcacaagcaatgcgagttgtaaaataccagctctacaagaagctaggctctgtgacggcatagttttcagtagctttatcacaatattcacaatggagaattatatgacatggtagcagaaataggcccttttatgtgttgcttctattttacctcaaattgtagatatagggtaatcaataaaatccatccatgcctttcacacactaagt

SEQ ID NO: 5243 - protein, 605 aa, Homo sapiens; identical to SEQ ID NO: 4221

SEQ ID NO: 5244 - DNA, 4011 bp, Homo sapiens
gggtcttgttctgtctcccaagctggagtgcagtggtgtggtcataggtcactgcagcgtcgaactcctaggctcaagtgatcctcttgcctcaggctcctgagtagctgggacaacaggcgtgtaccacacctggatactttttaaatttttggtagagaagggatctcactctattgccaagctggtgtcgaactcttggtcttaagcagccctcccacgtcagcatcccaaagtgttgggatttcagagggatcatggcccaagttgcaatgtccaccctccccgttgaagatgaggagtcctcggagagcaggatggtggtgacattcctcatgtcagctctcgagtccatgtgtaaagaactggccaagtccaaagccgaagtggcctgcattgcagtgtatgaaacagacgtgtttgtcgtcggaactgaaagaggacgtgcttttgtcaataccagaaaggattttcaaaaagattttgtaaaatattgtgttgaagaagaagaaaaagctgcagagatgcataaaatgaaatctacaacccaggcaaatcggatgagtgtagatgctgtagaaattgaaacactcagaaaaacagttgaggactatttctgcttttgctatgggaaagctttaggcaaatccacagtggtacctgtaccatatgagaagatgctgcgagaccagtcggctgtggtagtgcaggggcttccggaaggtgttgcctttaaacaccccgagaactatgatcttgcaaccctgaaatggattttggagaacaaagcagggatttcattcatcattaagagaccttttttagagccaaagaagcatgtaggtggtcgtgtgatggtaacagatgctgacaggtcaatactatctccaggtggaagttgtggccccatcaaagtgaaaactgaacccacagaagattctggcatttccctggaaatggcagctgtgacagtaaaggaagaatcagaagatcctgattattatcaatataacattcaaggaagccaccattcttcagagggcaatgaaggcacagaaatggaagtaccagcagaagatgatgattattctccaccgtctaagagaccaaaggccaatgagctaccgcagccaccagtcccggaacccgccaatgctgggaagcggaaagtgagggagttcaacttcgagaaatggaatgctcgcatcactgatctacgtaaacaagttgaagaattgtttgaaaggaaatatgctcaagccataaaagccaaaggtccggtgacgatcccgtaccctcttttccagtctcatgttgaagatctttatgtagaaggacttcctgaaggaattccttttagaaggccatctacttacggaattcctcgcctggagaggatattacttgcaaaggaaaggattcgttttgtgattaagaaacatgagcttctgaattcaacacgtgaagatttacagcttgataagccagcttcaggagtaaaggaagaatggtatgccagaatcactaaattaagaaagatggtggatcagcttttctgcaaaaaatttgcggaagccttggggagcactgaagccaaggctgtaccgtaccaaaaatttgaggcacacccgaatgatctgtacgtggaaggactgccagaaaacattcctttccgaagtccctcatggtatggaatcccaaggctggaaaaaatcattcaagtgggcaatcgaattaaatttgttattaaaagaccagaacttctgactcacagtaccactgaagttactcagccaagaacgaatacaccagtcaaagaagattggaatgtcagaattaccaagctacggaagcaagtggaagagatttttaatttgaaatttgctcaagctcttggactcaccgaggcagtaaaagtaccatatcctgtgtttgaatcaaacccggagttcttgtatgtggaaggcttgccagaggggattcccttccgaagccctacctggtttggaattccacgacttgaaaggatcgtccgcgggagtaataaaatcaagttcgttgttaaaaaacctgaactagttatttcctacttgcctcctgggatggctagtaaaataaacactaaagctttgcagtcccccaaaagaccacgaagtcctgggagtaattcaaaggttcctgaaattgaggtcaccgtggaaggccctaataacaacaatcctcaaacctcagctgttcgaaccccgacccagactaacggttctaacgttcccttcaagccacgagggagagagttttcctttgaggcctggaatgccaaaatcacggacctaaaacagaaagttgaaaatctcttcaatgagaaatgtggggaagctcttggccttaaacaagctgtgaaggtgccgttcgcgttatttgagtctttcccggaagacttttatgtggaaggcttacctgagggtgtgccattccgaagaccatcgacttttggcattccgaggctggagaagatactcagaaacaaagccaaaattaagttcatcattaaaaagcccgaaatgtttgagacggcgattaaggagagcacctcctctaagagccctcccagaaaaataaattcatcacccaatgttaatactactgcatcaggtgttgaagaccttaacatcattcaggtgacaattccagatgatgataatgaaagactctcgaaagttgaaaaagctagacagctaagagaacaagtgaatgacctctttagtcggaaatttggtgaagctattggtatgggttttcctgtgaaagttccctacaggaaaatcacaattaaccctggctgtgtggtggttgatggcatgcccccgggggtgtccttcaaagcccccagctacctggaaatcagctccatgagaaggatcttagactctgccgagtttatcaaattcacggtcattagaccatttccaggacttgtgattaataaccagctggttgatcagagtgagtcagaaggccccgtgatacaagaatcagctgaaccaagccagttggaagttccagccacagaagaaataaaagagactgatggaagctctcagatcaagcaagaaccagaccccacgtggtagacctcttccctcctaggagccttgagttacggtgtttattttccaatcaagtgaagatatctcctacttctcctactggaacatctcagcttctgcagtgaagaaaaattcctgtgatagttcagttctttagtttttctatttgaaaaaaaaaaatcatttaaatgatcctttgttcacggctctccttaatgactgagtgaacagttcctatctgtatatttgactaaaccttttcctaagctatctctcatggttcctatgtttttttatcataattaaaagcaaaaccatctggatcacctaacagtcagaggtcagtatctcagcgtgtgaattatagaggaaatacagagagaacctcttccacttttacttttcgtccaaataaaatgcatggtgtaccagaagttgaagatcgggttgaggattggggctagctcgatgacactaaggccccaacatcgcgggacctgctgtggcgcggattcttaggaacgctgttctagccggccccctctccaggggtcgccgtggccggcattatttcctagttcttcttgtaaccctgaggtgccagcgcggggagtgaggaggggtcagggggctaaggatgcaacctctgacgttctgcgccttcctaggagagtcttacatgtgttgagatttcacaagcaatgcgagttgtaaaataccagctctacaagaagctaggctctgtgacggcatagttttcagtagctttatcacaatattcacaatggagaattatatgacatggtagcagaaataggcccttttatgtgttgcttctattttacctcaaattgtagatatagggtaatcaataaaatccatccatgcctttcacacactaagt

SEQ ID NO: 5245 - protein, 957 aa, Homo sapiens; identical to SEQ ID NO: 4303

SEQ ID NO: 5246 - DNA, 4983 bp, Homo sapiens
gggtcttgttctgtctcccaagctggagtgcagtggtgtggtcataggtcactgcagcgtcgaactcctaggctcaagtgatcctcttgcctcaggctcctgagtagctgggacaacaggcgtgtaccacacctggatactttttaaatttttggtagagaagggatctcactctattgccaagctggtgtcgaactcttggtcttaagcagccctcccacgtcagcatcccaaagtgttgggatttcagagggatcatggcccaagttgcaatgtccaccctccccgttgaagatgaggagtcctcggagagcaggatggtggtgacattcctcatgtcagctctcgagtccatgtgtaaagaactggccaagtccaaagccgaagtggcctgcattgcagtgtatgaaacagacgtgtttgtcgtcggaactgaaagaggacgtgcttttgtcaataccagaaaggattttcaaaaagattttgtaaaatattgtgttgaagaagaagaaaaagctgcagagatgcataaaatgaaatctacaacccaggcaaatcggatgagtgtagatgctgtagaaattgaaacactcagaaaaacagttgaggactatttctgcttttgctatgggaaagctttaggcaaatccacagtggtacctgtaccatatgagaagatgctgcgagaccagtcggctgtggtagtgcaggggcttccggaaggtgttgcctttaaacaccccgagaactatgatcttgcaaccctgaaatggattttggagaacaaagcagggatttcattcatcattaagagaccttttttagagccaaagaagcatgtaggtggtcgtgtgatggtaacagatgctgacaggtcaatactatctccaggtggaagttgtggccccatcaaagtgaaaactgaacccacagaagattctggcatttccctggaaatggcagctgtgacagtaaaggaagaatcagaagatcctgattattatcaatataacattcaaggaagccaccattcttcagagggcaatgaaggcacagaaatggaagtaccagcagaagattctactcaacatgtcccttcagaaacaagtgaggaccctgaagttgaggtgactattgaagatgatgattattctccaccgtctaagagaccaaaggccaatgagctaccgcagccaccagtcccggaacccgccaatgctgggaagcggaaagtgagggagttcaacttcgagaaatggaatgctcgcatcactgatctacgtaaacaagttgaagaattgtttgaaaggaaatatgctcaagccataaaagccaaaggtccggtgacgatcccgtaccctcttttccagtctcatgttgaagatctttatgtagaaggacttcctgaaggaattccttttagaaggccatctacttacggaattcctcgcctggagaggatattacttgcaaaggaaaggattcgttttgtgattaagaaacatgagcttctgaattcaacacgtgaagatttacagcttgataagccagcttcaggagtaaaggaagaatggtatgccagaatcactaaattaagaaagatggtggatcagcttttctgcaaaaaatttgcggaagccttggggagcactgaagccaaggctgtaccgtaccaaaaatttgaggcacacccgaatgatctgtacgtggaaggactgccagaaaacattcctttccgaagtccctcatggtatggaatcccaaggctggaaaaaatcattcaagtgggcaatcgaattaaatttgttattaaaagaccagaacttctgactcacagtaccactgaagttactcagccaagaacgaatacaccagtcaaagaagattggaatgtcagaattaccaagctacggaagcaagtggaagagatttttaatttgaaatttgctcaagctcttggactcaccgaggcagtaaaagtaccatatcctgtgtttgaatcaaacccggagttcttgaaaggatcgtccgcgggagtaataaaatcaagttcgttgttaaaaaacctgaactagttatttcctacttgcctcctgggatggctagtaaaataaacactaaagctttgcagtcccccaaaagaccacgaagtcctgggagtaattcaaaggttcctgaaattgaggtcaccgtggaaggccctaataacaacaatcctcaaacctcagctgttcgaaccccgacccagactaacggttctaacgttcccttcaagccacgagggagagagttttcctttgaggcctggaatgccaaaatcacggacctaaaacagaaagttgaaaatctcttcaatgagaaatgtggggaagctcttggccttaaacaagctgtgaaggtgccgttcgcgttatttgagtctttcccggaagacttttatgtggaaggcttacctgagggtgtgccattccgaagaccatcgacttttggcattccgaggctggagaagatactcagaaacaaagccaaaattaagttcatcattaaaaagcccgaaatgtttgagacggcgattaaggagagcacctcctctaagagccctcccagaaaaataaattcatcacccaatgttaatactactgcatcaggtgttgaagaccttaacatcattcaggtgacaattccagatgatgataatgaaagactctcgaaagttgaaaaagctagacagctaagagaacaagtgaatgacctctttagtcggaaatttggtgaagctattggtatgggttttcctgtgaaagttccctacaggaaaatcacaattaaccctggctgtgtggtggttgatggcatgcccccgggggtgtccttcaaagcccccagctacctggaaatcagctccatgagaaggatcttagactctgccgagtttatcaaattcacggtcattagaccatttccaggacttgtgattaataaccagctggttgatcagagtgagtcagaaggccccgtgatacaagaatcagctgaaccaagccagttggaagttccagccacagaagaaataaaagagactgatggaagctctcagatcaagcaagaaccagaccccacgtggtagacctcttccctcctagggtaaatcagcttctgtgtcagggatgctgtgtggtgtccatctgaaccccctgcatacgcgtagctaatgtgatctccccactttcacataagatggtggccctgccttcagggaatgtgggagccaggtgggagccttcccggatatttaagctagaagattctacagggagattctccttggatcaatatatgtctctcagtcaaagatgtaaaagcacttttgccttaaaaagaatgttctgtttctaaatagagtcaacgttgtcctcctcattggaattcactatgagtcagaatcattagactgacttttttttttccatagtaatagtattttgcagagtctcacagagctgcagatcttttgttcatcttgcagagttaacaagtctgatcctgttagtccagatttcttaaatttggccaagttataataggagcagtagcttgagacccgaagtcaggaaactttgacaatggatttttttttttaatccagagacttgtactggaatttgccttaccctgtcagctcatggacttaaggtttcatcccgctttatgagtgcttctgaatccaagtcattgttacctgaatttgcaaattaagttgtgatattcgtgactgttaaattcctgtaattagattaacctctttgcttgcttgtttgttttctctcctattttagcttaaagtatcagtggttgagaagagcttttcggacctgttactaccccaagctgtgtaatatacttgtataacagaaataccttctatacaaacctttttttctacttttagatagaaatgtctactttttcagcagttctgtgaattaaagagcagagtgactgtgggtctggaatggctggtgtacttgggaatgtactatcaggattttacagcaatgctgggaaatgacagggaaaatgacaggaatgaatctcaccagattttttatgtactcagcagagccttgagttacggtgtttattttccaatcaagtgaagatatctcctacttctcctactggaacatctcagcttctgcagtgaagaaaaattcctgtgatagttcagttctttagtttttctatttgaaaaaaaaaaatcatttaaatgatcctttgttcacggctctccttaatgactgagtgaacagttcctatctgtatatttgactaaaccttttcctaagctatctctcatggttcctatgtttttttatcataattaaaagcaaaaccatctggatcacctaacagtcagaggtcagtatctcagcgtgtgaattatagaggaaatacagagagaacctcttccacttttacttttcgtccaaataaaatgcatggtgtaccagaagttgaagatcgggttgaggattggggctagctcgatgacactaaggccccaacatcgcgggacctgctgtggcgcggattcttaggaacgctgttctagccggccccctctccaggggtcgccgtggccggcattatttcctagttcttcttgtaaccctgaggtgccagcgcggggagtgaggaggggtcagggggctaaggatgcaacctctgacgttctgcgccttcctaggagagtcttacatgtgttgagatttcacaagcaatgcgagttgtaaaataccagctctacaagaagctaggctctgtgacggcatagttttcagtagctttatcacaatattcacaatggagaattatatgacatggtagcagaaataggcccttttatgtgttgcttctattttacctcaaattgtagatatagggtaatcaataaaatccatccatgcctttcacacactaagt

SEQ ID NO: 5247 - protein, 605 aa, Homo sapiens; identical to SEQ ID NO: 4221

SEQ ID NO: 5248 - DNA, 3840 bp, Homo sapiens
gggtcttgttctgtctcccaagctggagtgcagtggtgtggtcataggtcactgcagcgtcgaactcctaggctcaagtgatcctcttgcctcaggctcctgagtagctgggacaacaggcgtgtaccacacctggatactttttaaatttttggtagagaagggatctcactctattgccaagctggtgtcgaactcttggtcttaagcagccctcccacgtcagcatcccaaagtgttgggatttcagagggatcatggcccaagttgcaatgtccaccctccccgttgaagatgaggagtcctcggagagcaggatggtggtgacattcctcatgtcagctctcgagtccatgtgtaaagaactggccaagtccaaagccgaagtggcctgcattgcagtgtatgaaacagacgtgtttgtcgtcggaactgaaagaggacgtgcttttgtcaataccagaaaggattttcaaaaagattttgtaaaatattgtgttgaagaagaagaaaaagctgcagagatgcataaaatgaaatctacaacccaggcaaatcggatgagtgtagatgctgtagaaattgaaacactcagaaaaacagttgaggactatttctgcttttgctatgggaaagctttaggcaaatccacagtggtacctgtaccatatgagaagatgctgcgagaccagtcggctgtggtagtgcaggggcttccggaaggtgttgcctttaaacaccccgagaactatgatcttgcaaccctgaaatggattttggagaacaaagcagggatttcattcatcattaagagaccttttttagagccaaagaagcatgtaggtggtcgtgtgatggtaacagatgctgacaggtcaatactatctccaggtggaagttgtggccccatcaaagtgaaaactgaacccacagaagattctggaagccaccattcttcagagggcaatgaaggcacagaaatggaagtaccagcagaagattctactcaacatgtcccttcagaaacaagtgaggaccctgaagttgaggtgactattgaagatgatgattattctccaccgtctaagagaccaaaggccaatgagctaccgcagccaccagtcccggaacccgccaatgctgggaagcggaaagtgagggagttcaacttcgagaaatggaatgctcgcatcactgatctacgtaaacaagttgaagaattgtttgaaaggaaatatgctcaagccataaaagccaaaggtccggtgacgatcccgtaccctcttttccagtctcatgttgaagatctttatgtagaaggacttcctgaaggaattccttttagaaggccatctacttacggaattcctcgcctggagaggatattacttgcaaaggaaaggattcgttttgtgattaagaaacatgagcttctgaattcaacacgtgaagatttacagcttgataagccagcttcaggagtaaaggaagaatggtatgccagaatcactaaattaagaaagatggtggatcagcttttctgcaaaaaatttgcggaagccttggggagcactgaagccaaggctgtaccgtaccaaaaatttgaggcacacccgaatgatctgtacgtggaaggactgccagaaaacattcctttccgaagtccctcatggtatggaatcccaaggctggaaaaaatcattcaagtgggcaatcgaattaaatttgttattaaaagaccagaacttctgactcacagtaccactgaagttactcagccaagaacgaatacaccagtcaaagaagattggaatgtcagaattaccaagctacggaagcaagtggaagagatttttaatttgaaatttgcttagatttgttgacagcggtttcctggagtgctgtcttgagaacgattctgaggaggctcagcaagaaagagtgtttcagttgattgggtgtgtctgtcatggagaaggaactcaagctcttggactcaccgaggcagtaaaagtaccatatcctgtgtttgaatcaaacccggagttcttgtatgtggaaggcttgccagaggggattcccttccgaagccctacctggtttggaattccacgacttgaaaggatcgtccgcgggagtaataaaatcaagttcgttgttaaaaaacctgaactagttatttcctacttgcctcctgggatggctagtaaaataaacactaaagctttgcagtcccccaaaagaccacgaagtcctgggagtaattcaaaggttcctgaaattgaggtcaccgtggaaggccctaataacaacaatcctcaaacctcagctgttcgaaccccgacccagactaacggttctaacgttcccttcaagccacgagggagagagttttcctttgaggcctggaatgccaaaatcacggacctaaaacagaaagttgaaaatctcttcaatgagaaatgtggggaagctcttggccttaaacaagctgtgaaggtgccgttcgcgttatttgagtctttcccggaagacttttatgtggaaggcttacctgagggtgtgccattccgaagaccatcgacttttggcattccgaggctggagaagatactcagaaacaaagccaaaattaagttcatcattaaaaagcccgaaatgtttgagacggcgattaaggagagcacctcctctaagagccctcccagaaaaataaattcatcacccaatgttaatactactgcatcaggtgttgaagaccttaacatcattcaggtgacaattccagatgatgataatgaaagactctcgaaagttgaaaaagctagacagctaagagaacaagtgaatgacctctttagtcggaaatttggtgaagctattggtatgggttttcctgtgaaagttccctacaggaaaatcacaattaaccctggctgtgtggtggttgatggcatgcccccgggggtgtccttcaaagcccccagctacctggaaatcagctccatgagaaggatcttagactctgccgagtttatcaaattcacggtcattagaccatttccaggacttgtgattaataaccagctggttgatcagagtgagtcagaaggccccgtgatacaagaatcagctgaaccaagccagttggaagttccagccacagaagaaataaaagagactgatggaagctctcagatcaagcaagaaccagaccccacgtggtagacctcttccctcctaggcaaaaccatctggatcacctaacagtcagaggtcagtatctcagcgtgtgaattatagaggaaatacagagagaacctcttccacttttacttttcgtccaaataaaatgcatggtgtaccagaagttgaagatcgggttgaggattggggctagctcgatgacactaaggccccaacatcgcgggacctgctgtggcgcggattcttaggaacgctgttctagccggccccctctccaggggtcgccgtggccggcattatttcctagttcttcttgtaaccctgaggtgccagcgcggggagtgaggaggggtcagggggctaaggatgcaacctctgacgttctgcgccttcctaggagagtcttacatgtgttgagatttcacaagcaatgcgagttgtaaaataccagctctacaagaagctaggctctgtgacggcatagttttcagtagctttatcacaatattcacaatggagaattatatgacatggtagcagaaataggcccttttatgtgttgcttctattttacctcaaattgtagatatagggtaatcaataaaatccatccatgcctttcacacactaagt

SEQ ID NO: 5249 - protein, 538 aa, Homo sapiens; identical to SEQ ID NO: 4183

SEQ ID NO: 5250 - DNA, 3855 bp, Homo sapiens
gggtcttgttctgtctcccaagctggagtgcagtggtgtggtcataggtcactgcagcgtcgaactcctaggctcaagtgatcctcttgcctcaggctcctgagtagctgggacaacaggcgtgtaccacacctggatactttttaaatttttggtagagaagggatctcactctattgccaagctggtgtcgaactcttggtcttaagcagccctcccacgtcagcatcccaaagtgttgggatttcagagggatcatggcccaagttgcaatgtccaccctccccgttgaagatgaggagtcctcggagagcaggatggtggtgacattcctcatgtcagctctcgagtccatgtgtaaagaactggccaagtccaaagccgaagtggcctgcattgcagtgtatgaaacagacgtgtttgtcgtcggaactgaaagaggacgtgcttttgtcaataccagaaaggattttcaaaaagattttgtaaaatattgtgttgaagaagaagaaaaagctgcagagatgcataaaatgaaatctacaacccaggcaaatcggatgagtgtagatgctgtagaaattgaaacactcagaaaaacagttgaggactatttctgcttttgctatgggaaagctttaggcaaatccacagtggtacctgtaccatatgagaagatgctgcgagaccagtcggctgtggtagtgcaggggcttccggaaggtgttgcctttaaacaccccgagaactatgatcttgcaaccctgaaatggattttggagaacaaagcagggatttcattcatcattaagagaccttttttagagccaaagaagcatgtaggtggtcgtgtgatggtaacagatgctgacaggtcaatactatctccaggtggaagttgtggccccatcaaagtgaaaactgaacccacagaagattctggcatttccctggaaatggcagctgtgacagtaaaggaagaatcagaagatcctgattattatcaatataacattcaaggaagccaccattcttcagagggcaatgaaggcacagaaatggaagtaccagcagaagatgatgattattctccaccgtctaagagaccaaaggccaatgagctaccgcagccaccagtcccggaacccgccaatgctgggaagcggaaagtgagggagttcaacttcgagaaatggaatgctcgcatcactgatctacgtaaacaagttgaagaattgtttgaaaggaaatatgctcaagccataaaagccaaaggtccggtgacgatcccgtaccctcttttccagtctcatgttgaagatctttatgtagaaggacttcctgaaggaattccttttagaaggccatctacttacggaattcctcgcctggagaggatattacttgcaaaggaaaggattcgttttgtgattaagaaacatgagcttctgaattcaacacgtgaagatttacagcttgataagccagcttcaggagtaaaggaagaatggtatgccagaatcactaaattaagaaagatggtggatcagcttttctgcaaaaaatttgcggaagccttggggagcactgaagccaaggctgtaccgtaccaaaaatttgaggcacacccgaatgatctgtacgtggaaggactgccagaaaacattcctttccgaagtccctcatggtatggaatcccaaggctggaaaaaatcattcaagtgggcaatcgaattaaatttgttattaaaagaccagaacttctgactcacagtaccactgaagttactcagccaagaacgaatacaccagtcaaagaagattggaatgtcagaattaccaagctacggaagcaagtggaagagatttttaatttgaaatttgcttagatttgttgacagcggtttcctggagtgctgtcttgagaacgattctgaggaggctcagcaagaaagagtgtttcagttgattgggtgtgtctgtcatggagaaggaactcaagctcttggactcaccgaggcagtaaaagtaccatatcctgtgtttgaatcaaacccggagttcttgtatgtggaaggcttgccagaggggattcccttccgaagccctacctggtttggaattccacgacttgaaaggatcgtccgcgggagtaataaaatcaagttcgttgttaaaaaacctgaactagttatttcctacttgcctcctgggatggctagtaaaataaacactaaagctttgcagtcccccaaaagaccacgaagtcctgggagtaattcaaaggttcctgaaattgaggtcaccgtggaaggccctaataacaacaatcctcaaacctcagctgttcgaaccccgacccagactaacggttctaacgttcccttcaagccacgagggagagagttttcctttgaggcctggaatgccaaaatcacggacctaaaacagaaagttgaaaatctcttcaatgagaaatgtggggaagctcttggccttaaacaagctgtgaaggtgccgttcgcgttatttgagtctttcccggaagacttttatgtggaaggcttacctgagggtgtgccattccgaagaccatcgacttttggcattccgaggctggagaagatactcagaaacaaagccaaaattaagttcatcattaaaaagcccgaaatgtttgagacggcgattaaggagagcacctcctctaagagccctcccagaaaaataaattcatcacccaatgttaatactactgcatcaggtgttgaagaccttaacatcattcaggtgacaattccagatgatgataatgaaagactctcgaaagttgaaaaagctagacagctaagagaacaagtgaatgacctctttagtcggaaatttggtgaagctattggtatgggttttcctgtgaaagttccctacaggaaaatcacaattaaccctggctgtgtggtggttgatggcatgcccccgggggtgtccttcaaagcccccagctacctggaaatcagctccatgagaaggatcttagactctgccgagtttatcaaattcacggtcattagaccatttccaggacttgtgattaataaccagctggttgatcagagtgagtcagaaggccccgtgatacaagaatcagctgaaccaagccagttggaagttccagccacagaagaaataaaagagactgatggaagctctcagatcaagcaagaaccagaccccacgtggtagacctcttccctcctaggcaaaaccatctggatcacctaacagtcagaggtcagtatctcagcgtgtgaattatagaggaaatacagagagaacctcttccacttttacttttcgtccaaataaaatgcatggtgtaccagaagttgaagatcgggttgaggattggggctagctcgatgacactaaggccccaacatcgcgggacctgctgtggcgcggattcttaggaacgctgttctagccggccccctctccaggggtcgccgtggccggcattatttcctagttcttcttgtaaccctgaggtgccagcgcggggagtgaggaggggtcagggggctaaggatgcaacctctgacgttctgcgccttcctaggagagtcttacatgtgttgagatttcacaagcaatgcgagttgtaaaataccagctctacaagaagctaggctctgtgacggcatagttttcagtagctttatcacaatattcacaatggagaattatatgacatggtagcagaaataggcccttttatgtgttgcttctattttacctcaaattgtagatatagggtaatcaataaaatccatccatgcctttcacacactaagt

SEQ ID NO: 5251 - protein, 543 aa, Homo sapiens; identical to SEQ ID NO: 4195

SEQ ID NO: 5252 - DNA, 5110 bp, Homo sapiens
gggtcttgttctgtctcccaagctggagtgcagtggtgtggtcataggtcactgcagcgtcgaactcctaggctcaagtgatcctcttgcctcaggctcctgagtagctgggacaacaggcgtgtaccacacctggatactttttaaatttttggtagagaagggatctcactctattgccaagctggtgtcgaactcttggtcttaagcagccctcccacgtcagcatcccaaagtgttgggatttcagagggatcatggcccaagttgcaatgtccaccctccccgttgaagatgaggagtcctcggagagcaggatggtggtgacattcctcatgtcagctctcgagtccatgtgtaaagaactggccaagtccaaagccgaagtggcctgcattgcagtgtatgaaacagacgtgtttgtcgtcggaactgaaagaggacgtgcttttgtcaataccagaaaggattttcaaaaagattttgtaaaatattgtgttgaagaagaagaaaaagctgcagagatgcataaaatgaaatctacaacccaggcaaatcggatgagtgtagatgctgtagaaattgaaacactcagaaaaacagttgaggactatttctgcttttgctatgggaaagctttaggcaaatccacagtggtacctgtaccatatgagaagatgctgcgagaccagtcggctgtggtagtgcaggggcttccggaaggtgttgcctttaaacaccccgagaactatgatcttgcaaccctgaaatggattttggagaacaaagcagggatttcattcatcattaagagaccttttttagagccaaagaagcatgtaggtggtcgtgtgatggtaacagatgctgacaggtcaatactatctccaggtggaagttgtggccccatcaaagtgaaaactgaacccacagaagattctggcatttccctggaaatggcagctgtgacagtaaaggaagaatcagaagatcctgattattatcaatataacattcaagcaggcccttctgaaactgatgatgttgatgaaaaacagcccctatcgaagcctttgcaaggaagccaccattcttcagagggcaatgaaggcacagaaatggaagtaccagcagaagattctactcaacatgtcccttcagaaacaagtgaggaccctgaagttgaggtgactattgaagatgatgattattctccaccgtctaagagaccaaaggccaatgagctaccgcagccaccagtcccggaacccgccaatgctgggaagcggaaagtgagggagttcaacttcgagaaatggaatgctcgcatcactgatctacgtaaacaagttgaagaattgtttgaaaggaaatatgctcaagccataaaagccaaaggtccggtgacgatcccgtaccctcttttccagtctcatgttgaagatctttatgtagaaggacttcctgaaggaattccttttagaaggccatctacttacggaattcctcgcctggagaggatattacttgcaaaggaaaggattcgttttgtgattaagaaacatgagcttctgaattcaacacgtgaagatttacagcttgataagccagcttcaggagtaaaggaagaatggtatgccagaatcactaaattaagaaagatggtggatcagcttttctgcaaaaaatttgcggaagccttggggagcactgaagccaaggctgtaccgtaccaaaaatttgaggcacacccgaatgatctgtacgtggaaggactgccagaaaacattcctttccgaagtccctcatggtatggaatcccaaggctggaaaaaatcattcaagtgggcaatcgaattaaatttgttattaaaagaccagaacttctgactcacagtaccactgaagttactcagccaagaacgaatacaccagtcaaagaagattggaatgtcagaattaccaagctacggaagcaagtggaagagatttttaatttgaaatttgctcaagctcttggactcaccgaggcagtaaaagtaccatatcctgtgtttgaatcaaacccggagttcttgtatgtggaaggcttgccagaggggattcccttccgaagccctacctggtttggaattccacgacttgaaaggatcgtccgcgggagtaataaaatcaagttcgttgttaaaaaacctgaactagttatttcctacttgcctcctgggatggctagtaaaataaacactaaagctttgcagtcccccaaaagaccacgaagtcctgggagtaattcaaaggttcctgaaattgaggtcaccgtggaaggccctaataacaacaatcctcaaacctcagctgttcgaaccccgacccagactaacggttctaacgttcccttcaagccacgagggagagagttttcctttgaggcctggaatgccaaaatcacggacctaaaacagaaagttgaaaatctcttcaatgagaaatgtggggaagctcttggccttaaacaagctgtgaaggtgccgttcgcgttatttgagtctttcccggaagacttttatgtggaaggcttacctgagggtgtgccattccgaagaccatcgacttttggcattccgaggctggagaagatactcagaaacaaagccaaaattaagttcatcattaaaaagcccgaaatgtttgagacggcgattaaggagagcacctcctctaagagccctcccagaaaaataaattcatcacccaatgttaatactactgcatcaggtgttgaagaccttaacatcattcaggtgacaattccagatgatgataatgaaagactctcgaaagttgaaaaagctagacagctaagagaacaagtgaatgacctctttagtcggaaatttggtgaagctattggtatgggttttcctgtgaaagttccctacaggaaaatcacaattaaccctggctgtgtggtggttgatggcatgcccccgggggtgtccttcaaagcccccagctacctggaaatcagctccatgagaaggatcttagactctgccgagtttatcaaattcacggtcattagaccatttccaggacttgtgattaataaccagctggttgatcagagtgagtcagaaggccccgtgatacaagaatcagctgaaccaagccagttggaagttccagccacagaagaaataaaagagactgatggaagctctcagatcaagcaagaaccagaccccacgtggtagacctcttccctcctagggtaaatcagcttctgtgtcagggatgctgtgtggtgtccatctgaaccccctgcatacgcgtagctaatgtgatctccccactttcacataagatggtggccctgccttcagggaatgtgggagccaggtgggagccttcccggatatttaagctagaagattctacagggagattctccttggatcaatatatgtctctcagtcaaagatgtaaaagcacttttgccttaaaaagaatgttctgtttctaaatagagtcaacgttgtcctcctcattggaattcactatgagtcagaatcattagactgacttttttttttccatagtaatagtattttgcagagtctcacagagctgcagatcttttgttcatcttgcagagttaacaagtctgatcctgttagtccagatttcttaaatttggccaagttataataggagcagtagcttgagacccgaagtcaggaaactttgacaatggatttttttttttaatccagagacttgtactggaatttgccttaccctgtcagctcatggacttaaggtttcatcccgctttatgagtgcttctgaatccaagtcattgttacctgaatttgcaaattaagttgtgatattcgtgactgttaaattcctgtaattagattaacctctttgcttgcttgtttgttttctctcctattttagcttaaagtatcagtggttgagaagagcttttcggacctgttactaccccaagctgtgtaatatacttgtataacagaaataccttctatacaaacctttttttctacttttagatagaaatgtctactttttcagcagttctgtgaattaaagagcagagtgactgtgggtctggaatggctggtgtacttgggaatgtactatcaggattttacagcaatgctgggaaatgacagggaaaatgacaggaatgaatctcaccagattttttatgtactcagcagagccttgagttacggtgtttattttccaatcaagtgaagatatctcctacttctcctactggaacatctcagcttctgcagtgaagaaaaattcctgtgatagttcagttctttagtttttctatttgaaaaaaaaaaatcatttaaatgatcctttgttcacggctctccttaatgactgagtgaacagttcctatctgtatatttgactaaaccttttcctaagctatctctcatggttcctatgtttttttatcataattaaaagcaaaaccatctggatcacctaacagtcagaggtcagtatctcagcgtgtgaattatagaggaaatacagagagaacctcttccacttttacttttcgtccaaataaaatgcatggtgtaccagaagttgaagatcgggttgaggattggggctagctcgatgacactaaggccccaacatcgcgggacctgctgtggcgcggattcttaggaacgctgttctagccggccccctctccaggggtcgccgtggccggcattatttcctagttcttcttgtaaccctgaggtgccagcgcggggagtgaggaggggtcagggggctaaggatgcaacctctgacgttctgcgccttcctaggagagtcttacatgtgttgagatttcacaagcaatgcgagttgtaaaataccagctctacaagaagctaggctctgtgacggcatagttttcagtagctttatcacaatattcacaatggagaattatatgacatggtagcagaaataggcccttttatgtgttgcttctattttacctcaaattgtagatatagggtaatcaataaaatccatccatgcctttcacacactaagt

SEQ ID NO: 5253 - protein, 998 aa, Homo sapiens; identical to SEQ ID NO: 468

SEQ ID NO: 5254 - DNA, 4067 bp, Homo sapiens
gggtcttgttctgtctcccaagctggagtgcagtggtgtggtcataggtcactgcagcgtcgaactcctaggctcaagtgatcctcttgcctcaggctcctgagtagctgggacaacaggcgtgtaccacacctggatactttttaaatttttggtagagaagggatctcactctattgccaagctggtgtcgaactcttggtcttaagcagccctcccacgtcagcatcccaaagtgttgggatttcagagggatcatggcccaagttgcaatgtccaccctccccgttgaagatgaggagtcctcggagagcaggatggtggtgacattcctcatgtcagctctcgagtccatgtgtaaagaactggccaagtccaaagccgaagtggcctgcattgcagtgtatgaaacagacgtgtttgtcgtcggaactgaaagaggacgtgcttttgtcaataccagaaaggattttcaaaaagattttgtaaaatattgtgttgaagaagaagaaaaagctgcagagatgcataaaatgaaatctacaacccaggcaaatcggatgagtgtagatgctgtagaaattgaaacactcagaaaaacagttgaggactatttctgcttttgctatgggaaagctttaggcaaatccacagtggtacctgtaccatatgagaagatgctgcgagaccagtcggctgtggtagtgcaggggcttccggaaggtgttgcctttaaacaccccgagaactatgatcttgcaaccctgaaatggattttggagaacaaagcagggatttcattcatcattaagagaccttttttagagccaaagaagcatgtaggtggtcgtgtgatggtaacagatgctgacaggtcaatactatctccaggtggaagttgtggccccatcaaagtgaaaactgaacccacagaagattctggcatttccctggaaatggcagctgtgacagtaaaggaagaatcagaagatcctgattattatcaatataacattcaaggaagccaccattcttcagagggcaatgaaggcacagaaatggaagtaccagcagaagatgatgattattctccaccgtctaagagaccaaaggccaatgagctaccgcagccaccagtcccggaacccgccaatgctgggaagcggaaagtgagggagttcaacttcgagaaatggaatgctcgcatcactgatctacgtaaacaagttgaagaattgtttgaaaggaaatatgctcaagccataaaagccaaaggtccggtgacgatcccgtaccctcttttccagtctcatgttgaagatctttatgtagaaggacttcctgaaggaattccttttagaaggccatctacttacggaattcctcgcctggagaggatattacttgcaaaggaaaggattcgttttgtgattaagaaacatgagcttctgaattcaacacgtgaagatttacagcttgataagccagcttcaggagtaaaggaagaatggtatgccagaatcactaaattaagaaagatggtggatcagcttttctgcaaaaaatttgcggaagccttggggagcactgaagccaaggctgtaccgtaccaaaaatttgaggcacacccgaatgatctgtacgtggaaggactgccagaaaacattcctttccgaagtccctcatggtatggaatcccaaggctggaaaaaatcattcaagtgggcaatcgaattaaatttgttattaaaagaccagaacttctgactcacagtaccactgaagttactcagccaagaacgaatacaccagtcaaagaagattggaatgtcagaattaccaagctacggaagcaagtggaagagatttttaatttgaaatttgctcaagctcttggactcaccgaggcagtaaaagtaccatatcctgtgtttgaatcaaacccggagttcttgtatgtggaaggcttgccagaggggattcccttccgaagccctacctggtttggaattccacgacttgaaaggatcgtccgcgggagtaataaaatcaagttcgttgttaaaaaacctgaactagttatttcctacttgcctcctgggatggctagtaaaataaacactaaagctttgcagtcccccaaaagaccacgaagtcctgggagtaattcaaaggttcctgaaattgaggtcaccgtggaaggccctaataacaacaatcctcaaacctcagctgttcgaaccccgacccagactaacggttctaacgttcccttcaagccacgagggagagagttttcctttgaggcctggaatgccaaaatcacggacctaaaacagaaagttgaaaatctcttcaatgagaaatgtggggaagctcttggccttaaacaagctgtgaaggtgccgttcgcgttatttgagtctttcccggaagacttttatgtggaaggcttacctgagggtgtgccattccgaagaccatcgacttttggcattccgaggctggagaagatactcagaaacaaagccaaaattaagttcatcattaaaaagcccgaaatgtttgagacggcgattaaggagagcacctcctctaagagccctcccagaaaaataaattcatcacccaatgttaatactactgcatcaggtgttgaagaccttaacatcattcaggtgacaattccagatgatgataatgaaagactctcgaaagttgaaaaagctagacagctaagagaacaagtgaatgacctctttagtcggaaatttggtgaagctattggtatgggttttcctgtgaaagttccctacaggaaaatcacaattaaccctggctgtgtggtggttgatggcatgcccccgggggtgtccttcaaagcccccagctacctggaaatcagctccatgagaaggatcttagactctgccgagtttatcaaattcacggtcattagaccatttccaggacttgtgattaataaccagctggttgatcagagtgagtcagaaggccccgtgatacaagaatcagctgaaccaagccagttggaagttccagccacagaagaaataaaagagactgatggaagctctcagatcaagcaagaaccagaccccacgtggtagacctcttccctcctaggcttaaagtatcagtggttgagaagagcttttcggacctgttactaccccaagctgtagccttgagttacggtgtttattttccaatcaagtgaagatatctcctacttctcctactggaacatctcagcttctgcagtgaagaaaaattcctgtgatagttcagttctttagtttttctatttgaaaaaaaaaaatcatttaaatgatcctttgttcacggctctccttaatgactgagtgaacagttcctatctgtatatttgactaaaccttttcctaagctatctctcatggttcctatgtttttttatcataattaaaagcaaaaccatctggatcacctaacagtcagaggtcagtatctcagcgtgtgaattatagaggaaatacagagagaacctcttccacttttacttttcgtccaaataaaatgcatggtgtaccagaagttgaagatcgggttgaggattggggctagctcgatgacactaaggccccaacatcgcgggacctgctgtggcgcggattcttaggaacgctgttctagccggccccctctccaggggtcgccgtggccggcattatttcctagttcttcttgtaaccctgaggtgccagcgcggggagtgaggaggggtcagggggctaaggatgcaacctctgacgttctgcgccttcctaggagagtcttacatgtgttgagatttcacaagcaatgcgagttgtaaaataccagctctacaagaagctaggctctgtgacggcatagttttcagtagctttatcacaatattcacaatggagaattatatgacatggtagcagaaataggcccttttatgtgttgcttctattttacctcaaattgtagatatagggtaatcaataaaatccatccatgcctttcacacactaagt

SEQ ID NO: 5255 - protein, 957 aa, Homo sapiens; identical to SEQ ID NO: 4303

SEQ ID NO: 5256 - DNA, 4302 bp, Homo sapiens
gggtcttgttctgtctcccaagctggagtgcagtggtgtggtcataggtcactgcagcgtcgaactcctaggctcaagtgatcctcttgcctcaggctcctgagtagctgggacaacaggcgtgtaccacacctggatactttttaaatttttggtagagaagggatctcactctattgccaagctggtgtcgaactcttggtcttaagcagccctcccacgtcagcatcccaaagtgttgggatttcagagggatcatggcccaagttgcaatgtccaccctccccgttgaagatgaggagtcctcggagagcaggatggtggtgacattcctcatgtcagctctcgagtccatgtgtaaagaactggccaagtccaaagccgaagtggcctgcattgcagtgtatgaaacagacgtgtttgtcgtcggaactgaaagaggacgtgcttttgtcaataccagaaaggattttcaaaaagattttgtaaaatattgtgttgaagaagaagaaaaagctgcagagatgcataaaatgaaatctacaacccaggcaaatcggatgagtgtagatgctgtagaaattgaaacactcagaaaaacagttgaggactatttctgcttttgctatgggaaagctttaggcaaatccacagtggtacctgtaccatatgagaagatgctgcgagaccagtcggctgtggtagtgcaggggcttccggaaggtgttgcctttaaacaccccgagaactatgatcttgcaaccctgaaatggattttggagaacaaagcagggatttcattcatcattaagagaccttttttagagccaaagaagcatgtaggtggtcgtgtgatggtaacagatgctgacaggtcaatactatctccaggtggaagttgtggccccatcaaagtgaaaactgaacccacagaagattctggcatttccctggaaatggcagctgtgacagtaaaggaagaatcagaagatcctgattattatcaatataacattcaagcaggcccttctgaaactgatgatgttgatgaaaaacagcccctatcgaagcctttgcaaggaagccaccattcttcagagggcaatgaaggcacagaaatggaagtaccagcagaagattctactcaacatgtcccttcagaaacaagtgaggaccctgaagttgaggtgactattgaagatgatgattattctccaccgtctaagagaccaaaggccaatgagctaccgcagccaccagtcccggaacccgccaatgctgggaagcggaaagtgagggagttcaacttcgagaaatggaatgctcgcatcactgatctacgtaaacaagttgaagaattgtttgaaaggaaatatgctcaagccataaaagccaaaggtccggtgacgatcccgtaccctcttttccagtctcatgttgaagatctttatgtagaaggacttcctgaaggaattccttttagaaggccatctacttacggaattcctcgcctggagaggatattacttgcaaaggaaaggattcgttttgtgattaagaaacatgagcttctgaattcaacacgtgaagatttacagcttgataagccagcttcaggagtaaaggaagaatggtatgccagaatcactaaattaagaaagatggtggatcagcttttctgcaaaaaatttgcggaagccttggggagcactgaagccaaggctgtaccgtaccaaaaatttgaggcacacccgaatgatctgtacgtggaaggactgccagaaaacattcctttccgaagtccctcatggtatggaatcccaaggctggaaaaaatcattcaagtgggcaatcgaattaaatttgttattaaaagaccagaacttctgactcacagtaccactgaagttactcagccaagaacgaatacaccagtcaaagaagattggaatgtcagaattaccaagctacggaagcaagtggaagagatttttaatttgaaatttgcttagatttgttgacagcggtttcctggagtgctgtcttgagaacgattctgaggaggctcagcaagaaagagtgtttcagttgattgggtgtgtctgtcatggagaaggaactcaagctcttggactcaccgaggcagtaaaagtaccatatcctgtgtttgaatcaaacccggagttcttgtatgtggaaggcttgccagaggggattcccttccgaagccctacctggtttggaattccacgacttgaaaggatcgtccgcgggagtaataaaatcaagttcgttgttaaaaaacctgaactagttatttcctacttgcctcctgggatggctagtaaaataaacactaaagctttgcagtcccccaaaagaccacgaagtcctgggagtaattcaaaggttcctgaaattgaggtcaccgtggaaggccctaataacaacaatcctcaaacctcagctgttcgaaccccgacccagactaacggttctaacgttcccttcaagccacgagggagagagttttcctttgaggcctggaatgccaaaatcacggacctaaaacagaaagttgaaaatctcttcaatgagaaatgtggggaagctcttggccttaaacaagctgtgaaggtgccgttcgcgttatttgagtctttcccggaagacttttatgtggaaggcttacctgagggtgtgccattccgaagaccatcgacttttggcattccgaggctggagaagatactcagaaacaaagccaaaattaagttcatcattaaaaagcccgaaatgtttgagacggcgattaaggagagcacctcctctaagagccctcccagaaaaataaattcatcacccaatgttaatactactgcatcaggtgttgaagaccttaacatcattcaggtgacaattccagatgatgataatgaaagactctcgaaagttgaaaaagctagacagctaagagaacaagtgaatgacctctttagtcggaaatttggtgaagctattggtatgggttttcctgtgaaagttccctacaggaaaatcacaattaaccctggctgtgtggtggttgatggcatgcccccgggggtgtccttcaaagcccccagctacctggaaatcagctccatgagaaggatcttagactctgccgagtttatcaaattcacggtcattagaccatttccaggacttgtgattaataaccagctggttgatcagagtgagtcagaaggccccgtgatacaagaatcagctgaaccaagccagttggaagttccagccacagaagaaataaaagagactgatggaagctctcagatcaagcaagaaccagaccccacgtggtagacctcttccctcctaggcttaaagtatcagtggttgagaagagcttttcggacctgttactaccccaagctgtagccttgagttacggtgtttattttccaatcaagtgaagatatctcctacttctcctactggaacatctcagcttctgcagtgaagaaaaattcctgtgatagttcagttctttagtttttctatttgaaaaaaaaaaatcatttaaatgatcctttgttcacggctctccttaatgactgagtgaacagttcctatctgtatatttgactaaaccttttcctaagctatctctcatggttcctatgtttttttatcataattaaaagcaaaaccatctggatcacctaacagtcagaggtcagtatctcagcgtgtgaattatagaggaaatacagagagaacctcttccacttttacttttcgtccaaataaaatgcatggtgtaccagaagttgaagatcgggttgaggattggggctagctcgatgacactaaggccccaacatcgcgggacctgctgtggcgcggattcttaggaacgctgttctagccggccccctctccaggggtcgccgtggccggcattatttcctagttcttcttgtaaccctgaggtgccagcgcggggagtgaggaggggtcagggggctaaggatgcaacctctgacgttctgcgccttcctaggagagtcttacatgtgttgagatttcacaagcaatgcgagttgtaaaataccagctctacaagaagctaggctctgtgacggcatagttttcagtagctttatcacaatattcacaatggagaattatatgacatggtagcagaaataggcccttttatgtgttgcttctattttacctcaaattgtagatatagggtaatcaataaaatccatccatgcctttcacacactaagt

SEQ ID NO: 5257 - protein, 584 aa, Homo sapiens; identical to SEQ ID NO: 4053

SEQ ID NO: 5258 - DNA, 4000 bp, Homo sapiens
gggtcttgttctgtctcccaagctggagtgcagtggtgtggtcataggtcactgcagcgtcgaactcctaggctcaagtgatcctcttgcctcaggctcctgagtagctgggacaacaggcgtgtaccacacctggatactttttaaatttttggtagagaagggatctcactctattgccaagctggtgtcgaactcttggtcttaagcagccctcccacgtcagcatcccaaagtgttgggatttcagagggatcatggcccaagttgcaatgtccaccctccccgttgaagatgaggagtcctcggagagcaggatggtggtgacattcctcatgtcagctctcgagtccatgtgtaaagaactggccaagtccaaagccgaagtggcctgcattgcagtgtatgaaacagacgtgtttgtcgtcggaactgaaagaggacgtgcttttgtcaataccagaaaggattttcaaaaagattttgtaaaatattgtgttgaagaagaagaaaaagctgcagagatgcataaaatgaaatctacaacccaggcaaatcggatgagtgtagatgctgtagaaattgaaacactcagaaaaacagttgaggactatttctgcttttgctatgggaaagctttaggcaaatccacagtggtacctgtaccatatgagaagatgctgcgagaccagtcggctgtggtagtgcaggggcttccggaaggtgttgcctttaaacaccccgagaactatgatcttgcaaccctgaaatggattttggagaacaaagcagggatttcattcatcattaagagaccttttttagagccaaagaagcatgtaggtggtcgtgtgatggtaacagatgctgacaggtcaatactatctccaggtggaagttgtggccccatcaaagtgaaaactgaacccacagaagattctggcatttccctggaaatggcagctgtgacagtaaaggaagaatcagaagatcctgattattatcaatataacattcaaggaagccaccattcttcagagggcaatgaaggcacagaaatggaagtaccagcagaagatgatgattattctccaccgtctaagagaccaaaggccaatgagctaccgcagccaccagtcccggaacccgccaatgctgggaagcggaaagtgagggagttcaacttcgagaaatggaatgctcgcatcactgatctacgtaaacaagttgaagaattgtttgaaaggaaatatgctcaagccataaaagccaaaggtccggtgacgatcccgtaccctcttttccagtctcatgttgaagatctttatgtagaaggacttcctgaaggaattccttttagaaggccatctacttacggaattcctcgcctggagaggatattacttgcaaaggaaaggattcgttttgtgattaagaaacatgagcttctgaattcaacacgtgaagatttacagcttgataagccagcttcaggagtaaaggaagaatggtatgccagaatcactaaattaagaaagatggtggatcagcttttctgcaaaaaatttgcggaagccttggggagcactgaagccaaggctgtaccgtaccaaaaatttgaggcacacccgaatgatctgtacgtggaaggactgccagaaaacattcctttccgaagtccctcatggtatggaatcccaaggctggaaaaaatcattcaagtgggcaatcgaattaaatttgttattaaaagaccagaacttctgactcacagtaccactgaagttactcagccaagaacgaatacaccagtcaaagaagattggaatgtcagaattaccaagctacggaagcaagtggaagagatttttaatttgaaatttgctcaagctcttggactcaccgaggcagtaaaagtaccatatcctgtgtttgaatcaaacccggagttcttgaaaggatcgtccgcgggagtaataaaatcaagttcgttgttaaaaaacctgaactagttatttcctacttgcctcctgggatggctagtaaaataaacactaaagctttgcagtcccccaaaagaccacgaagtcctgggagtaattcaaaggttcctgaaattgaggtcaccgtggaaggccctaataacaacaatcctcaaacctcagctgttcgaaccccgacccagactaacggttctaacgttcccttcaagccacgagggagagagttttcctttgaggcctggaatgccaaaatcacggacctaaaacagaaagttgaaaatctcttcaatgagaaatgtggggaagctcttggccttaaacaagctgtgaaggtgccgttcgcgttatttgagtctttcccggaagacttttatgtggaaggcttacctgagggtgtgccattccgaagaccatcgacttttggcattccgaggctggagaagatactcagaaacaaagccaaaattaagttcatcattaaaaagcccgaaatgtttgagacggcgattaaggagagcacctcctctaagagccctcccagaaaaataaattcatcacccaatgttaatactactgcatcaggtgttgaagaccttaacatcattcaggtgacaattccagatgatgataatgaaagactctcgaaagttgaaaaagctagacagctaagagaacaagtgaatgacctctttagtcggaaatttggtgaagctattggtatgggttttcctgtgaaagttccctacaggaaaatcacaattaaccctggctgtgtggtggttgatggcatgcccccgggggtgtccttcaaagcccccagctacctggaaatcagctccatgagaaggatcttagactctgccgagtttatcaaattcacggtcattagaccatttccaggacttgtgattaataaccagctggttgatcagagtgagtcagaaggccccgtgatacaagaatcagctgaaccaagccagttggaagttccagccacagaagaaataaaagagactgatggaagctctcagatcaagcaagaaccagaccccacgtggtagacctcttccctcctaggcttaaagtatcagtggttgagaagagcttttcggacctgttactaccccaagctgtagccttgagttacggtgtttattttccaatcaagtgaagatatctcctacttctcctactggaacatctcagcttctgcagtgaagaaaaattcctgtgatagttcagttctttagtttttctatttgaaaaaaaaaaatcatttaaatgatcctttgttcacggctctccttaatgactgagtgaacagttcctatctgtatatttgactaaaccttttcctaagctatctctcatggttcctatgtttttttatcataattaaaagcaaaaccatctggatcacctaacagtcagaggtcagtatctcagcgtgtgaattatagaggaaatacagagagaacctcttccacttttacttttcgtccaaataaaatgcatggtgtaccagaagttgaagatcgggttgaggattggggctagctcgatgacactaaggccccaacatcgcgggacctgctgtggcgcggattcttaggaacgctgttctagccggccccctctccaggggtcgccgtggccggcattatttcctagttcttcttgtaaccctgaggtgccagcgcggggagtgaggaggggtcagggggctaaggatgcaacctctgacgttctgcgccttcctaggagagtcttacatgtgttgagatttcacaagcaatgcgagttgtaaaataccagctctacaagaagctaggctctgtgacggcatagttttcagtagctttatcacaatattcacaatggagaattatatgacatggtagcagaaataggcccttttatgtgttgcttctattttacctcaaattgtagatatagggtaatcaataaaatccatccatgcctttcacacactaagt

SEQ ID NO: 5259 - protein, 584 aa, Homo sapiens; identical to SEQ ID NO: 4173

SEQ ID NO: 5260 - DNA, 4999 bp, Homo sapiens
gggtcttgttctgtctcccaagctggagtgcagtggtgtggtcataggtcactgcagcgtcgaactcctaggctcaagtgatcctcttgcctcaggctcctgagtagctgggacaacaggcgtgtaccacacctggatactttttaaatttttggtagagaagggatctcactctattgccaagctggtgtcgaactcttggtcttaagcagccctcccacgtcagcatcccaaagtgttgggatttcagagggatcatggcccaagttgcaatgtccaccctccccgttgaagatgaggagtcctcggagagcaggatggtggtgacattcctcatgtcagctctcgagtccatgtgtaaagaactggccaagtccaaagccgaagtggcctgcattgcagtgtatgaaacagacgtgtttgtcgtcggaactgaaagaggacgtgcttttgtcaataccagaaaggattttcaaaaagattttgtaaaatattgtgttgaagaagaagaaaaagctgcagagatgcataaaatgaaatctacaacccaggcaaatcggatgagtgtagatgctgtagaaattgaaacactcagaaaaacagttgaggactatttctgcttttgctatgggaaagctttaggcaaatccacagtggtacctgtaccatatgagaagatgctgcgagaccagtcggctgtggtagtgcaggggcttccggaaggtgttgcctttaaacaccccgagaactatgatcttgcaaccctgaaatggattttggagaacaaagcagggatttcattcatcattaagagaccttttttagagccaaagaagcatgtaggtggtcgtgtgatggtaacagatgctgacaggtcaatactatctccaggtggaagttgtggccccatcaaagtgaaaactgaacccacagaagattctggcatttccctggaaatggcagctgtgacagtaaaggaagaatcagaagatcctgattattatcaatataacattcaaggaagccaccattcttcagagggcaatgaaggcacagaaatggaagtaccagcagaagattctactcaacatgtcccttcagaaacaagtgaggaccctgaagttgaggtgactattgaagatgatgattattctccaccgtctaagagaccaaaggccaatgagctaccgcagccaccagtcccggaacccgccaatgctgggaagcggaaagtgagggagttcaacttcgagaaatggaatgctcgcatcactgatctacgtaaacaagttgaagaattgtttgaaaggaaatatgctcaagccataaaagccaaaggtccggtgacgatcccgtaccctcttttccagtctcatgttgaagatctttatgtagaaggacttcctgaaggaattccttttagaaggccatctacttacggaattcctcgcctggagaggatattacttgcaaaggaaaggattcgttttgtgattaagaaacatgagcttctgaattcaacacgtgaagatttacagcttgataagccagcttcaggagtaaaggaagaatggtatgccagaatcactaaattaagaaagatggtggatcagcttttctgcaaaaaatttgcggaagccttggggagcactgaagccaaggctgtaccgtaccaaaaatttgaggcacacccgaatgatctgtacgtggaaggactgccagaaaacattcctttccgaagtccctcatggtatggaatcccaaggctggaaaaaatcattcaagtgggcaatcgaattaaatttgttattaaaagaccagaacttctgactcacagtaccactgaagttactcagccaagaacgaatacaccagtcaaagaagattggaatgtcagaattaccaagctacggaagcaagtggaagagatttttaatttgaaatttgctcaagctcttggactcaccgaggcagtaaaagtaccatatcctgtgtttgaatcaaacccggagttcttgtatgtggaaggcttgccagaggggattcccttccgaagccctacctggtttggaattccacgacttgaaaggatcgtccgcgggagtaataaaatcaagttcgttgttaaaaaacctgaactagttatttcctacttgcctcctgggatggctagtaaaataaacactaaagctttgcagtcccccaaaagaccacgaagtcctgggagtaattcaaaggttcctgaaattgaggtcaccgtggaaggccctaataacaacaatcctcaaacctcagctgttcgaaccccgacccagactaacggttctaacgttcccttcaagccacgagggagagagttttcctttgaggcctggaatgccaaaatcacggacctaaaacagaaagttgaaaatctcttcaatgagaaatgtggggaagctcttggccttaaacaagctgtgaaggtgccgttcgcgttatttgagtctttcccggaagacttttatgtggaaggcttacctgagggtgtgccattccgaagaccatcgacttttggcattccgaggctggagaagatactcagaaacaaagccaaaattaagttcatcattaaaaagcccgaaatgtttgagacggcgattaaggagagcacctcctctaagagccctcccagaaaaataaattcatcacccaatgttaatactactgcatcaggtgttgaagaccttaacatcattcaggtgacaattccagatgatgataatgaaagactctcgaaagttgaaaaagctagacagctaagagaacaagtgaatgacctctttagtcggaaatttggtgaagctattggtatgggttttcctgtgaaagttccctacaggaaaatcacaattaaccctggctgtgtggtggttgatggcatgcccccgggggtgtccttcaaagcccccagctacctggaaatcagctccatgagaaggatcttagactctgccgagtttatcaaattcacggtcattagaccatttccaggacttgtgattaataaccagctggttgatcagagtgagtcagaaggccccgtgatacaagaatcagctgaaccaagccagttggaagttccagccacagaaggtaaaaggacctcttccctcctagggtaaatcagcttctgtgtcagggatgctgtgtggtgtccatctgaaccccctgcatacgcgtagctaatgtgatctccccactttcacataagatggtggccctgccttcagggaatgtgggagccaggtgggagccttcccggatatttaagctagaagattctacagggagattctccttggatcaatatatgtctctcagtcaaagatgtaaaagcacttttgccttaaaaagaatgttctgtttctaaatagagtcaacgttgtcctcctcattggaattcactatgagtcagaatcattagactgacttttttttttccatagtaatagtattttgcagagtctcacagagctgcagatcttttgttcatcttgcagagttaacaagtctgatcctgttagtccagatttcttaaatttggccaagttataataggagcagtagcttgagacccgaagtcaggaaactttgacaatggatttttttttttaatccagagacttgtactggaatttgccttaccctgtcagctcatggacttaaggtttcatcccgctttatgagtgcttctgaatccaagtcattgttacctgaatttgcaaattaagttgtgatattcgtgactgttaaattcctgtaattagattaacctctttgcttgcttgtttgttttctctcctattttagcttaaagtatcagtggttgagaagagcttttcggacctgttactaccccaagctgtgtaatatacttgtataacagaaataccttctatacaaacctttttttctacttttagatagaaatgtctactttttcagcagttctgtgaattaaagagcagagtgactgtgggtctggaatggctggtgtacttgggaatgtactatcaggattttacagcaatgctgggaaatgacagggaaaatgacaggaatgaatctcaccagattttttatgtactcagcagagccttgagttacggtgtttattttccaatcaagtgaagatatctcctacttctcctactggaacatctcagcttctgcagtgaagaaaaattcctgtgatagttcagttctttagtttttctatttgaaaaaaaaaaatcatttaaatgatcctttgttcacggctctccttaatgactgagtgaacagttcctatctgtatatttgactaaaccttttcctaagctatctctcatggttcctatgtttttttatcataattaaaagcaaaaccatctggatcacctaacagtcagaggtcagtatctcagcgtgtgaattatagaggaaatacagagagaacctcttccacttttacttttcgtccaaataaaatgcatggtgtaccagaagttgaagatcgggttgaggattggggctagctcgatgacactaaggccccaacatcgcgggacctgctgtggcgcggattcttaggaacgctgttctagccggccccctctccaggggtcgccgtggccggcattatttcctagttcttcttgtaaccctgaggtgccagcgcggggagtgaggaggggtcagggggctaaggatgcaacctctgacgttctgcgccttcctaggagagtcttacatgtgttgagatttcacaagcaatgcgagttgtaaaataccagctctacaagaagctaggctctgtgacggcatagttttcagtagctttatcacaatattcacaatggagaattatatgacatggtagcagaaataggcccttttatgtgttgcttctattttacctcaaattgtagatatagggtaatcaataaaatccatccatgcctttcacacactaagt

SEQ ID NO: 5261 - protein, 968 aa, Homo sapiens; identical to SEQ ID NO: 4759

SEQ ID NO: 5262 - DNA, 5047 bp, Homo sapiens
gggtcttgttctgtctcccaagctggagtgcagtggtgtggtcataggtcactgcagcgtcgaactcctaggctcaagtgatcctcttgcctcaggctcctgagtagctgggacaacaggcgtgtaccacacctggatactttttaaatttttggtagagaagggatctcactctattgccaagctggtgtcgaactcttggtcttaagcagccctcccacgtcagcatcccaaagtgttgggatttcagagggatcatggcccaagttgcaatgtccaccctccccgttgaagatgaggagtcctcggagagcaggatggtggtgacattcctcatgtcagctctcgagtccatgtgtaaagaactggccaagtccaaagccgaagtggcctgcattgcagtgtatgaaacagacgtgtttgtcgtcggaactgaaagaggacgtgcttttgtcaataccagaaaggattttcaaaaagattttgtaaaatattgtgttgaagaagaagaaaaagctgcagagatgcataaaatgaaatctacaacccaggcaaatcggatgagtgtagatgctgtagaaattgaaacactcagaaaaacagttgaggactatttctgcttttgctatgggaaagctttaggcaaatccacagtggtacctgtaccatatgagaagatgctgcgagaccagtcggctgtggtagtgcaggggcttccggaaggtgttgcctttaaacaccccgagaactatgatcttgcaaccctgaaatggattttggagaacaaagcagggatttcattcatcattaagagaccttttttagagccaaagaagcatgtaggtggtcgtgtgatggtaacagatgctgacaggtcaatactatctccaggtggaagttgtggccccatcaaagtgaaaactgaacccacagaagattctggcatttccctggaaatggcagctgtgacagtaaaggaagaatcagaagatcctgattattatcaatataacattcaagcaggcccttctgaaactgatgatgttgatgaaaaacagcccctatcgaagcctttgcaaggaagccaccattcttcagagggcaatgaaggcacagaaatggaagtaccagcagaagatgatgattattctccaccgtctaagagaccaaaggccaatgagctaccgcagccaccagtcccggaacccgccaatgctgggaagcggaaagtgagggagttcaacttcgagaaatggaatgctcgcatcactgatctacgtaaacaagttgaagaattgtttgaaaggaaatatgctcaagccataaaagccaaaggtccggtgacgatcccgtaccctcttttccagtctcatgttgaagatctttatgtagaaggacttcctgaaggaattccttttagaaggccatctacttacggaattcctcgcctggagaggatattacttgcaaaggaaaggattcgttttgtgattaagaaacatgagcttctgaattcaacacgtgaagatttacagcttgataagccagcttcaggagtaaaggaagaatggtatgccagaatcactaaattaagaaagatggtggatcagcttttctgcaaaaaatttgcggaagccttggggagcactgaagccaaggctgtaccgtaccaaaaatttgaggcacacccgaatgatctgtacgtggaaggactgccagaaaacattcctttccgaagtccctcatggtatggaatcccaaggctggaaaaaatcattcaagtgggcaatcgaattaaatttgttattaaaagaccagaacttctgactcacagtaccactgaagttactcagccaagaacgaatacaccagtcaaagaagattggaatgtcagaattaccaagctacggaagcaagtggaagagatttttaatttgaaatttgctcaagctcttggactcaccgaggcagtaaaagtaccatatcctgtgtttgaatcaaacccggagttcttgtatgtggaaggcttgccagaggggattcccttccgaagccctacctggtttggaattccacgacttgaaaggatcgtccgcgggagtaataaaatcaagttcgttgttaaaaaacctgaactagttatttcctacttgcctcctgggatggctagtaaaataaacactaaagctttgcagtcccccaaaagaccacgaagtcctgggagtaattcaaaggttcctgaaattgaggtcaccgtggaaggccctaataacaacaatcctcaaacctcagctgttcgaaccccgacccagactaacggttctaacgttcccttcaagccacgagggagagagttttcctttgaggcctggaatgccaaaatcacggacctaaaacagaaagttgaaaatctcttcaatgagaaatgtggggaagctcttggccttaaacaagctgtgaaggtgccgttcgcgttatttgagtctttcccggaagacttttatgtggaaggcttacctgagggtgtgccattccgaagaccatcgacttttggcattccgaggctggagaagatactcagaaacaaagccaaaattaagttcatcattaaaaagcccgaaatgtttgagacggcgattaaggagagcacctcctctaagagccctcccagaaaaataaattcatcacccaatgttaatactactgcatcaggtgttgaagaccttaacatcattcaggtgacaattccagatgatgataatgaaagactctcgaaagttgaaaaagctagacagctaagagaacaagtgaatgacctctttagtcggaaatttggtgaagctattggtatgggttttcctgtgaaagttccctacaggaaaatcacaattaaccctggctgtgtggtggttgatggcatgcccccgggggtgtccttcaaagcccccagctacctggaaatcagctccatgagaaggatcttagactctgccgagtttatcaaattcacggtcattagaccatttccaggacttgtgattaataaccagctggttgatcagagtgagtcagaaggccccgtgatacaagaatcagctgaaccaagccagttggaagttccagccacagaagaaataaaagagactgatggaagctctcagatcaagcaagaaccagaccccacgtggtagacctcttccctcctagggtaaatcagcttctgtgtcagggatgctgtgtggtgtccatctgaaccccctgcatacgcgtagctaatgtgatctccccactttcacataagatggtggccctgccttcagggaatgtgggagccaggtgggagccttcccggatatttaagctagaagattctacagggagattctccttggatcaatatatgtctctcagtcaaagatgtaaaagcacttttgccttaaaaagaatgttctgtttctaaatagagtcaacgttgtcctcctcattggaattcactatgagtcagaatcattagactgacttttttttttccatagtaatagtattttgcagagtctcacagagctgcagatcttttgttcatcttgcagagttaacaagtctgatcctgttagtccagatttcttaaatttggccaagttataataggagcagtagcttgagacccgaagtcaggaaactttgacaatggatttttttttttaatccagagacttgtactggaatttgccttaccctgtcagctcatggacttaaggtttcatcccgctttatgagtgcttctgaatccaagtcattgttacctgaatttgcaaattaagttgtgatattcgtgactgttaaattcctgtaattagattaacctctttgcttgcttgtttgttttctctcctattttagcttaaagtatcagtggttgagaagagcttttcggacctgttactaccccaagctgtgtaatatacttgtataacagaaataccttctatacaaacctttttttctacttttagatagaaatgtctactttttcagcagttctgtgaattaaagagcagagtgactgtgggtctggaatggctggtgtacttgggaatgtactatcaggattttacagcaatgctgggaaatgacagggaaaatgacaggaatgaatctcaccagattttttatgtactcagcagagccttgagttacggtgtttattttccaatcaagtgaagatatctcctacttctcctactggaacatctcagcttctgcagtgaagaaaaattcctgtgatagttcagttctttagtttttctatttgaaaaaaaaaaatcatttaaatgatcctttgttcacggctctccttaatgactgagtgaacagttcctatctgtatatttgactaaaccttttcctaagctatctctcatggttcctatgtttttttatcataattaaaagcaaaaccatctggatcacctaacagtcagaggtcagtatctcagcgtgtgaattatagaggaaatacagagagaacctcttccacttttacttttcgtccaaataaaatgcatggtgtaccagaagttgaagatcgggttgaggattggggctagctcgatgacactaaggccccaacatcgcgggacctgctgtggcgcggattcttaggaacgctgttctagccggccccctctccaggggtcgccgtggccggcattatttcctagttcttcttgtaaccctgaggtgccagcgcggggagtgaggaggggtcagggggctaaggatgcaacctctgacgttctgcgccttcctaggagagtcttacatgtgttgagatttcacaagcaatgcgagttgtaaaataccagctctacaagaagctaggctctgtgacggcatagttttcagtagctttatcacaatattcacaatggagaattatatgacatggtagcagaaataggcccttttatgtgttgcttctattttacctcaaattgtagatatagggtaatcaataaaatccatccatgcctttcacacactaagt

SEQ ID NO: 5263 - protein, 977 aa, Homo sapiens; identical to SEQ ID NO: 472

SEQ ID NO: 5264 - DNA, 3671 bp, Homo sapiens
gggtcttgttctgtctcccaagctggagtgcagtggtgtggtcataggtcactgcagcgtcgaactcctaggctcaagtgatcctcttgcctcaggctcctgagtagctgggacaacaggcgtgtaccacacctggatactttttaaatttttggtagagaagggatctcactctattgccaagctggtgtcgaactcttggtcttaagcagccctcccacgtcagcatcccaaagtgttgggatttcagagggatcatggcccaagttgcaatgtccaccctccccgttgaagatgaggagtcctcggagagcaggatggtggtgacattcctcatgtcagctctcgagtccatgtgtaaagaactggccaagtccaaagccgaagtggcctgcattgcagtgtatgaaacagacgtgtttgtcgtcggaactgaaagaggacgtgcttttgtcaataccagaaaggattttcaaaaagattttgtaaaatattgtgttgaagaagaagaaaaagctgcagagatgcataaaatgaaatctacaacccaggcaaatcggatgagtgtagatgctgtagaaattgaaacactcagaaaaacagttgaggactatttctgcttttgctatgggaaagctttaggcaaatccacagtggtacctgtaccatatgagaagatgctgcgagaccagtcggctgtggtagtgcaggggcttccggaaggtgttgcctttaaacaccccgagaactatgatcttgcaaccctgaaatggattttggagaacaaagcagggatttcattcatcattaagagaccttttttagagccaaagaagcatgtaggtggtcgtgtgatggtaacagatgctgacaggtcaatactatctccaggtggaagttgtggccccatcaaagtgaaaactgaacccacagaagattctggcatttccctggaaatggcagctgtgacagtaaaggaagaatcagaagatcctgattattatcaatataacattcaaggaagccaccattcttcagagggcaatgaaggcacagaaatggaagtaccagcagaagatgatgattattctccaccgtctaagagaccaaaggccaatgagctaccgcagccaccagtcccggaacccgccaatgctgggaagcggaaagtgagggagttcaacttcgagaaatggaatgctcgcatcactgatctacgtaaacaagttgaagaattgtttgaaaggaaatatgctcaagccataaaagccaaaggtccggtgacgatcccgtaccctcttttccagtctcatgttgaagatctttatgtagaaggacttcctgaaggaattccttttagaaggccatctacttacggaattcctcgcctggagaggatattacttgcaaaggaaaggattcgttttgtgattaagaaacatgagcttctgaattcaacacgtgaagatttacagcttgataagccagcttcaggagtaaaggaagaatggtatgccagaatcactaaattaagaaagatggtggatcagcttttctgcaaaaaatttgcggaagccttggggagcactgaagccaaggctgtaccgtaccaaaaatttgaggcacacccgaatgatctgtacgtggaaggactgccagaaaacattcctttccgaagtccctcatggtatggaatcccaaggctggaaaaaatcattcaagtgggcaatcgaattaaatttgttattaaaagaccagaacttctgactcacagtaccactgaagttactcagccaagaacgaatacaccagctcaagctcttggactcaccgaggcagtaaaagtaccatatcctgtgtttgaatcaaacccggagttcttgtatgtggaaggcttgccagaggggattcccttccgaagccctacctggtttggaattccacgacttgaaaggatcgtccgcgggagtaataaaatcaagttcgttgttaaaaaacctgaactagttatttcctacttgcctcctgggatggctagtaaaataaacactaaagctttgcagtcccccaaaagaccacgaagtcctgggagtaattcaaaggttcctgaaattgaggtcaccgtggaaggccctaataacaacaatcctcaaacctcagctgttcgaaccccgacccagactaacggttctaacgttcccttcaagccacgagggagagagttttcctttgaggcctggaatgccaaaatcacggacctaaaacagaaagttgaaaatctcttcaatgagaaatgtggggaagctcttggccttaaacaagctgtgaaggtgccgttcgcgttatttgagtctttcccggaagacttttatgtggaaggcttacctgagggtgtgccattccgaagaccatcgacttttggcattccgaggctggagaagatactcagaaacaaagccaaaattaagttcatcattaaaaagcccgaaatgtttgagacggcgattaaggagagcacctcctctaagagccctcccagaaaaataaattcatcacccaatgttaatactactgcatcaggtgttgaagaccttaacatcattcaggtgacaattccagatgatgataatgaaagactctcgaaagttgaaaaagctagacagctaagagaacaagtgaatgacctctttagtcggaaatttggtgaagctattggtatgggttttcctgtgaaagttccctacaggaaaatcacaattaaccctggctgtgtggtggttgatggcatgcccccgggggtgtccttcaaagcccccagctacctggaaatcagctccatgagaaggatcttagactctgccgagtttatcaaattcacggtcattagaccatttccaggacttgtgattaataaccagctggttgatcagagtgagtcagaaggccccgtgatacaagaatcagctgaaccaagccagttggaagttccagccacagaagaaataaaagagactgatggaagctctcagatcaagcaagaaccagaccccacgtggtagacctcttccctcctaggcaaaaccatctggatcacctaacagtcagaggtcagtatctcagcgtgtgaattatagaggaaatacagagagaacctcttccacttttacttttcgtccaaataaaatgcatggtgtaccagaagttgaagatcgggttgaggattggggctagctcgatgacactaaggccccaacatcgcgggacctgctgtggcgcggattcttaggaacgctgttctagccggccccctctccaggggtcgccgtggccggcattatttcctagttcttcttgtaaccctgaggtgccagcgcggggagtgaggaggggtcagggggctaaggatgcaacctctgacgttctgcgccttcctaggagagtcttacatgtgttgagatttcacaagcaatgcgagttgtaaaataccagctctacaagaagctaggctctgtgacggcatagttttcagtagctttatcacaatattcacaatggagaattatatgacatggtagcagaaataggcccttttatgtgttgcttctattttacctcaaattgtagatatagggtaatcaataaaatccatccatgcctttcacacactaagt

SEQ ID NO: 5265 - protein, 933 aa, Homo sapiens; identical to SEQ ID NO: 4067

SEQ ID NO: 5266 - DNA, 3736 bp, Homo sapiens
gggtcttgttctgtctcccaagctggagtgcagtggtgtggtcataggtcactgcagcgtcgaactcctaggctcaagtgatcctcttgcctcaggctcctgagtagctgggacaacaggcgtgtaccacacctggatactttttaaatttttggtagagaagggatctcactctattgccaagctggtgtcgaactcttggtcttaagcagccctcccacgtcagcatcccaaagtgttgggatttcagagggatcatggcccaagttgcaatgtccaccctccccgttgaagatgaggagtcctcggagagcaggatggtggtgacattcctcatgtcagctctcgagtccatgtgtaaagaactggccaagtccaaagccgaagtggcctgcattgcagtgtatgaaacagacgtgtttgtcgtcggaactgaaagaggacgtgcttttgtcaataccagaaaggattttcaaaaagattttgtaaaatattgtgttgaagaagaagaaaaagctgcagagatgcataaaatgaaatctacaacccaggcaaatcggatgagtgtagatgctgtagaaattgaaacactcagaaaaacagttgaggactatttctgcttttgctatgggaaagctttaggcaaatccacagtggtacctgtaccatatgagaagatgctgcgagaccagtcggctgtggtagtgcaggggcttccggaaggtgttgcctttaaacaccccgagaactatgatcttgcaaccctgaaatggattttggagaacaaagcagggatttcattcatcattaagagaccttttttagagccaaagaagcatgtaggtggtcgtgtgatggtaacagatgctgacaggtcaatactatctccaggtggaagttgtggccccatcaaagtgaaaactgaacccacagaagattctggcatttccctggaaatggcagctgtgacagtaaaggaagaatcagaagatcctgattattatcaatataacattcaagcaggcccttctgaaactgatgatgttgatgaaaaacagcccctatcgaagcctttgcaaggaagccaccattcttcagagggcaatgaaggcacagaaatggaagtaccagcagaagatgatgattattctccaccgtctaagagaccaaaggccaatgagctaccgcagccaccagtcccggaacccgccaatgctgggaagcggaaagtgagggagttcaacttcgagaaatggaatgctcgcatcactgatctacgtaaacaagttgaagaattgtttgaaaggaaatatgctcaagccataaaagccaaaggtccggtgacgatcccgtaccctcttttccagtctcatgttgaagatctttatgtagaaggacttcctgaaggaattccttttagaaggccatctacttacggaattcctcgcctggagaggatattacttgcaaaggaaaggattcgttttgtgattaagaaacatgagcttctgaattcaacacgtgaagatttacagcttgataagccagcttcaggagtaaaggaagaatggtatgccagaatcactaaattaagaaagatggtggatcagcttttctgcaaaaaatttgcggaagccttggggagcactgaagccaaggctgtaccgtaccaaaaatttgaggcacacccgaatgatctgtacgtggaaggactgccagaaaacattcctttccgaagtccctcatggtatggaatcccaaggctggaaaaaatcattcaagtgggcaatcgaattaaatttgttattaaaagaccagaacttctgactcacagtaccactgaagttactcagccaagaacgaatacaccagtcaaagaagattggaatgtcagaattaccaagctacggaagcaagtggaagagatttttaatttgaaatttgctcaagctcttggactcaccgaggcagtaaaagtaccatatcctgtgtttgaatcaaacccggagttcttgaaaggatcgtccgcgggagtaataaaatcaagttcgttgttaaaaaacctgaactagttatttcctacttgcctcctgggatggctagtaaaataaacactaaagctttgcagtcccccaaaagaccacgaagtcctgggagtaattcaaaggttcctgaaattgaggtcaccgtggaaggccctaataacaacaatcctcaaacctcagctgttcgaaccccgacccagactaacggttctaacgttcccttcaagccacgagggagagagttttcctttgaggcctggaatgccaaaatcacggacctaaaacagaaagttgaaaatctcttcaatgagaaatgtggggaagctcttggccttaaacaagctgtgaaggtgccgttcgcgttatttgagtctttcccggaagacttttatgtggaaggcttacctgagggtgtgccattccgaagaccatcgacttttggcattccgaggctggagaagatactcagaaacaaagccaaaattaagttcatcattaaaaagcccgaaatgtttgagacggcgattaaggagagcacctcctctaagagccctcccagaaaaataaattcatcacccaatgttaatactactgcatcaggtgttgaagaccttaacatcattcaggtgacaattccagatgatgataatgaaagactctcgaaagttgaaaaagctagacagctaagagaacaagtgaatgacctctttagtcggaaatttggtgaagctattggtatgggttttcctgtgaaagttccctacaggaaaatcacaattaaccctggctgtgtggtggttgatggcatgcccccgggggtgtccttcaaagcccccagctacctggaaatcagctccatgagaaggatcttagactctgccgagtttatcaaattcacggtcattagaccatttccaggacttgtgattaataaccagctggttgatcagagtgagtcagaaggccccgtgatacaagaatcagctgaaccaagccagttggaagttccagccacagaagaaataaaagagactgatggaagctctcagatcaagcaagaaccagaccccacgtggtagacctcttccctcctaggcaaaaccatctggatcacctaacagtcagaggtcagtatctcagcgtgtgaattatagaggaaatacagagagaacctcttccacttttacttttcgtccaaataaaatgcatggtgtaccagaagttgaagatcgggttgaggattggggctagctcgatgacactaaggccccaacatcgcgggacctgctgtggcgcggattcttaggaacgctgttctagccggccccctctccaggggtcgccgtggccggcattatttcctagttcttcttgtaaccctgaggtgccagcgcggggagtgaggaggggtcagggggctaaggatgcaacctctgacgttctgcgccttcctaggagagtcttacatgtgttgagatttcacaagcaatgcgagttgtaaaataccagctctacaagaagctaggctctgtgacggcatagttttcagtagctttatcacaatattcacaatggagaattatatgacatggtagcagaaataggcccttttatgtgttgcttctattttacctcaaattgtagatatagggtaatcaataaaatccatccatgcctttcacacactaagt

SEQ ID NO: 5267 - protein, 604 aa, Homo sapiens; identical to SEQ ID NO: 4117

SEQ ID NO: 5268 - DNA, 7845 bp, Homo sapiens
gggtcttgttctgtctcccaagctggagtgcagtggtgtggtcataggtcactgcagcgtcgaactcctaggctcaagtgatcctcttgcctcaggctcctgagtagctgggacaacaggcgtgtaccacacctggatactttttaaatttttggtagagaagggatctcactctattgccaagctggtgtcgaactcttggtcttaagcagccctcccacgtcagcatcccaaagtgttgggatttcagagggatcatggcccaagttgcaatgtccaccctccccgttgaagatgaggagtcctcggagagcaggatggtggtgacattcctcatgtcagctctcgagtccatgtgtaaagaactggccaagtccaaagccgaagtggcctgcattgcagtgtatgaaacagacgtgtttgtcgtcggaactgaaagaggacgtgcttttgtcaataccagaaaggattttcaaaaagattttgtaaaatattgtgttgaagaagaagaaaaagctgcagagatgcataaaatgaaatctacaacccaggcaaatcggatgagtgtagatgctgtagaaattgaaacactcagaaaaacagttgaggactatttctgcttttgctatgggaaagctttaggcaaatccacagtggtacctgtaccatatgagaagatgctgcgagaccagtcggctgtggtagtgcaggggcttccggaaggtgttgcctttaaacaccccgagaactatgatcttgcaaccctgaaatggattttggagaacaaagcagggatttcattcatcattaagagaccttttttagagccaaagaagcatgtaggtggtcgtgtgatggtaacagatgctgacaggtcaatactatctccaggtggaagttgtggccccatcaaagtgaaaactgaacccacagaagattctggaagccaccattcttcagagggcaatgaaggcacagaaatggaagtaccagcagaagattctactcaacatgtcccttcagaaacaagtgaggaccctgaagttgaggtgactattgaagatgatgattattctccaccgtctaagagaccaaaggccaatgagctaccgcagccaccagtcccggaacccgccaatgctgggaagcggaaagtgagggagttcaacttcgagaaatggaatgctcgcatcactgatctacgtaaacaagttgaagaattgtttgaaaggaaatatgctcaagccataaaagccaaaggtccggtgacgatcccgtaccctcttttccagtctcatgttgaagatctttatgtagaaggacttcctgaaggaattccttttagaaggccatctacttacggaattcctcgcctggagaggatattacttgcaaaggaaaggattcgttttgtgattaagaaacatgagcttctgaattcaacacgtgaagatttacagcttgataagccagcttcaggagtaaaggaagaatggtatgccagaatcactaaattaagaaagatggtggatcagcttttctgcaaaaaatttgcggaagccttggggagcactgaagccaaggctgtaccgtaccaaaaatttgaggcacacccgaatgatctgtacgtggaaggactgccagaaaacattcctttccgaagtccctcatggtatggaatcccaaggctggaaaaaatcattcaagtgggcaatcgaattaaatttgttattaaaagaccagaacttctgactcacagtaccactgaagttactcagccaagaacgaatacaccagtcaaagaagattggaatgtcagaattaccaagctacggaagcaagtggaagagatttttaatttgaaatttgcttagatttgttgacagcggtttcctggagtgctgtcttgagaacgattctgaggaggctcagcaagaaagagtgtttcagttgattgggtgtgtctgtcatggagaaggaactcaagctcttggactcaccgaggcagtaaaagtaccatatcctgtgtttgaatcaaacccggagttcttgtatgtggaaggcttgccagaggggattcccttccgaagccctacctggtttggaattccacgacttgaaaggatcgtccgcgggagtaataaaatcaagttcgttgttaaaaaacctgaactagttatttcctacttgcctcctgggatggctagtaaaataaacactaaagctttgcagtcccccaaaagaccacgaagtcctgggagtaattcaaaggttcctgaaattgaggtcaccgtggaaggccctaataacaacaatcctcaaacctcagctgttcgaaccccgacccagactaacggttctaacgttcccttcaagccacgagggagagagttttcctttgaggcctggaatgccaaaatcacggacctaaaacagaaagttgaaaatctcttcaatgagaaatgtggggaagctcttggccttaaacaagctgtgaaggtgccgttcgcgttatttgagtctttcccggaagacttttatgtggaaggcttacctgagggtgtgccattccgaagaccatcgacttttggcattccgaggctggagaagatactcagaaacaaagccaaaattaagttcatcattaaaaagcccgaaatgtttgagacggcgattaaggagagcacctcctctaagagccctcccagaaaaataaattcatcacccaatgttaatactactgcatcaggtgttgaagaccttaacatcattcaggtgacaattccagatgatgataatgaaagactctcgaaagttgaaaaagctagacagctaagagaacaagtgaatgacctctttagtcggaaatttggtgaagctattggtatgggttttcctgtgaaagttccctacaggaaaatcacaattaaccctggctgtgtggtggttgatggcatgcccccgggggtgtccttcaaagcccccagctacctggaaatcagctccatgagaaggatcttagactctgccgagtttatcaaattcacggtcattaggtaagtgagagtttcctgcttagtcacaggagcgaatctggagctcatgaggctgactcttctaaaatgcagccacaggtagtcatcgaatccggcttcctatgctgtgcaatcaacaaatcaaaataacttgtgtcatcattagaatgtcagatgtgcttctacgaactaagctgactcttttaattctttggcaaagggttggcaaactaggactgtttgccaaattcaggctgcctcctatttttagagtcttcctgaaacacagctacacccgtattatccatggctgctttcctgtcacagtgagtaagtagctgggactgagaaggcatggcctccaaagtctaaaatatttactctctagcactttgtagaaaaaccttagctaggcacagtggctaacgcctgtaatcccagcattttgggaggccaaggcaggcagatcacctgaggtcaggagttccagaccagcctggccaacatggtgaaatcccatctctacaaaaataaaacagttagctgggcatgatggcgggtgcctgtaatcccagctactcgggaggctgaggcaggatagtcgcttgaacccaggaggtggaggttgcaatgagccaagatcatgccactgcactccagcctggacgacagagtgagactccatcacaagaaaaaaagaactttgtcaacctctgtcttagggcgccttgtcacaggcttcgggtcagacggattcaaccttgcatcagccatttgttagccaggtcactctgttctttgtctgtaaatgagattgatcgttgttcccactgagagtgtcagctccttcccgtagagcaggcatgatgattgtactcacctctgacaccattgtgagtgccacattccttcccacgtccttgtcactgtaagagatgcccacctgagcaccaaccccaggttatcttcccctttgtcttccagccccccagaaacagctacgactcaacctacccaatcatttcatcatcagattgccactgtctctagttcaggtctcttgggactggcactcagaaatctcataataaatcctcttgaggcttctcatacactcgtcttcttccaatcttctttccctcaaaatctcatattttggttccacttcacccaccgtcattctccatatcactcccaggagttaggcaaaaagccccttccgttcttccgtatgttaaacttagaatcactctgttccctgctctgcgtttctattttttgtttttcctccatttactagtagcttaacactttctaacagtgttcttattattgatacgtatctatctcttccataagcttataaggtcacggataatacttctcattgtagtacgtaaatgacgtgggctagatatgagttgaataaacagttatacctgtaaattcttacagagtgaaaataaattgttatactttacaatttgtttctctctttagaccatttccaggacttgtgattaataaccgtgagtattttgtgaagtgttttgtttttgttttttcctggggtctgacgtgtgtgcgtgtgagtgtgtatacatgcttaacgtatatcacgttacttcacctatgtcagtaaccaggccaaatacttgttttagccctcagtaaaaacaccaggcacttcctagttgtaaaattattcaagcttcttaacttcctatcctcgatgcacttaatcataaaatggtaataatagcaccgattttgggggagtcgttccagtagatggaaagcatctggaacaggtgtcagcaagctcctgccgacgtgtatgcataaagttttattgaaaccaccatcgtgtccatttgtttatggcagaactgagagatggcagcagcaagtgtgtgcctgcaaaacctaaaatatttactaattggctctgcaagaaaagagtttgcatccccctaacctagaacagtgtctagcctctagtatgtgtttagcctacagtatgtgctcagcgaatacaatctatatttattactgcttttatgactgttataattactgtgcttggatttcgttacaaagtaagtcacaatgtgcctgcttctgttagtatttcagcacagtgcctggcacacatggggctctcaaatattgctgagcgagtgaacaaatgtcctttcaattccttaacgttgatgtcattttcaatagtattttgagccaaacttaattttgcgagtgtgttttgttttcttaactttattattaaaaatgtataaaagtgaggccaggcgtggtggctcacgcctgtaatcccagcagtttgggaggctgaggcaggcggatcagttgaggttgggagttggagaccagcccgtccaacatggtgaaagcctgtctctactaaaaatacaaaaatcagctgggtgtggtggcgcgtgcctgtaatcccagctactcaggaggctgaggcaggagagttgcttgaatcctagaggtggaggttgcagtgagctgagatcgtgccattgcactccagcctgggcaacaagagcaaaactctgtcccaataaataaataaataaaatgttctcttttgttcctgttcttgtgcggtagtgtggtatagagttttatggtaattactgtgaattagtgattctgagggacatatcagaactctgaggtttgtttccttctcatcttgagggaaacagcaaatgtatgttaaaatgcttttccaagggaacaacacatccttacattatttaaaccaatctgcttcattttcagagctggttgatcagagtgagtcagaaggccccgtgatacaagaatcagctgaaccaagccagttggaagttccagccacagaagaaataaaagagactgatggaagctctcagatcaagcaagaaccagaccccacgtggtagacctcttccctcctagggtaaatcagcttctgtgtcagggatgctgtgtggtgtccatctgaaccccctgcatacgcgtagctaatgtgatctccccactttcacataagatggtggccctgccttcagggaatgtgggagccaggtgggagccttcccggatatttaagctagaagattctacagggagattctccttggatcaatatatgtctctcagtcaaagatgtaaaagcacttttgccttaaaaagaatgttctgtttctaaatagagtcaacgttgtcctcctcattggaattcactatgagtcagaatcattagactgacttttttttttccatagtaatagtattttgcagagtctcacagagctgcagatcttttgttcatcttgcagagttaacaagtctgatcctgttagtccagatttcttaaatttggccaagttataataggagcagtagcttgagacccgaagtcaggaaactttgacaatggatttttttttttaatccagagacttgtactggaatttgccttaccctgtcagctcatggacttaaggtttcatcccgctttatgagtgcttctgaatccaagtcattgttacctgaatttgcaaattaagttgtgatattcgtgactgttaaattcctgtaattagattaacctctttgcttgcttgtttgttttctctcctattttagcttaaagtatcagtggttgagaagagcttttcggacctgttactaccccaagctgtgtaatatacttgtataacagaaataccttctatacaaacctttttttctacttttagatagaaatgtctactttttcagcagttctgtgaattaaagagcagagtgactgtgggtctggaatggctggtgtacttgggaatgtactatcaggattttacagcaatgctgggaaatgacagggaaaatgacaggaatgaatctcaccagattttttatgtactcagcagagccttgagttacggtgtttattttccaatcaagtgaagatatctcctacttctcctactggaacatctcagcttctgcagtgaagaaaaattcctgtgatagttcagttctttagtttttctatttgaaaaaaaaaaatcatttaaatgatcctttgttcacggctctccttaatgactgagtgaacagttcctatctgtatatttgactaaaccttttcctaagctatctctcatggttcctatgtttttttatcataattaaaagcaaaaccatctggatcacctaacagtcagaggtcagtatctcagcgtgtgaattatagaggaaatacagagagaacctcttccacttttacttttcgtccaaataaaatgcatggtgtaccagaagttgaagatcgggttgaggattggggctagctcgatgacactaaggccccaacatcgcgggacctgctgtggcgcggattcttaggaacgctgttctagccggccccctctccaggggtcgccgtggccggcattatttcctagttcttcttgtaaccctgaggtgccagcgcggggagtgaggaggggtcagggggctaaggatgcaacctctgacgttctgcgccttcctaggagagtcttacatgtgttgagatttcacaagcaatgcgagttgtaaaataccagctctacaagaagctaggctctgtgacggcatagttttcagtagctttatcacaatattcacaatggagaattatatgacatggtagcagaaataggcccttttatgtgttgcttctattttacctcaaattgtagatatagggtaatcaataaaatccatccatgcctttcacacactaagt

SEQ ID NO: 5269 - protein, 538 aa, Homo sapiens; identical to SEQ ID NO: 4183

SEQ ID NO: 5270 - DNA, 7116 bp, Homo sapiens
gggtcttgttctgtctcccaagctggagtgcagtggtgtggtcataggtcactgcagcgtcgaactcctaggctcaagtgatcctcttgcctcaggctcctgagtagctgggacaacaggcgtgtaccacacctggatactttttaaatttttggtagagaagggatctcactctattgccaagctggtgtcgaactcttggtcttaagcagccctcccacgtcagcatcccaaagtgttgggatttcagagggatcatggcccaagttgcaatgtccaccctccccgttgaagatgaggagtcctcggagagcaggatggtggtgacattcctcatgtcagctctcgagtccatgtgtaaagaactggccaagtccaaagccgaagtggcctgcattgcagtgtatgaaacagacgtgtttgtcgtcggaactgaaagaggacgtgcttttgtcaataccagaaaggattttcaaaaagattttgtaaaatattgtgttgaagaagaagaaaaagctgcagagatgcataaaatgaaatctacaacccaggcaaatcggatgagtgtagatgctgtagaaattgaaacactcagaaaaacagttgaggactatttctgcttttgctatgggaaagctttaggcaaatccacagtggtacctgtaccatatgagaagatgctgcgagaccagtcggctgtggtagtgcaggggcttccggaaggtgttgcctttaaacaccccgagaactatgatcttgcaaccctgaaatggattttggagaacaaagcagggatttcattcatcattaagagaccttttttagagccaaagaagcatgtaggtggtcgtgtgatggtaacagatgctgacaggtcaatactatctccaggtggaagttgtggccccatcaaagtgaaaactgaacccacagaagattctggcatttccctggaaatggcagctgtgacagtaaaggaagaatcagaagatcctgattattatcaatataacattcaagcaggcccttctgaaactgatgatgttgatgaaaaacagcccctatcgaagcctttgcaaggaagccaccattcttcagagggcaatgaaggcacagaaatggaagtaccagcagaagatgatgattattctccaccgtctaagagaccaaaggccaatgagctaccgcagccaccagtcccggaacccgccaatgctgggaagcggaaagtgagggagttcaacttcgagaaatggaatgctcgcatcactgatctacgtaaacaagttgaagaattgtttgaaaggaaatatgctcaagccataaaagccaaaggtccggtgacgatcccgtaccctcttttccagtctcatgttgaagatctttatgtagaaggacttcctgaaggaattccttttagaaggccatctacttacggaattcctcgcctggagaggatattacttgcaaaggaaaggattcgttttgtgattaagaaacatgagcttctgaattcaacacgtgaagatttacagcttgataagccagcttcaggagtaaaggaagaatggtatgccagaatcactaaattaagaaagatggtggatcagcttttctgcaaaaaatttgcggaagccttggggagcactgaagccaaggctgtaccgtaccaaaaatttgaggcacacccgaatgatctgtacgtggaaggactgccagaaaacattcctttccgaagtccctcatggtatggaatcccaaggctggaaaaaatcattcaagtgggcaatcgaattaaatttgttattaaaagaccagaacttctgactcacagtaccactgaagttactcagccaagaacgaatacaccagtcaaagaagattggaatgtcagaattaccaagctacggaagcaagtggaagagatttttaatttgaaatttgctcaagctcttggactcaccgaggcagtaaaagtaccatatcctgtgtttgaatcaaacccggagttcttgtatgtggaaggcttgccagaggggattcccttccgaagccctacctggtttggaattccacgacttgaaaggatcgtccgcgggagtaataaaatcaagttcgttgttaaaaaacctgaactagttatttcctacttgcctcctgggatggctagtaaaataaacactaaagctttgcagtcccccaaaagaccacgaagtcctgggagtaattcaaaggttcctgaaattgaggtcaccgtggaaggccctaataacaacaatcctcaaacctcagctgttcgaaccccgacccagactaacggttctaacgttcccttcaagccacgagggagagagttttcctttgaggcctggaatgccaaaatcacggacctaaaacagaaagttgaaaatctcttcaatgagaaatgtggggaagctcttggccttaaacaagctgtgaaggtgccgttcgcgttatttgagtctttcccggaagacttttatgtggaaggcttacctgagggtgtgccattccgaagaccatcgacttttggcattccgaggctggagaagatactcagaaacaaagccaaaattaagttcatcattaaaaagcccgaaatgtttgagacggcgattaaggagagcacctcctctaagagccctcccagaaaaataaattcatcacccaatgttaatactactgcatcaggtgttgaagaccttaacatcattcaggtgacaattccagatgatgataatgaaagactctcgaaagttgaaaaagctagacagctaagagaacaagtgaatgacctctttagtcggaaatttggtgaagctattggtatgggttttcctgtgaaagttccctacaggaaaatcacaattaaccctggctgtgtggtggttgatggcatgcccccgggggtgtccttcaaagcccccagctacctggaaatcagctccatgagaaggatcttagactctgccgagtttatcaaattcacggtcattaggtaagtgagagtttcctgcttagtcacaggagcgaatctggagctcatgaggctgactcttctaaaatgcagccacaggtagtcatcgaatccggcttcctatgctgtgcaatcaacaaatcaaaataacttgtgtcatcattagaatgtcagatgtgcttctacgaactaagctgactcttttaattctttggcaaagggttggcaaactaggactgtttgccaaattcaggctgcctcctatttttagagtcttcctgaaacacagctacacccgtattatccatggctgctttcctgtcacagtgagtaagtagctgggactgagaaggcatggcctccaaagtctaaaatatttactctctagcactttgtagaaaaaccttagctaggcacagtggctaacgcctgtaatcccagcattttgggaggccaaggcaggcagatcacctgaggtcaggagttccagaccagcctggccaacatggtgaaatcccatctctacaaaaataaaacagttagctgggcatgatggcgggtgcctgtaatcccagctactcgggaggctgaggcaggatagtcgcttgaacccaggaggtggaggttgcaatgagccaagatcatgccactgcactccagcctggacgacagagtgagactccatcacaagaaaaaaagaactttgtcaacctctgtcttagggcgccttgtcacaggcttcgggtcagacggattcaaccttgcatcagccatttgttagccaggtcactctgttctttgtctgtaaatgagattgatcgttgttcccactgagagtgtcagctccttcccgtagagcaggcatgatgattgtactcacctctgacaccattgtgagtgccacattccttcccacgtccttgtcactgtaagagatgcccacctgagcaccaaccccaggttatcttcccctttgtcttccagccccccagaaacagctacgactcaacctacccaatcatttcatcatcagattgccactgtctctagttcaggtctcttgggactggcactcagaaatctcataataaatcctcttgaggcttctcatacactcgtcttcttccaatcttctttccctcaaaatctcatattttggttccacttcacccaccgtcattctccatatcactcccaggagttaggcaaaaagccccttccgttcttccgtatgttaaacttagaatcactctgttccctgctctgcgtttctattttttgtttttcctccatttactagtagcttaacactttctaacagtgttcttattattgatacgtatctatctcttccataagcttataaggtcacggataatacttctcattgtagtacgtaaatgacgtgggctagatatgagttgaataaacagttatacctgtaaattcttacagagtgaaaataaattgttatactttacaatttgtttctctctttagaccatttccaggacttgtgattaataaccgtgagtattttgtgaagtgttttgtttttgttttttcctggggtctgacgtgtgtgcgtgtgagtgtgtatacatgcttaacgtatatcacgttacttcacctatgtcagtaaccaggccaaatacttgttttagccctcagtaaaaacaccaggcacttcctagttgtaaaattattcaagcttcttaacttcctatcctcgatgcacttaatcataaaatggtaataatagcaccgattttgggggagtcgttccagtagatggaaagcatctggaacaggtgtcagcaagctcctgccgacgtgtatgcataaagttttattgaaaccaccatcgtgtccatttgtttatggcagaactgagagatggcagcagcaagtgtgtgcctgcaaaacctaaaatatttactaattggctctgcaagaaaagagtttgcatccccctaacctagaacagtgtctagcctctagtatgtgtttagcctacagtatgtgctcagcgaatacaatctatatttattactgcttttatgactgttataattactgtgcttggatttcgttacaaagtaagtcacaatgtgcctgcttctgttagtatttcagcacagtgcctggcacacatggggctctcaaatattgctgagcgagtgaacaaatgtcctttcaattccttaacgttgatgtcattttcaatagtattttgagccaaacttaattttgcgagtgtgttttgttttcttaactttattattaaaaatgtataaaagtgaggccaggcgtggtggctcacgcctgtaatcccagcagtttgggaggctgaggcaggcggatcagttgaggttgggagttggagaccagcccgtccaacatggtgaaagcctgtctctactaaaaatacaaaaatcagctgggtgtggtggcgcgtgcctgtaatcccagctactcaggaggctgaggcaggagagttgcttgaatcctagaggtggaggttgcagtgagctgagatcgtgccattgcactccagcctgggcaacaagagcaaaactctgtcccaataaataaataaataaaatgttctcttttgttcctgttcttgtgcggtagtgtggtatagagttttatggtaattactgtgaattagtgattctgagggacatatcagaactctgaggtttgtttccttctcatcttgagggaaacagcaaatgtatgttaaaatgcttttccaagggaacaacacatccttacattatttaaaccaatctgcttcattttcagagctggttgatcagagtgagtcagaaggccccgtgatacaagaatcagctgaaccaagccagttggaagttccagccacagaagaaataaaagagactgatggaagctctcagatcaagcaagaaccagaccccacgtggtagacctcttccctcctaggcttaaagtatcagtggttgagaagagcttttcggacctgttactaccccaagctgtgtaatatacttgtataacagaaataccttctatacaaacctttttttctacttttagatagaaatgtctactttttcagcagttctgtgaattaaagagcagagtgactgtgggtctggaatggctggtgtacttgggaatgtactatcaggattttacagcaatgctgggaaatgacagggaaaatgacaggaatgaatctcaccagattttttatgtactcagcagagccttgagttacggtgtttattttccaatcaagtgaagatatctcctacttctcctactggaacatctcagcttctgcagtgaagaaaaattcctgtgatagttcagttctttagtttttctatttgaaaaaaaaaaatcatttaaatgatcctttgttcacggctctccttaatgactgagtgaacagttcctatctgtatatttgactaaaccttttcctaagctatctctcatggttcctatgtttttttatcataattaaaagcaaaaccatctggatcacctaacagtcagaggtcagtatctcagcgtgtgaattatagaggaaatacagagagaacctcttccacttttacttttcgtccaaataaaatgcatggtgtaccagaagttgaagatcgggttgaggattggggctagctcgatgacactaaggccccaacatcgcgggacctgctgtggcgcggattcttaggaacgctgttctagccggccccctctccaggggtcgccgtggccggcattatttcctagttcttcttgtaaccctgaggtgccagcgcggggagtgaggaggggtcagggggctaaggatgcaacctctgacgttctgcgccttcctaggagagtcttacatgtgttgagatttcacaagcaatgcgagttgtaaaataccagctctacaagaagctaggctctgtgacggcatagttttcagtagctttatcacaatattcacaatggagaattatatgacatggtagcagaaataggcccttttatgtgttgcttctattttacctcaaattgtagatatagggtaatcaataaaatccatccatgcctttcacacactaagt

SEQ ID NO: 5271 - protein, 921 aa, Homo sapiens; identical to SEQ ID NO: 4723

SEQ ID NO: 5272 - DNA, 4062 bp, Homo sapiens
gggtcttgttctgtctcccaagctggagtgcagtggtgtggtcataggtcactgcagcgtcgaactcctaggctcaagtgatcctcttgcctcaggctcctgagtagctgggacaacaggcgtgtaccacacctggatactttttaaatttttggtagagaagggatctcactctattgccaagctggtgtcgaactcttggtcttaagcagccctcccacgtcagcatcccaaagtgttgggatttcagagggatcatggcccaagttgcaatgtccaccctccccgttgaagatgaggagtcctcggagagcaggatggtggtgacattcctcatgtcagctctcgagtccatgtgtaaagaactggccaagtccaaagccgaagtggcctgcattgcagtgtatgaaacagacgtgtttgtcgtcggaactgaaagaggacgtgcttttgtcaataccagaaaggattttcaaaaagattttgtaaaatattgtgttgaagaagaagaaaaagctgcagagatgcataaaatgaaatctacaacccaggcaaatcggatgagtgtagatgctgtagaaattgaaacactcagaaaaacagttgaggactatttctgcttttgctatgggaaagctttaggcaaatccacagtggtacctgtaccatatgagaagatgctgcgagaccagtcggctgtggtagtgcaggggcttccggaaggtgttgcctttaaacaccccgagaactatgatcttgcaaccctgaaatggattttggagaacaaagcagggatttcattcatcattaagagaccttttttagagccaaagaagcatgtaggtggtcgtgtgatggtaacagatgctgacaggtcaatactatctccaggtggaagttgtggccccatcaaagtgaaaactgaacccacagaagattctggcatttccctggaaatggcagctgtgacagtaaaggaagaatcagaagatcctgattattatcaatataacattcaagcaggcccttctgaaactgatgatgttgatgaaaaacagcccctatcgaagcctttgcaaggaagccaccattcttcagagggcaatgaaggcacagaaatggaagtaccagcagaagattctactcaacatgtcccttcagaaacaagtgaggaccctgaagttgaggtgactattgaagatgatgattattctccaccgtctaagagaccaaaggccaatgagctaccgcagccaccagtcccggaacccgccaatgctgggaagcggaaagtgagggagttcaacttcgagaaatggaatgctcgcatcactgatctacgtaaacaagttgaagaattgtttgaaaggaaatatgctcaagccataaaagccaaaggtccggtgacgatcccgtaccctcttttccagtctcatgttgaagatctttatgtagaaggacttcctgaaggaattccttttagaaggccatctacttacggaattcctcgcctggagaggatattacttgcaaaggaaaggattcgttttgtgattaagaaacatgagcttctgaattcaacacgtgaagatttacagcttgataagccagcttcaggagtaaaggaagaatggtatgccagaatcactaaattaagaaagatggtggatcagcttttctgcaaaaaatttgcggaagccttggggagcactgaagccaaggctgtaccgtaccaaaaatttgaggcacacccgaatgatctgtacgtggaaggactgccagaaaacattcctttccgaagtccctcatggtatggaatcccaaggctggaaaaaatcattcaagtgggcaatcgaattaaatttgttattaaaagaccagaacttctgactcacagtaccactgaagttactcagccaagaacgaatacaccagctcaagctcttggactcaccgaggcagtaaaagtaccatatcctgtgtttgaatcaaacccggagttcttgtatgtggaaggcttgccagaggggattcccttccgaagccctacctggtttggaattccacgacttgaaaggatcgtccgcgggagtaataaaatcaagttcgttgttaaaaaacctgaactagttatttcctacttgcctcctgggatggctagtaaaataaacactaaagctttgcagtcccccaaaagaccacgaagtcctgggagtaattcaaaggttcctgaaattgaggtcaccgtggaaggccctaataacaacaatcctcaaacctcagctgttcgaaccccgacccagactaacggttctaacgttcccttcaagccacgagggagagagttttcctttgaggcctggaatgccaaaatcacggacctaaaacagaaagttgaaaatctcttcaatgagaaatgtggggaagctcttggccttaaacaagctgtgaaggtgccgttcgcgttatttgagtctttcccggaagacttttatgtggaaggcttacctgagggtgtgccattccgaagaccatcgacttttggcattccgaggctggagaagatactcagaaacaaagccaaaattaagttcatcattaaaaagcccgaaatgtttgagacggcgattaaggagagcacctcctctaagagccctcccagaaaaataaattcatcacccaatgttaatactactgcatcaggtgttgaagaccttaacatcattcaggtgacaattccagatgatgataatgaaagactctcgaaagttgaaaaagctagacagctaagagaacaagtgaatgacctctttagtcggaaatttggtgaagctattggtatgggttttcctgtgaaagttccctacaggaaaatcacaattaaccctggctgtgtggtggttgatggcatgcccccgggggtgtccttcaaagcccccagctacctggaaatcagctccatgagaaggatcttagactctgccgagtttatcaaattcacggtcattagaccatttccaggacttgtgattaataaccagctggttgatcagagtgagtcagaaggccccgtgatacaagaatcagctgaaccaagccagttggaagttccagccacagaagaaataaaagagactgatggaagctctcagatcaagcaagaaccagaccccacgtggtagacctcttccctcctaggagccttgagttacggtgtttattttccaatcaagtgaagatatctcctacttctcctactggaacatctcagcttctgcagtgaagaaaaattcctgtgatagttcagttctttagtttttctatttgaaaaaaaaaaatcatttaaatgatcctttgttcacggctctccttaatgactgagtgaacagttcctatctgtatatttgactaaaccttttcctaagctatctctcatggttcctatgtttttttatcataattaaaagcaaaaccatctggatcacctaacagtcagaggtcagtatctcagcgtgtgaattatagaggaaatacagagagaacctcttccacttttacttttcgtccaaataaaatgcatggtgtaccagaagttgaagatcgggttgaggattggggctagctcgatgacactaaggccccaacatcgcgggacctgctgtggcgcggattcttaggaacgctgttctagccggccccctctccaggggtcgccgtggccggcattatttcctagttcttcttgtaaccctgaggtgccagcgcggggagtgaggaggggtcagggggctaaggatgcaacctctgacgttctgcgccttcctaggagagtcttacatgtgttgagatttcacaagcaatgcgagttgtaaaataccagctctacaagaagctaggctctgtgacggcatagttttcagtagctttatcacaatattcacaatggagaattatatgacatggtagcagaaataggcccttttatgtgttgcttctattttacctcaaattgtagatatagggtaatcaataaaatccatccatgcctttcacacactaagt

SEQ ID NO: 5273 - protein, 974 aa, Homo sapiens; identical to SEQ ID NO: 4101

SEQ ID NO: 5274 - DNA, 4467 bp, Homo sapiens
gggtcttgttctgtctcccaagctggagtgcagtggtgtggtcataggtcactgcagcgtcgaactcctaggctcaagtgatcctcttgcctcaggctcctgagtagctgggacaacaggcgtgtaccacacctggatactttttaaatttttggtagagaagggatctcactctattgccaagctggtgtcgaactcttggtcttaagcagccctcccacgtcagcatcccaaagtgttgggatttcagagggatcatggcccaagttgcaatgtccaccctccccgttgaagatgaggagtcctcggagagcaggatggtggtgacattcctcatgtcagctctcgagtccatgtgtaaagaactggccaagtccaaagccgaagtggcctgcattgcagtgtatgaaacagacgtgtttgtcgtcggaactgaaagaggacgtgcttttgtcaataccagaaaggattttcaaaaagattttgtaaaatattgtgttgaagaagaagaaaaagctgcagagatgcataaaatgaaatctacaacccaggcaaatcggatgagtgtagatgctgtagaaattgaaacactcagaaaaacagttgaggactatttctgcttttgctatgggaaagctttaggcaaatccacagtggtacctgtaccatatgagaagatgctgcgagaccagtcggctgtggtagtgcaggggcttccggaaggtgttgcctttaaacaccccgagaactatgatcttgcaaccctgaaatggattttggagaacaaagcagggatttcattcatcattaagagaccttttttagagccaaagaagcatgtaggtggtcgtgtgatggtaacagatgctgacaggtcaatactatctccaggtggaagttgtggccccatcaaagtgaaaactgaacccacagaagattctggcatttccctggaaatggcagctgtgacagtaaaggaagaatcagaagatcctgattattatcaatataacattcaagcaggcccttctgaaactgatgatgttgatgaaaaacagcccctatcgaagcctttgcaaggaagccaccattcttcagagggcaatgaaggcacagaaatggaagtaccagcagaagatgatgattattctccaccgtctaagagaccaaaggccaatgagctaccgcagccaccagtcccggaacccgccaatgctgggaagcggaaagtgagggagttcaacttcgagaaatggaatgctcgcatcactgatctacgtaaacaagttgaagaattgtttgaaaggaaatatgctcaagccataaaagccaaaggtccggtgacgatcccgtaccctcttttccagtctcatgttgaagatctttatgtagaaggacttcctgaaggaattccttttagaaggccatctacttacggaattcctcgcctggagaggatattacttgcaaaggaaaggattcgttttgtgattaagaaacatgagcttctgaattcaacacgtgaagatttacagcttgataagccagcttcaggagtaaaggaagaatggtatgccagaatcactaaattaagaaagatggtggatcagcttttctgcaaaaaatttgcggaagccttggggagcactgaagccaaggctgtaccgtaccaaaaatttgaggcacacccgaatgatctgtacgtggaaggactgccagaaaacattcctttccgaagtccctcatggtatggaatcccaaggctggaaaaaatcattcaagtgggcaatcgaattaaatttgttattaaaagaccagaacttctgactcacagtaccactgaagttactcagccaagaacgaatacaccagtcaaagaagattggaatgtcagaattaccaagctacggaagcaagtggaagagatttttaatttgaaatttgcttagatttgttgacagcggtttcctggagtgctgtcttgagaacgattctgaggaggctcagcaagaaagagtgtttcagttgattgggtgtgtctgtcatggagaaggaactcaagctcttggactcaccgaggcagtaaaagtaccatatcctgtgtttgaatcaaacccggagttcttgtatgtggaaggcttgccagaggggattcccttccgaagccctacctggtttggaattccacgacttgaaaggatcgtccgcgggagtaataaaatcaagttcgttgttaaaaaacctgaactagttatttcctacttgcctcctgggatggctagtaaaataaacactaaagctttgcagtcccccaaaagaccacgaagtcctgggagtaattcaaaggttcctgaaattgaggtcaccgtggaaggccctaataacaacaatcctcaaacctcagctgttcgaaccccgacccagactaacggttctaacgttcccttcaagccacgagggagagagttttcctttgaggcctggaatgccaaaatcacggacctaaaacagaaagttgaaaatctcttcaatgagaaatgtggggaagctcttggccttaaacaagctgtgaaggtgccgttcgcgttatttgagtctttcccggaagacttttatgtggaaggcttacctgagggtgtgccattccgaagaccatcgacttttggcattccgaggctggagaagatactcagaaacaaagccaaaattaagttcatcattaaaaagcccgaaatgtttgagacggcgattaaggagagcacctcctctaagagccctcccagaaaaataaattcatcacccaatgttaatactactgcatcaggtgttgaagaccttaacatcattcaggtgacaattccagatgatgataatgaaagactctcgaaagttgaaaaagctagacagctaagagaacaagtgaatgacctctttagtcggaaatttggtgaagctattggtatgggttttcctgtgaaagttccctacaggaaaatcacaattaaccctggctgtgtggtggttgatggcatgcccccgggggtgtccttcaaagcccccagctacctggaaatcagctccatgagaaggatcttagactctgccgagtttatcaaattcacggtcattagaccatttccaggacttgtgattaataaccagctggttgatcagagtgagtcagaaggccccgtgatacaagaatcagctgaaccaagccagttggaagttccagccacagaagaaataaaagagactgatggaagctctcagatcaagcaagaaccagaccccacgtggtagacctcttccctcctaggcttaaagtatcagtggttgagaagagcttttcggacctgttactaccccaagctgtgtaatatacttgtataacagaaataccttctatacaaacctttttttctacttttagatagaaatgtctactttttcagcagttctgtgaattaaagagcagagtgactgtgggtctggaatggctggtgtacttgggaatgtactatcaggattttacagcaatgctgggaaatgacagggaaaatgacaggaatgaatctcaccagattttttatgtactcagcagagccttgagttacggtgtttattttccaatcaagtgaagatatctcctacttctcctactggaacatctcagcttctgcagtgaagaaaaattcctgtgatagttcagttctttagtttttctatttgaaaaaaaaaaatcatttaaatgatcctttgttcacggctctccttaatgactgagtgaacagttcctatctgtatatttgactaaaccttttcctaagctatctctcatggttcctatgtttttttatcataattaaaagcaaaaccatctggatcacctaacagtcagaggtcagtatctcagcgtgtgaattatagaggaaatacagagagaacctcttccacttttacttttcgtccaaataaaatgcatggtgtaccagaagttgaagatcgggttgaggattggggctagctcgatgacactaaggccccaacatcgcgggacctgctgtggcgcggattcttaggaacgctgttctagccggccccctctccaggggtcgccgtggccggcattatttcctagttcttcttgtaaccctgaggtgccagcgcggggagtgaggaggggtcagggggctaaggatgcaacctctgacgttctgcgccttcctaggagagtcttacatgtgttgagatttcacaagcaatgcgagttgtaaaataccagctctacaagaagctaggctctgtgacggcatagttttcagtagctttatcacaatattcacaatggagaattatatgacatggtagcagaaataggcccttttatgtgttgcttctattttacctcaaattgtagatatagggtaatcaataaaatccatccatgcctttcacacactaagt

SEQ ID NO: 5275 - protein, 563 aa, Homo sapiens; identical to SEQ ID NO: 4097

SEQ ID NO: 5276 - DNA, 4936 bp, Homo sapiens
gggtcttgttctgtctcccaagctggagtgcagtggtgtggtcataggtcactgcagcgtcgaactcctaggctcaagtgatcctcttgcctcaggctcctgagtagctgggacaacaggcgtgtaccacacctggatactttttaaatttttggtagagaagggatctcactctattgccaagctggtgtcgaactcttggtcttaagcagccctcccacgtcagcatcccaaagtgttgggatttcagagggatcatggcccaagttgcaatgtccaccctccccgttgaagatgaggagtcctcggagagcaggatggtggtgacattcctcatgtcagctctcgagtccatgtgtaaagaactggccaagtccaaagccgaagtggcctgcattgcagtgtatgaaacagacgtgtttgtcgtcggaactgaaagaggacgtgcttttgtcaataccagaaaggattttcaaaaagattttgtaaaatattgtgttgaagaagaagaaaaagctgcagagatgcataaaatgaaatctacaacccaggcaaatcggatgagtgtagatgctgtagaaattgaaacactcagaaaaacagttgaggactatttctgcttttgctatgggaaagctttaggcaaatccacagtggtacctgtaccatatgagaagatgctgcgagaccagtcggctgtggtagtgcaggggcttccggaaggtgttgcctttaaacaccccgagaactatgatcttgcaaccctgaaatggattttggagaacaaagcagggatttcattcatcattaagagaccttttttagagccaaagaagcatgtaggtggtcgtgtgatggtaacagatgctgacaggtcaatactatctccaggtggaagttgtggccccatcaaagtgaaaactgaacccacagaagattctggcatttccctggaaatggcagctgtgacagtaaaggaagaatcagaagatcctgattattatcaatataacattcaaggaagccaccattcttcagagggcaatgaaggcacagaaatggaagtaccagcagaagatgatgattattctccaccgtctaagagaccaaaggccaatgagctaccgcagccaccagtcccggaacccgccaatgctgggaagcggaaagtgagggagttcaacttcgagaaatggaatgctcgcatcactgatctacgtaaacaagttgaagaattgtttgaaaggaaatatgctcaagccataaaagccaaaggtccggtgacgatcccgtaccctcttttccagtctcatgttgaagatctttatgtagaaggacttcctgaaggaattccttttagaaggccatctacttacggaattcctcgcctggagaggatattacttgcaaaggaaaggattcgttttgtgattaagaaacatgagcttctgaattcaacacgtgaagatttacagcttgataagccagcttcaggagtaaaggaagaatggtatgccagaatcactaaattaagaaagatggtggatcagcttttctgcaaaaaatttgcggaagccttggggagcactgaagccaaggctgtaccgtaccaaaaatttgaggcacacccgaatgatctgtacgtggaaggactgccagaaaacattcctttccgaagtccctcatggtatggaatcccaaggctggaaaaaatcattcaagtgggcaatcgaattaaatttgttattaaaagaccagaacttctgactcacagtaccactgaagttactcagccaagaacgaatacaccagtcaaagaagattggaatgtcagaattaccaagctacggaagcaagtggaagagatttttaatttgaaatttgctcaagctcttggactcaccgaggcagtaaaagtaccatatcctgtgtttgaatcaaacccggagttcttgtatgtggaaggcttgccagaggggattcccttccgaagccctacctggtttggaattccacgacttgaaaggatcgtccgcgggagtaataaaatcaagttcgttgttaaaaaacctgaactagttatttcctacttgcctcctgggatggctagtaaaataaacactaaagctttgcagtcccccaaaagaccacgaagtcctgggagtaattcaaaggttcctgaaattgaggtcaccgtggaaggccctaataacaacaatcctcaaacctcagctgttcgaaccccgacccagactaacggttctaacgttcccttcaagccacgagggagagagttttcctttgaggcctggaatgccaaaatcacggacctaaaacagaaagttgaaaatctcttcaatgagaaatgtggggaagctcttggccttaaacaagctgtgaaggtgccgttcgcgttatttgagtctttcccggaagacttttatgtggaaggcttacctgagggtgtgccattccgaagaccatcgacttttggcattccgaggctggagaagatactcagaaacaaagccaaaattaagttcatcattaaaaagcccgaaatgtttgagacggcgattaaggagagcacctcctctaagagccctcccagaaaaataaattcatcacccaatgttaatactactgcatcaggtgttgaagaccttaacatcattcaggtgacaattccagatgatgataatgaaagactctcgaaagttgaaaaagctagacagctaagagaacaagtgaatgacctctttagtcggaaatttggtgaagctattggtatgggttttcctgtgaaagttccctacaggaaaatcacaattaaccctggctgtgtggtggttgatggcatgcccccgggggtgtccttcaaagcccccagctacctggaaatcagctccatgagaaggatcttagactctgccgagtttatcaaattcacggtcattagaccatttccaggacttgtgattaataaccagctggttgatcagagtgagtcagaaggccccgtgatacaagaatcagctgaaccaagccagttggaagttccagccacagaaggtaaaaggacctcttccctcctagggtaaatcagcttctgtgtcagggatgctgtgtggtgtccatctgaaccccctgcatacgcgtagctaatgtgatctccccactttcacataagatggtggccctgccttcagggaatgtgggagccaggtgggagccttcccggatatttaagctagaagattctacagggagattctccttggatcaatatatgtctctcagtcaaagatgtaaaagcacttttgccttaaaaagaatgttctgtttctaaatagagtcaacgttgtcctcctcattggaattcactatgagtcagaatcattagactgacttttttttttccatagtaatagtattttgcagagtctcacagagctgcagatcttttgttcatcttgcagagttaacaagtctgatcctgttagtccagatttcttaaatttggccaagttataataggagcagtagcttgagacccgaagtcaggaaactttgacaatggatttttttttttaatccagagacttgtactggaatttgccttaccctgtcagctcatggacttaaggtttcatcccgctttatgagtgcttctgaatccaagtcattgttacctgaatttgcaaattaagttgtgatattcgtgactgttaaattcctgtaattagattaacctctttgcttgcttgtttgttttctctcctattttagcttaaagtatcagtggttgagaagagcttttcggacctgttactaccccaagctgtgtaatatacttgtataacagaaataccttctatacaaacctttttttctacttttagatagaaatgtctactttttcagcagttctgtgaattaaagagcagagtgactgtgggtctggaatggctggtgtacttgggaatgtactatcaggattttacagcaatgctgggaaatgacagggaaaatgacaggaatgaatctcaccagattttttatgtactcagcagagccttgagttacggtgtttattttccaatcaagtgaagatatctcctacttctcctactggaacatctcagcttctgcagtgaagaaaaattcctgtgatagttcagttctttagtttttctatttgaaaaaaaaaaatcatttaaatgatcctttgttcacggctctccttaatgactgagtgaacagttcctatctgtatatttgactaaaccttttcctaagctatctctcatggttcctatgtttttttatcataattaaaagcaaaaccatctggatcacctaacagtcagaggtcagtatctcagcgtgtgaattatagaggaaatacagagagaacctcttccacttttacttttcgtccaaataaaatgcatggtgtaccagaagttgaagatcgggttgaggattggggctagctcgatgacactaaggccccaacatcgcgggacctgctgtggcgcggattcttaggaacgctgttctagccggccccctctccaggggtcgccgtggccggcattatttcctagttcttcttgtaaccctgaggtgccagcgcggggagtgaggaggggtcagggggctaaggatgcaacctctgacgttctgcgccttcctaggagagtcttacatgtgttgagatttcacaagcaatgcgagttgtaaaataccagctctacaagaagctaggctctgtgacggcatagttttcagtagctttatcacaatattcacaatggagaattatatgacatggtagcagaaataggcccttttatgtgttgcttctattttacctcaaattgtagatatagggtaatcaataaaatccatccatgcctttcacacactaagt

SEQ ID NO: 5277 - protein, 947 aa, Homo sapiens; identical to SEQ ID NO: 4037

SEQ ID NO: 5278 - DNA, 3985 bp, Homo sapiens
gggtcttgttctgtctcccaagctggagtgcagtggtgtggtcataggtcactgcagcgtcgaactcctaggctcaagtgatcctcttgcctcaggctcctgagtagctgggacaacaggcgtgtaccacacctggatactttttaaatttttggtagagaagggatctcactctattgccaagctggtgtcgaactcttggtcttaagcagccctcccacgtcagcatcccaaagtgttgggatttcagagggatcatggcccaagttgcaatgtccaccctccccgttgaagatgaggagtcctcggagagcaggatggtggtgacattcctcatgtcagctctcgagtccatgtgtaaagaactggccaagtccaaagccgaagtggcctgcattgcagtgtatgaaacagacgtgtttgtcgtcggaactgaaagaggacgtgcttttgtcaataccagaaaggattttcaaaaagattttgtaaaatattgtgttgaagaagaagaaaaagctgcagagatgcataaaatgaaatctacaacccaggcaaatcggatgagtgtagatgctgtagaaattgaaacactcagaaaaacagttgaggactatttctgcttttgctatgggaaagctttaggcaaatccacagtggtacctgtaccatatgagaagatgctgcgagaccagtcggctgtggtagtgcaggggcttccggaaggtgttgcctttaaacaccccgagaactatgatcttgcaaccctgaaatggattttggagaacaaagcagggatttcattcatcattaagagaccttttttagagccaaagaagcatgtaggtggtcgtgtgatggtaacagatgctgacaggtcaatactatctccaggtggaagttgtggccccatcaaagtgaaaactgaacccacagaagattctggaagccaccattcttcagagggcaatgaaggcacagaaatggaagtaccagcagaagattctactcaacatgtcccttcagaaacaagtgaggaccctgaagttgaggtgactattgaagatgatgattattctccaccgtctaagagaccaaaggccaatgagctaccgcagccaccagtcccggaacccgccaatgctgggaagcggaaagtgagggagttcaacttcgagaaatggaatgctcgcatcactgatctacgtaaacaagttgaagaattgtttgaaaggaaatatgctcaagccataaaagccaaaggtccggtgacgatcccgtaccctcttttccagtctcatgttgaagatctttatgtagaaggacttcctgaaggaattccttttagaaggccatctacttacggaattcctcgcctggagaggatattacttgcaaaggaaaggattcgttttgtgattaagaaacatgagcttctgaattcaacacgtgaagatttacagcttgataagccagcttcaggagtaaaggaagaatggtatgccagaatcactaaattaagaaagatggtggatcagcttttctgcaaaaaatttgcggaagccttggggagcactgaagccaaggctgtaccgtaccaaaaatttgaggcacacccgaatgatctgtacgtggaaggactgccagaaaacattcctttccgaagtccctcatggtatggaatcccaaggctggaaaaaatcattcaagtgggcaatcgaattaaatttgttattaaaagaccagaacttctgactcacagtaccactgaagttactcagccaagaacgaatacaccagtcaaagaagattggaatgtcagaattaccaagctacggaagcaagtggaagagatttttaatttgaaatttgctcaagctcttggactcaccgaggcagtaaaagtaccatatcctgtgtttgaatcaaacccggagttcttgaaaggatcgtccgcgggagtaataaaatcaagttcgttgttaaaaaacctgaactagttatttcctacttgcctcctgggatggctagtaaaataaacactaaagctttgcagtcccccaaaagaccacgaagtcctgggagtaattcaaaggttcctgaaattgaggtcaccgtggaaggccctaataacaacaatcctcaaacctcagctgttcgaaccccgacccagactaacggttctaacgttcccttcaagccacgagggagagagttttcctttgaggcctggaatgccaaaatcacggacctaaaacagaaagttgaaaatctcttcaatgagaaatgtggggaagctcttggccttaaacaagctgtgaaggtgccgttcgcgttatttgagtctttcccggaagacttttatgtggaaggcttacctgagggtgtgccattccgaagaccatcgacttttggcattccgaggctggagaagatactcagaaacaaagccaaaattaagttcatcattaaaaagcccgaaatgtttgagacggcgattaaggagagcacctcctctaagagccctcccagaaaaataaattcatcacccaatgttaatactactgcatcaggtgttgaagaccttaacatcattcaggtgacaattccagatgatgataatgaaagactctcgaaagttgaaaaagctagacagctaagagaacaagtgaatgacctctttagtcggaaatttggtgaagctattggtatgggttttcctgtgaaagttccctacaggaaaatcacaattaaccctggctgtgtggtggttgatggcatgcccccgggggtgtccttcaaagcccccagctacctggaaatcagctccatgagaaggatcttagactctgccgagtttatcaaattcacggtcattagaccatttccaggacttgtgattaataaccagctggttgatcagagtgagtcagaaggccccgtgatacaagaatcagctgaaccaagccagttggaagttccagccacagaagaaataaaagagactgatggaagctctcagatcaagcaagaaccagaccccacgtggtagacctcttccctcctaggcttaaagtatcagtggttgagaagagcttttcggacctgttactaccccaagctgtagccttgagttacggtgtttattttccaatcaagtgaagatatctcctacttctcctactggaacatctcagcttctgcagtgaagaaaaattcctgtgatagttcagttctttagtttttctatttgaaaaaaaaaaatcatttaaatgatcctttgttcacggctctccttaatgactgagtgaacagttcctatctgtatatttgactaaaccttttcctaagctatctctcatggttcctatgtttttttatcataattaaaagcaaaaccatctggatcacctaacagtcagaggtcagtatctcagcgtgtgaattatagaggaaatacagagagaacctcttccacttttacttttcgtccaaataaaatgcatggtgtaccagaagttgaagatcgggttgaggattggggctagctcgatgacactaaggccccaacatcgcgggacctgctgtggcgcggattcttaggaacgctgttctagccggccccctctccaggggtcgccgtggccggcattatttcctagttcttcttgtaaccctgaggtgccagcgcggggagtgaggaggggtcagggggctaaggatgcaacctctgacgttctgcgccttcctaggagagtcttacatgtgttgagatttcacaagcaatgcgagttgtaaaataccagctctacaagaagctaggctctgtgacggcatagttttcagtagctttatcacaatattcacaatggagaattatatgacatggtagcagaaataggcccttttatgtgttgcttctattttacctcaaattgtagatatagggtaatcaataaaatccatccatgcctttcacacactaagt

SEQ ID NO: 5279 - protein, 579 aa, Homo sapiens; identical to SEQ ID NO: 4111

SEQ ID NO: 5280 - DNA, 3929 bp, Homo sapiens
gggtcttgttctgtctcccaagctggagtgcagtggtgtggtcataggtcactgcagcgtcgaactcctaggctcaagtgatcctcttgcctcaggctcctgagtagctgggacaacaggcgtgtaccacacctggatactttttaaatttttggtagagaagggatctcactctattgccaagctggtgtcgaactcttggtcttaagcagccctcccacgtcagcatcccaaagtgttgggatttcagagggatcatggcccaagttgcaatgtccaccctccccgttgaagatgaggagtcctcggagagcaggatggtggtgacattcctcatgtcagctctcgagtccatgtgtaaagaactggccaagtccaaagccgaagtggcctgcattgcagtgtatgaaacagacgtgtttgtcgtcggaactgaaagaggacgtgcttttgtcaataccagaaaggattttcaaaaagattttgtaaaatattgtgttgaagaagaagaaaaagctgcagagatgcataaaatgaaatctacaacccaggcaaatcggatgagtgtagatgctgtagaaattgaaacactcagaaaaacagttgaggactatttctgcttttgctatgggaaagctttaggcaaatccacagtggtacctgtaccatatgagaagatgctgcgagaccagtcggctgtggtagtgcaggggcttccggaaggtgttgcctttaaacaccccgagaactatgatcttgcaaccctgaaatggattttggagaacaaagcagggatttcattcatcattaagagaccttttttagagccaaagaagcatgtaggtggtcgtgtgatggtaacagatgctgacaggtcaatactatctccaggtggaagttgtggccccatcaaagtgaaaactgaacccacagaagattctggaagccaccattcttcagagggcaatgaaggcacagaaatggaagtaccagcagaagattctactcaacatgtcccttcagaaacaagtgaggaccctgaagttgaggtgactattgaagatgatgattattctccaccgtctaagagaccaaaggccaatgagctaccgcagccaccagtcccggaacccgccaatgctgggaagcggaaagtgagggagttcaacttcgagaaatggaatgctcgcatcactgatctacgtaaacaagttgaagaattgtttgaaaggaaatatgctcaagccataaaagccaaaggtccggtgacgatcccgtaccctcttttccagtctcatgttgaagatctttatgtagaaggacttcctgaaggaattccttttagaaggccatctacttacggaattcctcgcctggagaggatattacttgcaaaggaaaggattcgttttgtgattaagaaacatgagcttctgaattcaacacgtgaagatttacagcttgataagccagcttcaggagtaaaggaagaatggtatgccagaatcactaaattaagaaagatggtggatcagcttttctgcaaaaaatttgcggaagccttggggagcactgaagccaaggctgtaccgtaccaaaaatttgaggcacacccgaatgatctgtacgtggaaggactgccagaaaacattcctttccgaagtccctcatggtatggaatcccaaggctggaaaaaatcattcaagtgggcaatcgaattaaatttgttattaaaagaccagaacttctgactcacagtaccactgaagttactcagccaagaacgaatacaccagtcaaagaagattggaatgtcagaattaccaagctacggaagcaagtggaagagatttttaatttgaaatttgctcaagctcttggactcaccgaggcagtaaaagtaccatatcctgtgtttgaatcaaacccggagttcttgaaaggatcgtccgcgggagtaataaaatcaagttcgttgttaaaaaacctgaactagttatttcctacttgcctcctgggatggctagtaaaataaacactaaagctttgcagtcccccaaaagaccacgaagtcctgggagtaattcaaaggttcctgaaattgaggtcaccgtggaaggccctaataacaacaatcctcaaacctcagctgttcgaaccccgacccagactaacggttctaacgttcccttcaagccacgagggagagagttttcctttgaggcctggaatgccaaaatcacggacctaaaacagaaagttgaaaatctcttcaatgagaaatgtggggaagctcttggccttaaacaagctgtgaaggtgccgttcgcgttatttgagtctttcccggaagacttttatgtggaaggcttacctgagggtgtgccattccgaagaccatcgacttttggcattccgaggctggagaagatactcagaaacaaagccaaaattaagttcatcattaaaaagcccgaaatgtttgagacggcgattaaggagagcacctcctctaagagccctcccagaaaaataaattcatcacccaatgttaatactactgcatcaggtgttgaagaccttaacatcattcaggtgacaattccagatgatgataatgaaagactctcgaaagttgaaaaagctagacagctaagagaacaagtgaatgacctctttagtcggaaatttggtgaagctattggtatgggttttcctgtgaaagttccctacaggaaaatcacaattaaccctggctgtgtggtggttgatggcatgcccccgggggtgtccttcaaagcccccagctacctggaaatcagctccatgagaaggatcttagactctgccgagtttatcaaattcacggtcattagaccatttccaggacttgtgattaataaccagctggttgatcagagtgagtcagaaggccccgtgatacaagaatcagctgaaccaagccagttggaagttccagccacagaagaaataaaagagactgatggaagctctcagatcaagcaagaaccagaccccacgtggtagacctcttccctcctaggagccttgagttacggtgtttattttccaatcaagtgaagatatctcctacttctcctactggaacatctcagcttctgcagtgaagaaaaattcctgtgatagttcagttctttagtttttctatttgaaaaaaaaaaatcatttaaatgatcctttgttcacggctctccttaatgactgagtgaacagttcctatctgtatatttgactaaaccttttcctaagctatctctcatggttcctatgtttttttatcataattaaaagcaaaaccatctggatcacctaacagtcagaggtcagtatctcagcgtgtgaattatagaggaaatacagagagaacctcttccacttttacttttcgtccaaataaaatgcatggtgtaccagaagttgaagatcgggttgaggattggggctagctcgatgacactaaggccccaacatcgcgggacctgctgtggcgcggattcttaggaacgctgttctagccggccccctctccaggggtcgccgtggccggcattatttcctagttcttcttgtaaccctgaggtgccagcgcggggagtgaggaggggtcagggggctaaggatgcaacctctgacgttctgcgccttcctaggagagtcttacatgtgttgagatttcacaagcaatgcgagttgtaaaataccagctctacaagaagctaggctctgtgacggcatagttttcagtagctttatcacaatattcacaatggagaattatatgacatggtagcagaaataggcccttttatgtgttgcttctattttacctcaaattgtagatatagggtaatcaataaaatccatccatgcctttcacacactaagt

SEQ ID NO: 5281 - protein, 579 aa, Homo sapiens; identical to SEQ ID NO: 4111

SEQ ID NO: 5282 - DNA, 7923 bp, Homo sapiens
gggtcttgttctgtctcccaagctggagtgcagtggtgtggtcataggtcactgcagcgtcgaactcctaggctcaagtgatcctcttgcctcaggctcctgagtagctgggacaacaggcgtgtaccacacctggatactttttaaatttttggtagagaagggatctcactctattgccaagctggtgtcgaactcttggtcttaagcagccctcccacgtcagcatcccaaagtgttgggatttcagagggatcatggcccaagttgcaatgtccaccctccccgttgaagatgaggagtcctcggagagcaggatggtggtgacattcctcatgtcagctctcgagtccatgtgtaaagaactggccaagtccaaagccgaagtggcctgcattgcagtgtatgaaacagacgtgtttgtcgtcggaactgaaagaggacgtgcttttgtcaataccagaaaggattttcaaaaagattttgtaaaatattgtgttgaagaagaagaaaaagctgcagagatgcataaaatgaaatctacaacccaggcaaatcggatgagtgtagatgctgtagaaattgaaacactcagaaaaacagttgaggactatttctgcttttgctatgggaaagctttaggcaaatccacagtggtacctgtaccatatgagaagatgctgcgagaccagtcggctgtggtagtgcaggggcttccggaaggtgttgcctttaaacaccccgagaactatgatcttgcaaccctgaaatggattttggagaacaaagcagggatttcattcatcattaagagaccttttttagagccaaagaagcatgtaggtggtcgtgtgatggtaacagatgctgacaggtcaatactatctccaggtggaagttgtggccccatcaaagtgaaaactgaacccacagaagattctggcatttccctggaaatggcagctgtgacagtaaaggaagaatcagaagatcctgattattatcaatataacattcaaggaagccaccattcttcagagggcaatgaaggcacagaaatggaagtaccagcagaagattctactcaacatgtcccttcagaaacaagtgaggaccctgaagttgaggtgactattgaagatgatgattattctccaccgtctaagagaccaaaggccaatgagctaccgcagccaccagtcccggaacccgccaatgctgggaagcggaaagtgagggagttcaacttcgagaaatggaatgctcgcatcactgatctacgtaaacaagttgaagaattgtttgaaaggaaatatgctcaagccataaaagccaaaggtccggtgacgatcccgtaccctcttttccagtctcatgttgaagatctttatgtagaaggacttcctgaaggaattccttttagaaggccatctacttacggaattcctcgcctggagaggatattacttgcaaaggaaaggattcgttttgtgattaagaaacatgagcttctgaattcaacacgtgaagatttacagcttgataagccagcttcaggagtaaaggaagaatggtatgccagaatcactaaattaagaaagatggtggatcagcttttctgcaaaaaatttgcggaagccttggggagcactgaagccaaggctgtaccgtaccaaaaatttgaggcacacccgaatgatctgtacgtggaaggactgccagaaaacattcctttccgaagtccctcatggtatggaatcccaaggctggaaaaaatcattcaagtgggcaatcgaattaaatttgttattaaaagaccagaacttctgactcacagtaccactgaagttactcagccaagaacgaatacaccagtcaaagaagattggaatgtcagaattaccaagctacggaagcaagtggaagagatttttaatttgaaatttgcttagatttgttgacagcggtttcctggagtgctgtcttgagaacgattctgaggaggctcagcaagaaagagtgtttcagttgattgggtgtgtctgtcatggagaaggaactcaagctcttggactcaccgaggcagtaaaagtaccatatcctgtgtttgaatcaaacccggagttcttgtatgtggaaggcttgccagaggggattcccttccgaagccctacctggtttggaattccacgacttgaaaggatcgtccgcgggagtaataaaatcaagttcgttgttaaaaaacctgaactagttatttcctacttgcctcctgggatggctagtaaaataaacactaaagctttgcagtcccccaaaagaccacgaagtcctgggagtaattcaaaggttcctgaaattgaggtcaccgtggaaggccctaataacaacaatcctcaaacctcagctgttcgaaccccgacccagactaacggttctaacgttcccttcaagccacgagggagagagttttcctttgaggcctggaatgccaaaatcacggacctaaaacagaaagttgaaaatctcttcaatgagaaatgtggggaagctcttggccttaaacaagctgtgaaggtgccgttcgcgttatttgagtctttcccggaagacttttatgtggaaggcttacctgagggtgtgccattccgaagaccatcgacttttggcattccgaggctggagaagatactcagaaacaaagccaaaattaagttcatcattaaaaagcccgaaatgtttgagacggcgattaaggagagcacctcctctaagagccctcccagaaaaataaattcatcacccaatgttaatactactgcatcaggtgttgaagaccttaacatcattcaggtgacaattccagatgatgataatgaaagactctcgaaagttgaaaaagctagacagctaagagaacaagtgaatgacctctttagtcggaaatttggtgaagctattggtatgggttttcctgtgaaagttccctacaggaaaatcacaattaaccctggctgtgtggtggttgatggcatgcccccgggggtgtccttcaaagcccccagctacctggaaatcagctccatgagaaggatcttagactctgccgagtttatcaaattcacggtcattaggtaagtgagagtttcctgcttagtcacaggagcgaatctggagctcatgaggctgactcttctaaaatgcagccacaggtagtcatcgaatccggcttcctatgctgtgcaatcaacaaatcaaaataacttgtgtcatcattagaatgtcagatgtgcttctacgaactaagctgactcttttaattctttggcaaagggttggcaaactaggactgtttgccaaattcaggctgcctcctatttttagagtcttcctgaaacacagctacacccgtattatccatggctgctttcctgtcacagtgagtaagtagctgggactgagaaggcatggcctccaaagtctaaaatatttactctctagcactttgtagaaaaaccttagctaggcacagtggctaacgcctgtaatcccagcattttgggaggccaaggcaggcagatcacctgaggtcaggagttccagaccagcctggccaacatggtgaaatcccatctctacaaaaataaaacagttagctgggcatgatggcgggtgcctgtaatcccagctactcgggaggctgaggcaggatagtcgcttgaacccaggaggtggaggttgcaatgagccaagatcatgccactgcactccagcctggacgacagagtgagactccatcacaagaaaaaaagaactttgtcaacctctgtcttagggcgccttgtcacaggcttcgggtcagacggattcaaccttgcatcagccatttgttagccaggtcactctgttctttgtctgtaaatgagattgatcgttgttcccactgagagtgtcagctccttcccgtagagcaggcatgatgattgtactcacctctgacaccattgtgagtgccacattccttcccacgtccttgtcactgtaagagatgcccacctgagcaccaaccccaggttatcttcccctttgtcttccagccccccagaaacagctacgactcaacctacccaatcatttcatcatcagattgccactgtctctagttcaggtctcttgggactggcactcagaaatctcataataaatcctcttgaggcttctcatacactcgtcttcttccaatcttctttccctcaaaatctcatattttggttccacttcacccaccgtcattctccatatcactcccaggagttaggcaaaaagccccttccgttcttccgtatgttaaacttagaatcactctgttccctgctctgcgtttctattttttgtttttcctccatttactagtagcttaacactttctaacagtgttcttattattgatacgtatctatctcttccataagcttataaggtcacggataatacttctcattgtagtacgtaaatgacgtgggctagatatgagttgaataaacagttatacctgtaaattcttacagagtgaaaataaattgttatactttacaatttgtttctctctttagaccatttccaggacttgtgattaataaccgtgagtattttgtgaagtgttttgtttttgttttttcctggggtctgacgtgtgtgcgtgtgagtgtgtatacatgcttaacgtatatcacgttacttcacctatgtcagtaaccaggccaaatacttgttttagccctcagtaaaaacaccaggcacttcctagttgtaaaattattcaagcttcttaacttcctatcctcgatgcacttaatcataaaatggtaataatagcaccgattttgggggagtcgttccagtagatggaaagcatctggaacaggtgtcagcaagctcctgccgacgtgtatgcataaagttttattgaaaccaccatcgtgtccatttgtttatggcagaactgagagatggcagcagcaagtgtgtgcctgcaaaacctaaaatatttactaattggctctgcaagaaaagagtttgcatccccctaacctagaacagtgtctagcctctagtatgtgtttagcctacagtatgtgctcagcgaatacaatctatatttattactgcttttatgactgttataattactgtgcttggatttcgttacaaagtaagtcacaatgtgcctgcttctgttagtatttcagcacagtgcctggcacacatggggctctcaaatattgctgagcgagtgaacaaatgtcctttcaattccttaacgttgatgtcattttcaatagtattttgagccaaacttaattttgcgagtgtgttttgttttcttaactttattattaaaaatgtataaaagtgaggccaggcgtggtggctcacgcctgtaatcccagcagtttgggaggctgaggcaggcggatcagttgaggttgggagttggagaccagcccgtccaacatggtgaaagcctgtctctactaaaaatacaaaaatcagctgggtgtggtggcgcgtgcctgtaatcccagctactcaggaggctgaggcaggagagttgcttgaatcctagaggtggaggttgcagtgagctgagatcgtgccattgcactccagcctgggcaacaagagcaaaactctgtcccaataaataaataaataaaatgttctcttttgttcctgttcttgtgcggtagtgtggtatagagttttatggtaattactgtgaattagtgattctgagggacatatcagaactctgaggtttgtttccttctcatcttgagggaaacagcaaatgtatgttaaaatgcttttccaagggaacaacacatccttacattatttaaaccaatctgcttcattttcagagctggttgatcagagtgagtcagaaggccccgtgatacaagaatcagctgaaccaagccagttggaagttccagccacagaagaaataaaagagactgatggaagctctcagatcaagcaagaaccagaccccacgtggtagacctcttccctcctagggtaaatcagcttctgtgtcagggatgctgtgtggtgtccatctgaaccccctgcatacgcgtagctaatgtgatctccccactttcacataagatggtggccctgccttcagggaatgtgggagccaggtgggagccttcccggatatttaagctagaagattctacagggagattctccttggatcaatatatgtctctcagtcaaagatgtaaaagcacttttgccttaaaaagaatgttctgtttctaaatagagtcaacgttgtcctcctcattggaattcactatgagtcagaatcattagactgacttttttttttccatagtaatagtattttgcagagtctcacagagctgcagatcttttgttcatcttgcagagttaacaagtctgatcctgttagtccagatttcttaaatttggccaagttataataggagcagtagcttgagacccgaagtcaggaaactttgacaatggatttttttttttaatccagagacttgtactggaatttgccttaccctgtcagctcatggacttaaggtttcatcccgctttatgagtgcttctgaatccaagtcattgttacctgaatttgcaaattaagttgtgatattcgtgactgttaaattcctgtaattagattaacctctttgcttgcttgtttgttttctctcctattttagcttaaagtatcagtggttgagaagagcttttcggacctgttactaccccaagctgtgtaatatacttgtataacagaaataccttctatacaaacctttttttctacttttagatagaaatgtctactttttcagcagttctgtgaattaaagagcagagtgactgtgggtctggaatggctggtgtacttgggaatgtactatcaggattttacagcaatgctgggaaatgacagggaaaatgacaggaatgaatctcaccagattttttatgtactcagcagagccttgagttacggtgtttattttccaatcaagtgaagatatctcctacttctcctactggaacatctcagcttctgcagtgaagaaaaattcctgtgatagttcagttctttagtttttctatttgaaaaaaaaaaatcatttaaatgatcctttgttcacggctctccttaatgactgagtgaacagttcctatctgtatatttgactaaaccttttcctaagctatctctcatggttcctatgtttttttatcataattaaaagcaaaaccatctggatcacctaacagtcagaggtcagtatctcagcgtgtgaattatagaggaaatacagagagaacctcttccacttttacttttcgtccaaataaaatgcatggtgtaccagaagttgaagatcgggttgaggattggggctagctcgatgacactaaggccccaacatcgcgggacctgctgtggcgcggattcttaggaacgctgttctagccggccccctctccaggggtcgccgtggccggcattatttcctagttcttcttgtaaccctgaggtgccagcgcggggagtgaggaggggtcagggggctaaggatgcaacctctgacgttctgcgccttcctaggagagtcttacatgtgttgagatttcacaagcaatgcgagttgtaaaataccagctctacaagaagctaggctctgtgacggcatagttttcagtagctttatcacaatattcacaatggagaattatatgacatggtagcagaaataggcccttttatgtgttgcttctattttacctcaaattgtagatatagggtaatcaataaaatccatccatgcctttcacacactaagt

SEQ ID NO: 5283 - protein, 564 aa, Homo sapiens; identical to SEQ ID NO: 4061

SEQ ID NO: 5284 - DNA, 4346 bp, Homo sapiens
gggtcttgttctgtctcccaagctggagtgcagtggtgtggtcataggtcactgcagcgtcgaactcctaggctcaagtgatcctcttgcctcaggctcctgagtagctgggacaacaggcgtgtaccacacctggatactttttaaatttttggtagagaagggatctcactctattgccaagctggtgtcgaactcttggtcttaagcagccctcccacgtcagcatcccaaagtgttgggatttcagagggatcatggcccaagttgcaatgtccaccctccccgttgaagatgaggagtcctcggagagcaggatggtggtgacattcctcatgtcagctctcgagtccatgtgtaaagaactggccaagtccaaagccgaagtggcctgcattgcagtgtatgaaacagacgtgtttgtcgtcggaactgaaagaggacgtgcttttgtcaataccagaaaggattttcaaaaagattttgtaaaatattgtgttgaagaagaagaaaaagctgcagagatgcataaaatgaaatctacaacccaggcaaatcggatgagtgtagatgctgtagaaattgaaacactcagaaaaacagttgaggactatttctgcttttgctatgggaaagctttaggcaaatccacagtggtacctgtaccatatgagaagatgctgcgagaccagtcggctgtggtagtgcaggggcttccggaaggtgttgcctttaaacaccccgagaactatgatcttgcaaccctgaaatggattttggagaacaaagcagggatttcattcatcattaagagaccttttttagagccaaagaagcatgtaggtggtcgtgtgatggtaacagatgctgacaggtcaatactatctccaggtggaagttgtggccccatcaaagtgaaaactgaacccacagaagattctggcatttccctggaaatggcagctgtgacagtaaaggaagaatcagaagatcctgattattatcaatataacattcaagcaggcccttctgaaactgatgatgttgatgaaaaacagcccctatcgaagcctttgcaaggaagccaccattcttcagagggcaatgaaggcacagaaatggaagtaccagcagaagattctactcaacatgtcccttcagaaacaagtgaggaccctgaagttgaggtgactattgaagatgatgattattctccaccgtctaagagaccaaaggccaatgagctaccgcagccaccagtcccggaacccgccaatgctgggaagcggaaagtgagggagttcaacttcgagaaatggaatgctcgcatcactgatctacgtaaacaagttgaagaattgtttgaaaggaaatatgctcaagccataaaagccaaaggtccggtgacgatcccgtaccctcttttccagtctcatgttgaagatctttatgtagaaggacttcctgaaggaattccttttagaaggccatctacttacggaattcctcgcctggagaggatattacttgcaaaggaaaggattcgttttgtgattaagaaacatgagcttctgaattcaacacgtgaagatttacagcttgataagccagcttcaggagtaaaggaagaatggtatgccagaatcactaaattaagaaagatggtggatcagcttttctgcaaaaaatttgcggaagccttggggagcactgaagccaaggctgtaccgtaccaaaaatttgaggcacacccgaatgatctgtacgtggaaggactgccagaaaacattcctttccgaagtccctcatggtatggaatcccaaggctggaaaaaatcattcaagtgggcaatcgaattaaatttgttattaaaagaccagaacttctgactcacagtaccactgaagttactcagccaagaacgaatacaccagctcaagctcttggactcaccgaggcagtaaaagtaccatatcctgtgtttgaatcaaacccggagttcttgtatgtggaaggcttgccagaggggattcccttccgaagccctacctggtttggaattccacgacttgaaaggatcgtccgcgggagtaataaaatcaagttcgttgttaaaaaacctgaactagttatttcctacttgcctcctgggatggctagtaaaataaacactaaagctttgcagtcccccaaaagaccacgaagtcctgggagtaattcaaaggttcctgaaattgaggtcaccgtggaaggccctaataacaacaatcctcaaacctcagctgttcgaaccccgacccagactaacggttctaacgttcccttcaagccacgagggagagagttttcctttgaggcctggaatgccaaaatcacggacctaaaacagaaagttgaaaatctcttcaatgagaaatgtggggaagctcttggccttaaacaagctgtgaaggtgccgttcgcgttatttgagtctttcccggaagacttttatgtggaaggcttacctgagggtgtgccattccgaagaccatcgacttttggcattccgaggctggagaagatactcagaaacaaagccaaaattaagttcatcattaaaaagcccgaaatgtttgagacggcgattaaggagagcacctcctctaagagccctcccagaaaaataaattcatcacccaatgttaatactactgcatcaggtgttgaagaccttaacatcattcaggtgacaattccagatgatgataatgaaagactctcgaaagttgaaaaagctagacagctaagagaacaagtgaatgacctctttagtcggaaatttggtgaagctattggtatgggttttcctgtgaaagttccctacaggaaaatcacaattaaccctggctgtgtggtggttgatggcatgcccccgggggtgtccttcaaagcccccagctacctggaaatcagctccatgagaaggatcttagactctgccgagtttatcaaattcacggtcattagaccatttccaggacttgtgattaataaccagctggttgatcagagtgagtcagaaggccccgtgatacaagaatcagctgaaccaagccagttggaagttccagccacagaagaaataaaagagactgatggaagctctcagatcaagcaagaaccagaccccacgtggtagacctcttccctcctaggcttaaagtatcagtggttgagaagagcttttcggacctgttactaccccaagctgtgtaatatacttgtataacagaaataccttctatacaaacctttttttctacttttagatagaaatgtctactttttcagcagttctgtgaattaaagagcagagtgactgtgggtctggaatggctggtgtacttgggaatgtactatcaggattttacagcaatgctgggaaatgacagggaaaatgacaggaatgaatctcaccagattttttatgtactcagcagagccttgagttacggtgtttattttccaatcaagtgaagatatctcctacttctcctactggaacatctcagcttctgcagtgaagaaaaattcctgtgatagttcagttctttagtttttctatttgaaaaaaaaaaatcatttaaatgatcctttgttcacggctctccttaatgactgagtgaacagttcctatctgtatatttgactaaaccttttcctaagctatctctcatggttcctatgtttttttatcataattaaaagcaaaaccatctggatcacctaacagtcagaggtcagtatctcagcgtgtgaattatagaggaaatacagagagaacctcttccacttttacttttcgtccaaataaaatgcatggtgtaccagaagttgaagatcgggttgaggattggggctagctcgatgacactaaggccccaacatcgcgggacctgctgtggcgcggattcttaggaacgctgttctagccggccccctctccaggggtcgccgtggccggcattatttcctagttcttcttgtaaccctgaggtgccagcgcggggagtgaggaggggtcagggggctaaggatgcaacctctgacgttctgcgccttcctaggagagtcttacatgtgttgagatttcacaagcaatgcgagttgtaaaataccagctctacaagaagctaggctctgtgacggcatagttttcagtagctttatcacaatattcacaatggagaattatatgacatggtagcagaaataggcccttttatgtgttgcttctattttacctcaaattgtagatatagggtaatcaataaaatccatccatgcctttcacacactaagt

SEQ ID NO: 5285 - protein, 974 aa, Homo sapiens; identical to SEQ ID NO: 4101

SEQ ID NO: 5286 - DNA, 4283 bp, Homo sapiens
gggtcttgttctgtctcccaagctggagtgcagtggtgtggtcataggtcactgcagcgtcgaactcctaggctcaagtgatcctcttgcctcaggctcctgagtagctgggacaacaggcgtgtaccacacctggatactttttaaatttttggtagagaagggatctcactctattgccaagctggtgtcgaactcttggtcttaagcagccctcccacgtcagcatcccaaagtgttgggatttcagagggatcatggcccaagttgcaatgtccaccctccccgttgaagatgaggagtcctcggagagcaggatggtggtgacattcctcatgtcagctctcgagtccatgtgtaaagaactggccaagtccaaagccgaagtggcctgcattgcagtgtatgaaacagacgtgtttgtcgtcggaactgaaagaggacgtgcttttgtcaataccagaaaggattttcaaaaagattttgtaaaatattgtgttgaagaagaagaaaaagctgcagagatgcataaaatgaaatctacaacccaggcaaatcggatgagtgtagatgctgtagaaattgaaacactcagaaaaacagttgaggactatttctgcttttgctatgggaaagctttaggcaaatccacagtggtacctgtaccatatgagaagatgctgcgagaccagtcggctgtggtagtgcaggggcttccggaaggtgttgcctttaaacaccccgagaactatgatcttgcaaccctgaaatggattttggagaacaaagcagggatttcattcatcattaagagaccttttttagagccaaagaagcatgtaggtggtcgtgtgatggtaacagatgctgacaggtcaatactatctccaggtggaagttgtggccccatcaaagtgaaaactgaacccacagaagattctggcatttccctggaaatggcagctgtgacagtaaaggaagaatcagaagatcctgattattatcaatataacattcaagcaggcccttctgaaactgatgatgttgatgaaaaacagcccctatcgaagcctttgcaaggaagccaccattcttcagagggcaatgaaggcacagaaatggaagtaccagcagaagatgatgattattctccaccgtctaagagaccaaaggccaatgagctaccgcagccaccagtcccggaacccgccaatgctgggaagcggaaagtgagggagttcaacttcgagaaatggaatgctcgcatcactgatctacgtaaacaagttgaagaattgtttgaaaggaaatatgctcaagccataaaagccaaaggtccggtgacgatcccgtaccctcttttccagtctcatgttgaagatctttatgtagaaggacttcctgaaggaattccttttagaaggccatctacttacggaattcctcgcctggagaggatattacttgcaaaggaaaggattcgttttgtgattaagaaacatgagcttctgaattcaacacgtgaagatttacagcttgataagccagcttcaggagtaaaggaagaatggtatgccagaatcactaaattaagaaagatggtggatcagcttttctgcaaaaaatttgcggaagccttggggagcactgaagccaaggctgtaccgtaccaaaaatttgaggcacacccgaatgatctgtacgtggaaggactgccagaaaacattcctttccgaagtccctcatggtatggaatcccaaggctggaaaaaatcattcaagtgggcaatcgaattaaatttgttattaaaagaccagaacttctgactcacagtaccactgaagttactcagccaagaacgaatacaccagctcaagctcttggactcaccgaggcagtaaaagtaccatatcctgtgtttgaatcaaacccggagttcttgtatgtggaaggcttgccagaggggattcccttccgaagccctacctggtttggaattccacgacttgaaaggatcgtccgcgggagtaataaaatcaagttcgttgttaaaaaacctgaactagttatttcctacttgcctcctgggatggctagtaaaataaacactaaagctttgcagtcccccaaaagaccacgaagtcctgggagtaattcaaaggttcctgaaattgaggtcaccgtggaaggccctaataacaacaatcctcaaacctcagctgttcgaaccccgacccagactaacggttctaacgttcccttcaagccacgagggagagagttttcctttgaggcctggaatgccaaaatcacggacctaaaacagaaagttgaaaatctcttcaatgagaaatgtggggaagctcttggccttaaacaagctgtgaaggtgccgttcgcgttatttgagtctttcccggaagacttttatgtggaaggcttacctgagggtgtgccattccgaagaccatcgacttttggcattccgaggctggagaagatactcagaaacaaagccaaaattaagttcatcattaaaaagcccgaaatgtttgagacggcgattaaggagagcacctcctctaagagccctcccagaaaaataaattcatcacccaatgttaatactactgcatcaggtgttgaagaccttaacatcattcaggtgacaattccagatgatgataatgaaagactctcgaaagttgaaaaagctagacagctaagagaacaagtgaatgacctctttagtcggaaatttggtgaagctattggtatgggttttcctgtgaaagttccctacaggaaaatcacaattaaccctggctgtgtggtggttgatggcatgcccccgggggtgtccttcaaagcccccagctacctggaaatcagctccatgagaaggatcttagactctgccgagtttatcaaattcacggtcattagaccatttccaggacttgtgattaataaccagctggttgatcagagtgagtcagaaggccccgtgatacaagaatcagctgaaccaagccagttggaagttccagccacagaagaaataaaagagactgatggaagctctcagatcaagcaagaaccagaccccacgtggtagacctcttccctcctaggcttaaagtatcagtggttgagaagagcttttcggacctgttactaccccaagctgtgtaatatacttgtataacagaaataccttctatacaaacctttttttctacttttagatagaaatgtctactttttcagcagttctgtgaattaaagagcagagtgactgtgggtctggaatggctggtgtacttgggaatgtactatcaggattttacagcaatgctgggaaatgacagggaaaatgacaggaatgaatctcaccagattttttatgtactcagcagagccttgagttacggtgtttattttccaatcaagtgaagatatctcctacttctcctactggaacatctcagcttctgcagtgaagaaaaattcctgtgatagttcagttctttagtttttctatttgaaaaaaaaaaatcatttaaatgatcctttgttcacggctctccttaatgactgagtgaacagttcctatctgtatatttgactaaaccttttcctaagctatctctcatggttcctatgtttttttatcataattaaaagcaaaaccatctggatcacctaacagtcagaggtcagtatctcagcgtgtgaattatagaggaaatacagagagaacctcttccacttttacttttcgtccaaataaaatgcatggtgtaccagaagttgaagatcgggttgaggattggggctagctcgatgacactaaggccccaacatcgcgggacctgctgtggcgcggattcttaggaacgctgttctagccggccccctctccaggggtcgccgtggccggcattatttcctagttcttcttgtaaccctgaggtgccagcgcggggagtgaggaggggtcagggggctaaggatgcaacctctgacgttctgcgccttcctaggagagtcttacatgtgttgagatttcacaagcaatgcgagttgtaaaataccagctctacaagaagctaggctctgtgacggcatagttttcagtagctttatcacaatattcacaatggagaattatatgacatggtagcagaaataggcccttttatgtgttgcttctattttacctcaaattgtagatatagggtaatcaataaaatccatccatgcctttcacacactaagt

SEQ ID NO: 5287 - protein, 953 aa, Homo sapiens; identical to SEQ ID NO: 4179

SEQ ID NO: 5288 - DNA, 4915 bp, Homo sapiens
gggtcttgttctgtctcccaagctggagtgcagtggtgtggtcataggtcactgcagcgtcgaactcctaggctcaagtgatcctcttgcctcaggctcctgagtagctgggacaacaggcgtgtaccacacctggatactttttaaatttttggtagagaagggatctcactctattgccaagctggtgtcgaactcttggtcttaagcagccctcccacgtcagcatcccaaagtgttgggatttcagagggatcatggcccaagttgcaatgtccaccctccccgttgaagatgaggagtcctcggagagcaggatggtggtgacattcctcatgtcagctctcgagtccatgtgtaaagaactggccaagtccaaagccgaagtggcctgcattgcagtgtatgaaacagacgtgtttgtcgtcggaactgaaagaggacgtgcttttgtcaataccagaaaggattttcaaaaagattttgtaaaatattgtgttgaagaagaagaaaaagctgcagagatgcataaaatgaaatctacaacccaggcaaatcggatgagtgtagatgctgtagaaattgaaacactcagaaaaacagttgaggactatttctgcttttgctatgggaaagctttaggcaaatccacagtggtacctgtaccatatgagaagatgctgcgagaccagtcggctgtggtagtgcaggggcttccggaaggtgttgcctttaaacaccccgagaactatgatcttgcaaccctgaaatggattttggagaacaaagcagggatttcattcatcattaagagaccttttttagagccaaagaagcatgtaggtggtcgtgtgatggtaacagatgctgacaggtcaatactatctccaggtggaagttgtggccccatcaaagtgaaaactgaacccacagaagattctggcatttccctggaaatggcagctgtgacagtaaaggaagaatcagaagatcctgattattatcaatataacattcaaggaagccaccattcttcagagggcaatgaaggcacagaaatggaagtaccagcagaagatgatgattattctccaccgtctaagagaccaaaggccaatgagctaccgcagccaccagtcccggaacccgccaatgctgggaagcggaaagtgagggagttcaacttcgagaaatggaatgctcgcatcactgatctacgtaaacaagttgaagaattgtttgaaaggaaatatgctcaagccataaaagccaaaggtccggtgacgatcccgtaccctcttttccagtctcatgttgaagatctttatgtagaaggacttcctgaaggaattccttttagaaggccatctacttacggaattcctcgcctggagaggatattacttgcaaaggaaaggattcgttttgtgattaagaaacatgagcttctgaattcaacacgtgaagatttacagcttgataagccagcttcaggagtaaaggaagaatggtatgccagaatcactaaattaagaaagatggtggatcagcttttctgcaaaaaatttgcggaagccttggggagcactgaagccaaggctgtaccgtaccaaaaatttgaggcacacccgaatgatctgtacgtggaaggactgccagaaaacattcctttccgaagtccctcatggtatggaatcccaaggctggaaaaaatcattcaagtgggcaatcgaattaaatttgttattaaaagaccagaacttctgactcacagtaccactgaagttactcagccaagaacgaatacaccagctcaagctcttggactcaccgaggcagtaaaagtaccatatcctgtgtttgaatcaaacccggagttcttgtatgtggaaggcttgccagaggggattcccttccgaagccctacctggtttggaattccacgacttgaaaggatcgtccgcgggagtaataaaatcaagttcgttgttaaaaaacctgaactagttatttcctacttgcctcctgggatggctagtaaaataaacactaaagctttgcagtcccccaaaagaccacgaagtcctgggagtaattcaaaggttcctgaaattgaggtcaccgtggaaggccctaataacaacaatcctcaaacctcagctgttcgaaccccgacccagactaacggttctaacgttcccttcaagccacgagggagagagttttcctttgaggcctggaatgccaaaatcacggacctaaaacagaaagttgaaaatctcttcaatgagaaatgtggggaagctcttggccttaaacaagctgtgaaggtgccgttcgcgttatttgagtctttcccggaagacttttatgtggaaggcttacctgagggtgtgccattccgaagaccatcgacttttggcattccgaggctggagaagatactcagaaacaaagccaaaattaagttcatcattaaaaagcccgaaatgtttgagacggcgattaaggagagcacctcctctaagagccctcccagaaaaataaattcatcacccaatgttaatactactgcatcaggtgttgaagaccttaacatcattcaggtgacaattccagatgatgataatgaaagactctcgaaagttgaaaaagctagacagctaagagaacaagtgaatgacctctttagtcggaaatttggtgaagctattggtatgggttttcctgtgaaagttccctacaggaaaatcacaattaaccctggctgtgtggtggttgatggcatgcccccgggggtgtccttcaaagcccccagctacctggaaatcagctccatgagaaggatcttagactctgccgagtttatcaaattcacggtcattagaccatttccaggacttgtgattaataaccagctggttgatcagagtgagtcagaaggccccgtgatacaagaatcagctgaaccaagccagttggaagttccagccacagaagaaataaaagagactgatggaagctctcagatcaagcaagaaccagaccccacgtggtagacctcttccctcctagggtaaatcagcttctgtgtcagggatgctgtgtggtgtccatctgaaccccctgcatacgcgtagctaatgtgatctccccactttcacataagatggtggccctgccttcagggaatgtgggagccaggtgggagccttcccggatatttaagctagaagattctacagggagattctccttggatcaatatatgtctctcagtcaaagatgtaaaagcacttttgccttaaaaagaatgttctgtttctaaatagagtcaacgttgtcctcctcattggaattcactatgagtcagaatcattagactgacttttttttttccatagtaatagtattttgcagagtctcacagagctgcagatcttttgttcatcttgcagagttaacaagtctgatcctgttagtccagatttcttaaatttggccaagttataataggagcagtagcttgagacccgaagtcaggaaactttgacaatggatttttttttttaatccagagacttgtactggaatttgccttaccctgtcagctcatggacttaaggtttcatcccgctttatgagtgcttctgaatccaagtcattgttacctgaatttgcaaattaagttgtgatattcgtgactgttaaattcctgtaattagattaacctctttgcttgcttgtttgttttctctcctattttagcttaaagtatcagtggttgagaagagcttttcggacctgttactaccccaagctgtgtaatatacttgtataacagaaataccttctatacaaacctttttttctacttttagatagaaatgtctactttttcagcagttctgtgaattaaagagcagagtgactgtgggtctggaatggctggtgtacttgggaatgtactatcaggattttacagcaatgctgggaaatgacagggaaaatgacaggaatgaatctcaccagattttttatgtactcagcagagccttgagttacggtgtttattttccaatcaagtgaagatatctcctacttctcctactggaacatctcagcttctgcagtgaagaaaaattcctgtgatagttcagttctttagtttttctatttgaaaaaaaaaaatcatttaaatgatcctttgttcacggctctccttaatgactgagtgaacagttcctatctgtatatttgactaaaccttttcctaagctatctctcatggttcctatgtttttttatcataattaaaagcaaaaccatctggatcacctaacagtcagaggtcagtatctcagcgtgtgaattatagaggaaatacagagagaacctcttccacttttacttttcgtccaaataaaatgcatggtgtaccagaagttgaagatcgggttgaggattggggctagctcgatgacactaaggccccaacatcgcgggacctgctgtggcgcggattcttaggaacgctgttctagccggccccctctccaggggtcgccgtggccggcattatttcctagttcttcttgtaaccctgaggtgccagcgcggggagtgaggaggggtcagggggctaaggatgcaacctctgacgttctgcgccttcctaggagagtcttacatgtgttgagatttcacaagcaatgcgagttgtaaaataccagctctacaagaagctaggctctgtgacggcatagttttcagtagctttatcacaatattcacaatggagaattatatgacatggtagcagaaataggcccttttatgtgttgcttctattttacctcaaattgtagatatagggtaatcaataaaatccatccatgcctttcacacactaagt

SEQ ID NO: 5289 - protein, 933 aa, Homo sapiens; identical to SEQ ID NO: 4067

SEQ ID NO: 5290 - DNA, 4063 bp, Homo sapiens
gggtcttgttctgtctcccaagctggagtgcagtggtgtggtcataggtcactgcagcgtcgaactcctaggctcaagtgatcctcttgcctcaggctcctgagtagctgggacaacaggcgtgtaccacacctggatactttttaaatttttggtagagaagggatctcactctattgccaagctggtgtcgaactcttggtcttaagcagccctcccacgtcagcatcccaaagtgttgggatttcagagggatcatggcccaagttgcaatgtccaccctccccgttgaagatgaggagtcctcggagagcaggatggtggtgacattcctcatgtcagctctcgagtccatgtgtaaagaactggccaagtccaaagccgaagtggcctgcattgcagtgtatgaaacagacgtgtttgtcgtcggaactgaaagaggacgtgcttttgtcaataccagaaaggattttcaaaaagattttgtaaaatattgtgttgaagaagaagaaaaagctgcagagatgcataaaatgaaatctacaacccaggcaaatcggatgagtgtagatgctgtagaaattgaaacactcagaaaaacagttgaggactatttctgcttttgctatgggaaagctttaggcaaatccacagtggtacctgtaccatatgagaagatgctgcgagaccagtcggctgtggtagtgcaggggcttccggaaggtgttgcctttaaacaccccgagaactatgatcttgcaaccctgaaatggattttggagaacaaagcagggatttcattcatcattaagagaccttttttagagccaaagaagcatgtaggtggtcgtgtgatggtaacagatgctgacaggtcaatactatctccaggtggaagttgtggccccatcaaagtgaaaactgaacccacagaagattctggcatttccctggaaatggcagctgtgacagtaaaggaagaatcagaagatcctgattattatcaatataacattcaaggaagccaccattcttcagagggcaatgaaggcacagaaatggaagtaccagcagaagattctactcaacatgtcccttcagaaacaagtgaggaccctgaagttgaggtgactattgaagatgatgattattctccaccgtctaagagaccaaaggccaatgagctaccgcagccaccagtcccggaacccgccaatgctgggaagcggaaagtgagggagttcaacttcgagaaatggaatgctcgcatcactgatctacgtaaacaagttgaagaattgtttgaaaggaaatatgctcaagccataaaagccaaaggtccggtgacgatcccgtaccctcttttccagtctcatgttgaagatctttatgtagaaggacttcctgaaggaattccttttagaaggccatctacttacggaattcctcgcctggagaggatattacttgcaaaggaaaggattcgttttgtgattaagaaacatgagcttctgaattcaacacgtgaagatttacagcttgataagccagcttcaggagtaaaggaagaatggtatgccagaatcactaaattaagaaagatggtggatcagcttttctgcaaaaaatttgcggaagccttggggagcactgaagccaaggctgtaccgtaccaaaaatttgaggcacacccgaatgatctgtacgtggaaggactgccagaaaacattcctttccgaagtccctcatggtatggaatcccaaggctggaaaaaatcattcaagtgggcaatcgaattaaatttgttattaaaagaccagaacttctgactcacagtaccactgaagttactcagccaagaacgaatacaccagtcaaagaagattggaatgtcagaattaccaagctacggaagcaagtggaagagatttttaatttgaaatttgctcaagctcttggactcaccgaggcagtaaaagtaccatatcctgtgtttgaatcaaacccggagttcttgaaaggatcgtccgcgggagtaataaaatcaagttcgttgttaaaaaacctgaactagttatttcctacttgcctcctgggatggctagtaaaataaacactaaagctttgcagtcccccaaaagaccacgaagtcctgggagtaattcaaaggttcctgaaattgaggtcaccgtggaaggccctaataacaacaatcctcaaacctcagctgttcgaaccccgacccagactaacggttctaacgttcccttcaagccacgagggagagagttttcctttgaggcctggaatgccaaaatcacggacctaaaacagaaagttgaaaatctcttcaatgagaaatgtggggaagctcttggccttaaacaagctgtgaaggtgccgttcgcgttatttgagtctttcccggaagacttttatgtggaaggcttacctgagggtgtgccattccgaagaccatcgacttttggcattccgaggctggagaagatactcagaaacaaagccaaaattaagttcatcattaaaaagcccgaaatgtttgagacggcgattaaggagagcacctcctctaagagccctcccagaaaaataaattcatcacccaatgttaatactactgcatcaggtgttgaagaccttaacatcattcaggtgacaattccagatgatgataatgaaagactctcgaaagttgaaaaagctagacagctaagagaacaagtgaatgacctctttagtcggaaatttggtgaagctattggtatgggttttcctgtgaaagttccctacaggaaaatcacaattaaccctggctgtgtggtggttgatggcatgcccccgggggtgtccttcaaagcccccagctacctggaaatcagctccatgagaaggatcttagactctgccgagtttatcaaattcacggtcattagaccatttccaggacttgtgattaataaccagctggttgatcagagtgagtcagaaggccccgtgatacaagaatcagctgaaccaagccagttggaagttccagccacagaagaaataaaagagactgatggaagctctcagatcaagcaagaaccagaccccacgtggtagacctcttccctcctaggcttaaagtatcagtggttgagaagagcttttcggacctgttactaccccaagctgtagccttgagttacggtgtttattttccaatcaagtgaagatatctcctacttctcctactggaacatctcagcttctgcagtgaagaaaaattcctgtgatagttcagttctttagtttttctatttgaaaaaaaaaaatcatttaaatgatcctttgttcacggctctccttaatgactgagtgaacagttcctatctgtatatttgactaaaccttttcctaagctatctctcatggttcctatgtttttttatcataattaaaagcaaaaccatctggatcacctaacagtcagaggtcagtatctcagcgtgtgaattatagaggaaatacagagagaacctcttccacttttacttttcgtccaaataaaatgcatggtgtaccagaagttgaagatcgggttgaggattggggctagctcgatgacactaaggccccaacatcgcgggacctgctgtggcgcggattcttaggaacgctgttctagccggccccctctccaggggtcgccgtggccggcattatttcctagttcttcttgtaaccctgaggtgccagcgcggggagtgaggaggggtcagggggctaaggatgcaacctctgacgttctgcgccttcctaggagagtcttacatgtgttgagatttcacaagcaatgcgagttgtaaaataccagctctacaagaagctaggctctgtgacggcatagttttcagtagctttatcacaatattcacaatggagaattatatgacatggtagcagaaataggcccttttatgtgttgcttctattttacctcaaattgtagatatagggtaatcaataaaatccatccatgcctttcacacactaagt

SEQ ID NO: 5291 - protein, 605 aa, Homo sapiens; identical to SEQ ID NO: 4221

SEQ ID NO: 5292 - DNA, 3734 bp, Homo sapiens
gggtcttgttctgtctcccaagctggagtgcagtggtgtggtcataggtcactgcagcgtcgaactcctaggctcaagtgatcctcttgcctcaggctcctgagtagctgggacaacaggcgtgtaccacacctggatactttttaaatttttggtagagaagggatctcactctattgccaagctggtgtcgaactcttggtcttaagcagccctcccacgtcagcatcccaaagtgttgggatttcagagggatcatggcccaagttgcaatgtccaccctccccgttgaagatgaggagtcctcggagagcaggatggtggtgacattcctcatgtcagctctcgagtccatgtgtaaagaactggccaagtccaaagccgaagtggcctgcattgcagtgtatgaaacagacgtgtttgtcgtcggaactgaaagaggacgtgcttttgtcaataccagaaaggattttcaaaaagattttgtaaaatattgtgttgaagaagaagaaaaagctgcagagatgcataaaatgaaatctacaacccaggcaaatcggatgagtgtagatgctgtagaaattgaaacactcagaaaaacagttgaggactatttctgcttttgctatgggaaagctttaggcaaatccacagtggtacctgtaccatatgagaagatgctgcgagaccagtcggctgtggtagtgcaggggcttccggaaggtgttgcctttaaacaccccgagaactatgatcttgcaaccctgaaatggattttggagaacaaagcagggatttcattcatcattaagagaccttttttagagccaaagaagcatgtaggtggtcgtgtgatggtaacagatgctgacaggtcaatactatctccaggtggaagttgtggccccatcaaagtgaaaactgaacccacagaagattctggcatttccctggaaatggcagctgtgacagtaaaggaagaatcagaagatcctgattattatcaatataacattcaaggaagccaccattcttcagagggcaatgaaggcacagaaatggaagtaccagcagaagattctactcaacatgtcccttcagaaacaagtgaggaccctgaagttgaggtgactattgaagatgatgattattctccaccgtctaagagaccaaaggccaatgagctaccgcagccaccagtcccggaacccgccaatgctgggaagcggaaagtgagggagttcaacttcgagaaatggaatgctcgcatcactgatctacgtaaacaagttgaagaattgtttgaaaggaaatatgctcaagccataaaagccaaaggtccggtgacgatcccgtaccctcttttccagtctcatgttgaagatctttatgtagaaggacttcctgaaggaattccttttagaaggccatctacttacggaattcctcgcctggagaggatattacttgcaaaggaaaggattcgttttgtgattaagaaacatgagcttctgaattcaacacgtgaagatttacagcttgataagccagcttcaggagtaaaggaagaatggtatgccagaatcactaaattaagaaagatggtggatcagcttttctgcaaaaaatttgcggaagccttggggagcactgaagccaaggctgtaccgtaccaaaaatttgaggcacacccgaatgatctgtacgtggaaggactgccagaaaacattcctttccgaagtccctcatggtatggaatcccaaggctggaaaaaatcattcaagtgggcaatcgaattaaatttgttattaaaagaccagaacttctgactcacagtaccactgaagttactcagccaagaacgaatacaccagctcaagctcttggactcaccgaggcagtaaaagtaccatatcctgtgtttgaatcaaacccggagttcttgtatgtggaaggcttgccagaggggattcccttccgaagccctacctggtttggaattccacgacttgaaaggatcgtccgcgggagtaataaaatcaagttcgttgttaaaaaacctgaactagttatttcctacttgcctcctgggatggctagtaaaataaacactaaagctttgcagtcccccaaaagaccacgaagtcctgggagtaattcaaaggttcctgaaattgaggtcaccgtggaaggccctaataacaacaatcctcaaacctcagctgttcgaaccccgacccagactaacggttctaacgttcccttcaagccacgagggagagagttttcctttgaggcctggaatgccaaaatcacggacctaaaacagaaagttgaaaatctcttcaatgagaaatgtggggaagctcttggccttaaacaagctgtgaaggtgccgttcgcgttatttgagtctttcccggaagacttttatgtggaaggcttacctgagggtgtgccattccgaagaccatcgacttttggcattccgaggctggagaagatactcagaaacaaagccaaaattaagttcatcattaaaaagcccgaaatgtttgagacggcgattaaggagagcacctcctctaagagccctcccagaaaaataaattcatcacccaatgttaatactactgcatcaggtgttgaagaccttaacatcattcaggtgacaattccagatgatgataatgaaagactctcgaaagttgaaaaagctagacagctaagagaacaagtgaatgacctctttagtcggaaatttggtgaagctattggtatgggttttcctgtgaaagttccctacaggaaaatcacaattaaccctggctgtgtggtggttgatggcatgcccccgggggtgtccttcaaagcccccagctacctggaaatcagctccatgagaaggatcttagactctgccgagtttatcaaattcacggtcattagaccatttccaggacttgtgattaataaccagctggttgatcagagtgagtcagaaggccccgtgatacaagaatcagctgaaccaagccagttggaagttccagccacagaagaaataaaagagactgatggaagctctcagatcaagcaagaaccagaccccacgtggtagacctcttccctcctaggcaaaaccatctggatcacctaacagtcagaggtcagtatctcagcgtgtgaattatagaggaaatacagagagaacctcttccacttttacttttcgtccaaataaaatgcatggtgtaccagaagttgaagatcgggttgaggattggggctagctcgatgacactaaggccccaacatcgcgggacctgctgtggcgcggattcttaggaacgctgttctagccggccccctctccaggggtcgccgtggccggcattatttcctagttcttcttgtaaccctgaggtgccagcgcggggagtgaggaggggtcagggggctaaggatgcaacctctgacgttctgcgccttcctaggagagtcttacatgtgttgagatttcacaagcaatgcgagttgtaaaataccagctctacaagaagctaggctctgtgacggcatagttttcagtagctttatcacaatattcacaatggagaattatatgacatggtagcagaaataggcccttttatgtgttgcttctattttacctcaaattgtagatatagggtaatcaataaaatccatccatgcctttcacacactaagt

SEQ ID NO: 5293 - protein, 954 aa, Homo sapiens; identical to SEQ ID NO: 4155

SEQ ID NO: 5294 - DNA, 7804 bp, Homo sapiens
gggtcttgttctgtctcccaagctggagtgcagtggtgtggtcataggtcactgcagcgtcgaactcctaggctcaagtgatcctcttgcctcaggctcctgagtagctgggacaacaggcgtgtaccacacctggatactttttaaatttttggtagagaagggatctcactctattgccaagctggtgtcgaactcttggtcttaagcagccctcccacgtcagcatcccaaagtgttgggatttcagagggatcatggcccaagttgcaatgtccaccctccccgttgaagatgaggagtcctcggagagcaggatggtggtgacattcctcatgtcagctctcgagtccatgtgtaaagaactggccaagtccaaagccgaagtggcctgcattgcagtgtatgaaacagacgtgtttgtcgtcggaactgaaagaggacgtgcttttgtcaataccagaaaggattttcaaaaagattttgtaaaatattgtgttgaagaagaagaaaaagctgcagagatgcataaaatgaaatctacaacccaggcaaatcggatgagtgtagatgctgtagaaattgaaacactcagaaaaacagttgaggactatttctgcttttgctatgggaaagctttaggcaaatccacagtggtacctgtaccatatgagaagatgctgcgagaccagtcggctgtggtagtgcaggggcttccggaaggtgttgcctttaaacaccccgagaactatgatcttgcaaccctgaaatggattttggagaacaaagcagggatttcattcatcattaagagaccttttttagagccaaagaagcatgtaggtggtcgtgtgatggtaacagatgctgacaggtcaatactatctccaggtggaagttgtggccccatcaaagtgaaaactgaacccacagaagattctggcatttccctggaaatggcagctgtgacagtaaaggaagaatcagaagatcctgattattatcaatataacattcaagcaggcccttctgaaactgatgatgttgatgaaaaacagcccctatcgaagcctttgcaaggaagccaccattcttcagagggcaatgaaggcacagaaatggaagtaccagcagaagattctactcaacatgtcccttcagaaacaagtgaggaccctgaagttgaggtgactattgaagatgatgattattctccaccgtctaagagaccaaaggccaatgagctaccgcagccaccagtcccggaacccgccaatgctgggaagcggaaagtgagggagttcaacttcgagaaatggaatgctcgcatcactgatctacgtaaacaagttgaagaattgtttgaaaggaaatatgctcaagccataaaagccaaaggtccggtgacgatcccgtaccctcttttccagtctcatgttgaagatctttatgtagaaggacttcctgaaggaattccttttagaaggccatctacttacggaattcctcgcctggagaggatattacttgcaaaggaaaggattcgttttgtgattaagaaacatgagcttctgaattcaacacgtgaagatttacagcttgataagccagcttcaggagtaaaggaagaatggtatgccagaatcactaaattaagaaagatggtggatcagcttttctgcaaaaaatttgcggaagccttggggagcactgaagccaaggctgtaccgtaccaaaaatttgaggcacacccgaatgatctgtacgtggaaggactgccagaaaacattcctttccgaagtccctcatggtatggaatcccaaggctggaaaaaatcattcaagtgggcaatcgaattaaatttgttattaaaagaccagaacttctgactcacagtaccactgaagttactcagccaagaacgaatacaccagtcaaagaagattggaatgtcagaattaccaagctacggaagcaagtggaagagatttttaatttgaaatttgctcaagctcttggactcaccgaggcagtaaaagtaccatatcctgtgtttgaatcaaacccggagttcttgaaaggatcgtccgcgggagtaataaaatcaagttcgttgttaaaaaacctgaactagttatttcctacttgcctcctgggatggctagtaaaataaacactaaagctttgcagtcccccaaaagaccacgaagtcctgggagtaattcaaaggttcctgaaattgaggtcaccgtggaaggccctaataacaacaatcctcaaacctcagctgttcgaaccccgacccagactaacggttctaacgttcccttcaagccacgagggagagagttttcctttgaggcctggaatgccaaaatcacggacctaaaacagaaagttgaaaatctcttcaatgagaaatgtggggaagctcttggccttaaacaagctgtgaaggtgccgttcgcgttatttgagtctttcccggaagacttttatgtggaaggcttacctgagggtgtgccattccgaagaccatcgacttttggcattccgaggctggagaagatactcagaaacaaagccaaaattaagttcatcattaaaaagcccgaaatgtttgagacggcgattaaggagagcacctcctctaagagccctcccagaaaaataaattcatcacccaatgttaatactactgcatcaggtgttgaagaccttaacatcattcaggtgacaattccagatgatgataatgaaagactctcgaaagttgaaaaagctagacagctaagagaacaagtgaatgacctctttagtcggaaatttggtgaagctattggtatgggttttcctgtgaaagttccctacaggaaaatcacaattaaccctggctgtgtggtggttgatggcatgcccccgggggtgtccttcaaagcccccagctacctggaaatcagctccatgagaaggatcttagactctgccgagtttatcaaattcacggtcattaggtaagtgagagtttcctgcttagtcacaggagcgaatctggagctcatgaggctgactcttctaaaatgcagccacaggtagtcatcgaatccggcttcctatgctgtgcaatcaacaaatcaaaataacttgtgtcatcattagaatgtcagatgtgcttctacgaactaagctgactcttttaattctttggcaaagggttggcaaactaggactgtttgccaaattcaggctgcctcctatttttagagtcttcctgaaacacagctacacccgtattatccatggctgctttcctgtcacagtgagtaagtagctgggactgagaaggcatggcctccaaagtctaaaatatttactctctagcactttgtagaaaaaccttagctaggcacagtggctaacgcctgtaatcccagcattttgggaggccaaggcaggcagatcacctgaggtcaggagttccagaccagcctggccaacatggtgaaatcccatctctacaaaaataaaacagttagctgggcatgatggcgggtgcctgtaatcccagctactcgggaggctgaggcaggatagtcgcttgaacccaggaggtggaggttgcaatgagccaagatcatgccactgcactccagcctggacgacagagtgagactccatcacaagaaaaaaagaactttgtcaacctctgtcttagggcgccttgtcacaggcttcgggtcagacggattcaaccttgcatcagccatttgttagccaggtcactctgttctttgtctgtaaatgagattgatcgttgttcccactgagagtgtcagctccttcccgtagagcaggcatgatgattgtactcacctctgacaccattgtgagtgccacattccttcccacgtccttgtcactgtaagagatgcccacctgagcaccaaccccaggttatcttcccctttgtcttccagccccccagaaacagctacgactcaacctacccaatcatttcatcatcagattgccactgtctctagttcaggtctcttgggactggcactcagaaatctcataataaatcctcttgaggcttctcatacactcgtcttcttccaatcttctttccctcaaaatctcatattttggttccacttcacccaccgtcattctccatatcactcccaggagttaggcaaaaagccccttccgttcttccgtatgttaaacttagaatcactctgttccctgctctgcgtttctattttttgtttttcctccatttactagtagcttaacactttctaacagtgttcttattattgatacgtatctatctcttccataagcttataaggtcacggataatacttctcattgtagtacgtaaatgacgtgggctagatatgagttgaataaacagttatacctgtaaattcttacagagtgaaaataaattgttatactttacaatttgtttctctctttagaccatttccaggacttgtgattaataaccgtgagtattttgtgaagtgttttgtttttgttttttcctggggtctgacgtgtgtgcgtgtgagtgtgtatacatgcttaacgtatatcacgttacttcacctatgtcagtaaccaggccaaatacttgttttagccctcagtaaaaacaccaggcacttcctagttgtaaaattattcaagcttcttaacttcctatcctcgatgcacttaatcataaaatggtaataatagcaccgattttgggggagtcgttccagtagatggaaagcatctggaacaggtgtcagcaagctcctgccgacgtgtatgcataaagttttattgaaaccaccatcgtgtccatttgtttatggcagaactgagagatggcagcagcaagtgtgtgcctgcaaaacctaaaatatttactaattggctctgcaagaaaagagtttgcatccccctaacctagaacagtgtctagcctctagtatgtgtttagcctacagtatgtgctcagcgaatacaatctatatttattactgcttttatgactgttataattactgtgcttggatttcgttacaaagtaagtcacaatgtgcctgcttctgttagtatttcagcacagtgcctggcacacatggggctctcaaatattgctgagcgagtgaacaaatgtcctttcaattccttaacgttgatgtcattttcaatagtattttgagccaaacttaattttgcgagtgtgttttgttttcttaactttattattaaaaatgtataaaagtgaggccaggcgtggtggctcacgcctgtaatcccagcagtttgggaggctgaggcaggcggatcagttgaggttgggagttggagaccagcccgtccaacatggtgaaagcctgtctctactaaaaatacaaaaatcagctgggtgtggtggcgcgtgcctgtaatcccagctactcaggaggctgaggcaggagagttgcttgaatcctagaggtggaggttgcagtgagctgagatcgtgccattgcactccagcctgggcaacaagagcaaaactctgtcccaataaataaataaataaaatgttctcttttgttcctgttcttgtgcggtagtgtggtatagagttttatggtaattactgtgaattagtgattctgagggacatatcagaactctgaggtttgtttccttctcatcttgagggaaacagcaaatgtatgttaaaatgcttttccaagggaacaacacatccttacattatttaaaccaatctgcttcattttcagagctggttgatcagagtgagtcagaaggccccgtgatacaagaatcagctgaaccaagccagttggaagttccagccacagaagaaataaaagagactgatggaagctctcagatcaagcaagaaccagaccccacgtggtagacctcttccctcctagggtaaatcagcttctgtgtcagggatgctgtgtggtgtccatctgaaccccctgcatacgcgtagctaatgtgatctccccactttcacataagatggtggccctgccttcagggaatgtgggagccaggtgggagccttcccggatatttaagctagaagattctacagggagattctccttggatcaatatatgtctctcagtcaaagatgtaaaagcacttttgccttaaaaagaatgttctgtttctaaatagagtcaacgttgtcctcctcattggaattcactatgagtcagaatcattagactgacttttttttttccatagtaatagtattttgcagagtctcacagagctgcagatcttttgttcatcttgcagagttaacaagtctgatcctgttagtccagatttcttaaatttggccaagttataataggagcagtagcttgagacccgaagtcaggaaactttgacaatggatttttttttttaatccagagacttgtactggaatttgccttaccctgtcagctcatggacttaaggtttcatcccgctttatgagtgcttctgaatccaagtcattgttacctgaatttgcaaattaagttgtgatattcgtgactgttaaattcctgtaattagattaacctctttgcttgcttgtttgttttctctcctattttagcttaaagtatcagtggttgagaagagcttttcggacctgttactaccccaagctgtgtaatatacttgtataacagaaataccttctatacaaacctttttttctacttttagatagaaatgtctactttttcagcagttctgtgaattaaagagcagagtgactgtgggtctggaatggctggtgtacttgggaatgtactatcaggattttacagcaatgctgggaaatgacagggaaaatgacaggaatgaatctcaccagattttttatgtactcagcagagccttgagttacggtgtttattttccaatcaagtgaagatatctcctacttctcctactggaacatctcagcttctgcagtgaagaaaaattcctgtgatagttcagttctttagtttttctatttgaaaaaaaaaaatcatttaaatgatcctttgttcacggctctccttaatgactgagtgaacagttcctatctgtatatttgactaaaccttttcctaagctatctctcatggttcctatgtttttttatcataattaaaagcaaaaccatctggatcacctaacagtcagaggtcagtatctcagcgtgtgaattatagaggaaatacagagagaacctcttccacttttacttttcgtccaaataaaatgcatggtgtaccagaagttgaagatcgggttgaggattggggctagctcgatgacactaaggccccaacatcgcgggacctgctgtggcgcggattcttaggaacgctgttctagccggccccctctccaggggtcgccgtggccggcattatttcctagttcttcttgtaaccctgaggtgccagcgcggggagtgaggaggggtcagggggctaaggatgcaacctctgacgttctgcgccttcctaggagagtcttacatgtgttgagatttcacaagcaatgcgagttgtaaaataccagctctacaagaagctaggctctgtgacggcatagttttcagtagctttatcacaatattcacaatggagaattatatgacatggtagcagaaataggcccttttatgtgttgcttctattttacctcaaattgtagatatagggtaatcaataaaatccatccatgcctttcacacactaagt

SEQ ID NO: 5295 - protein, 625 aa, Homo sapiens; identical to SEQ ID NO: 4033

SEQ ID NO: 5296 - DNA, 1307 bp, Homo sapiens
gccccgcccggggtgctcagaggtcggagtatcgctgggaggagagttggttcatttggaggagggaatgcgactctgagcgggccaagccctagtgggtcagagtaggattctgatggaatttgcggtctcaccgcctactagggaggaaaagcagttttcaggagtcccgcaccgccgccagccgtgggctgggactacaagtcacggtctgtggagtccaggagtgggggcgggcgggaggcaggctgggagctgtagtagtgtcaccgccacgttcgcagcaggtagatgctcatcttgctaacggattggtgagagtggacagcaattaggctttggcaccttggagcgtggctccagctaagggaagcgaaacgcttcctgggtgagaggacttttattctttgctcatcctcttaaacctggcgagtgagcgcctgaggttcggagtgccttcttcacagacgacgcgaatgtggggtcttcgtgtttgccgaactgaagggaatttgccttcctgcctttagagctaaggtcttgctctatctcccatgccaaagtgcagtgctatgatcacggctcgctgcagccttgaactcctgggctcaaggcatcctcctgcctcactacgtcaccaagcccagctaatacattttaaaaatttattatttatttatttatttatttttggtagagaagggggtctcaccaggttgcccaggctgatctcgaattcctgtgcactagggatcctcagcttccgaaagtgttgggattttaggcgtgagccaccgcgcctagcctataaatctttattcatctttgtaaacttctatcagagaatatattctggtctaactcatcattttacaaataaagcgacttcctgacatcccccagcgtattcttagcagagccgtaactagaagttattttactttcacaacagtggcctctcacaatgtgacagaactgaaggatttgatccatgaactgactttcgtcatttatacccacaaacctttttttacagagcagattggtcagcgaatttggttataataggaaatatcagtggtagaatactttctcagatgaaagttaggagcactatggaatttagtgaaaaactcattgaagaaaataggtgtaggccgggcgcggtggctcacgcctgtaatcccagcactttgggaggccgagatgggaggatcacctgaacccgggaggcggaggttgcagtgagctgtgatcacaccattgcaccccaacctgggcgacgggagtgaggccctgtctcaaaa

SEQ ID NO: 5297 - protein, 112 aa, Homo sapiens
MPKCSAMITARCSLELLGSRHPPASLRHQAQLIHFKNLLFIYLFIFGREGGLTRLPRLISNSCALGILSFRKCWDFRREPPRLAYKSLFIFVNFYQRIYSGLTHHFTNKATS

SEQ ID NO: 5298 - DNA, 3412 bp, Homo sapiens
ggggagaggcggctgcggctgcggctgcggctgctggcggggggtgggggggaggaggaaccgggaagggggggcagggcgagcggagagctagctgtgttcctgaggcggcgccgccgcctagggcggtggggaggaggagggagccgcggggcttggcggggtcgggagggagggacgtgctgggggaacgagctggggaagacggagcgggctctgtgccgggcgggcgggcggcgggggggccagcgaccgcagccggggggacgcgggaggatggagcaagtggagatcctgaggaaattcatccagagggtccaggccatgaagagtcctgaccacaatggggaggacaacttcgcccgggacttcatgcggttaagaagattgtctaccaaatatagaacagaaaagatatatcccacagccactggagaaaaagaagaaaatgttaaaaagaacagatacaaggacatactgccatttgatcacagccgagttaaattgacattaaagactccttcacaagattcagactatatcaatgcaaattttataaagggcgtctatgggccaaaagcatatgtagcaactcaaggacctttagcaaatacagtaatagatttttggaggatgatatgggagtataatgttgtgatcattgtaatggcctgccgagaatttgagatgggaaggaaaaaatgtgagcgctattggcctttgtatggagaagaccccataacgtttgcaccatttaaaatttcttgtgaggatgaacaagcaagaacagactacttcatcaggacactcttacttgaatttcaaaatgaatctcgtaggctgtatcagtttcattatgtgaactggccagaccatgatgttccttcatcatttgattctattctggacatgataagcttaatgaggaaatatcaagaacatgaagatgttcctatttgtattcattgcagtgcaggctgtggaagaacaggtgccatttgtgccatagattatacgtggaatttactaaaagctgggaaaataccagaggaatttaatgtatttaatttaatacaagaaatgagaacacaaaggcattctgcagtacaaacaaaggagcaatatgaacttgttcatagagctattgcccaactgtttgaaaaacagctacaactatatgaaattcatggagctcagaaaattgctgatggagtgaatgaaattaacactgaaaacatggtcagctccatagagcctgaaaaacaagattctcctcctccaaaaccaccaaggacccgcagttgccttgttgaaggggatgctaaagaagaaatactgcagccaccggaacctcatccagtgccacccatcttgacaccttctcccccttcagcttttccaacagtcactactgtgtggcaggacaatgatagataccatccaaagccagtgttgcatatggtttcatcagaacaacattcagcagacctcaacagaaactatagtaaatcaacagaacttccagggaaaaatgaatcaacaattgaacagatagataaaaaattggaacgaaatttaagttttgagattaagaaggtccctctccaagagggaccaaaaagttttgatgggaacacacttttgaataggggacatgcaattaaaattaaatctgcttcaccttgtatagctgataaaatctctaagccacaggaattaagttcagatctaaatgtcggtgatacttcccagaattcttgtgtggactgcagtgtaacacaatcaaacaaagtttcagttactccaccagaagaatcccagaattcagacacacctccaaggccagaccgcttgcctcttgatgagaaaggacatgtaacgtggtcatttcatggacctgaaaatgccatacccatacctgatttatctgaaggcaattcctcagatatcaactatcaaactaggaaaactgtgagtttaacaccaagtcctacaacacaagttgaaacacctgatcttgtggatcatgataacacttcaccactcttcagaacacccctcagttttactaatccacttcactctgatgactcagactcagatgaaagaaactctgatggtgctgtgacccagaataaaactaatatttcaacagcaagtgccacagtttctgctgccactagtactgaaagcatttctactaggaaagtattgccaatgtccattgctagacataatatagcaggaacaacacattcaggtgctgaaaaagatgttgatgttagtgaagattcacctcctcccctacctgaaagaactcctgaatcgtttgtgttagcaagtgaacataatacacctgtaagatcggaatggagtgaacttcaaagtcaggaacgatctgaacaaaaaaagtctgaaggcttgataacctctgaaaatgagaaatgtgatcatccagcgggaggtattcactatgaaatgtgcatagaatgtccacctactttcagtgacaagagagaacaaatatcagaaaatccaacagaagccacagatattggttttggtaatcgatgtggaaaacccaaaggaccaagagatccaccttcagaatggacatgattcagggagctagaagacactttaagttatactggaaaattcaggtgccactgaaagccagatttatagtattccatctttaatatgtgggactaacagcagtgtagattgttaccttaatattttttgctgggaccatctacctgccttatactacacttaggaaaaagtattacatatggtttattttgaaacttcaagtattattgccttaatgtctcttaaccctgttacacgctgcttgtagacatgttaatatagtaatacctttatgatatattgagtttaaggactactctttttctgttttatcatgtatgcattattttgtatatgtacagggcaagtaggtatataatttgataaagttgcaattgaaatattattaacagaagatgtaagaaatttctgcatggtctaaatctttgtgtactttatttgtaaattatttgccctggagttttagaaaatagtttctgaattttaaacttgctggattcatgcagccagctttgcaggttatcagagatcaaagattgtaataataattttgtaaattgtaagcaaaaagttatttttatattatatacagtctaattgttcatcctaattgttcctgttttcatctagtcagagattcagtaagtgccttggaacaatattgaattctcttagcttgtgtgtgtttctttaatatttgaactcaagtgggattagaagactatcaaaatacatgtatgtttcaggatatttgacctgtcattaaaaaaaacaaacagttttacagtgccta

SEQ ID NO: 5299 - protein, 780 aa, Homo sapiens
MEQVEILRKFIQRVQAMKSPDHNGEDNFARDFMRLRRLSTKYRTEKIYPTATGEKEENVKKNRYKDILPFDHSRVKLTLKTPSQDSDYINANFIKGVYGPKAYVATQGPLANTVIDFWRMIWEYNVVIIVMACREFEMGRKKCERYWPLYGEDPITFAPFKISCEDEQARTDYFIRTLLLEFQNESRRLYQFHYVNWPDHDVPSSFDSILDMISLMRKYQEHEDVPICIHCSAGCGRTGAICAIDYTWNLLKAGKIPEEFNVFNLIQEMRTQRHSAVQTKEQYELVHRAIAQLFEKQLQLYEIHGAQKIADGVNEINTENMVSSIEPEKQDSPPPKPPRTRSCLVEGDAKEEILQPPEPHPVPPILTPSPPSAFPTVTTVWQDNDRYHPKPVLHMVSSEQHSADLNRNYSKSTELPGKNESTIEQIDKKLERNLSFEIKKVPLQEGPKSFDGNTLLNRGHAIKIKSASPCIADKISKPQELSSDLNVGDTSQNSCVDCSVTQSNKVSVTPPEESQNSDTPPRPDRLPLDEKGHVTWSFHGPENAIPIPDLSEGNSSDINYQTRKTVSLTPSPTTQVETPDLVDHDNTSPLFRTPLSFTNPLHSDDSDSDERNSDGAVTQNKTNISTASATVSAATSTESISTRKVLPMSIARHNIAGTTHSGAEKDVDVSEDSPPPLPERTPESFVLASEHNTPVRSEWSELQSQERSEQKKSEGLITSENEKCDHPAGGIHYEMCIECPPTFSDKREQISENPTEATDIGFGNRCGKPKGPRDPPSEWT

SEQ ID NO: 5300 - DNA, 595 bp, Homo sapiens
taaaatggtgttaaacgcattcaatatttaaataattataaatatatttttaattaatagtgctatttataattaggtaaatatcctaaaagtgatattttaatataatttcagaagtcacaaagtaaatctgtaagatttacatgatttaattcaaaccaaaaacatcatgttaattggaaccaatttaatttgttgctgtatagttagcccttgtttggaaagtctaattttgataatttctttaacttacacatttaatattgaaactacttttttaggcaagccaattatacttctcggtgcaaaattcttgaaatctgtattttattaaaaagtaaaattgtgtttaactgatacgttctttatctcactccccaccatcactttttagatcattgtaatggcctgccgagaatttgagatgggaaggaaaaaatgtgagcgctattggcctttgtatggagaagaccccataacgtttgcaccatttaaaatttcttgtgtaagtatccatttttgtaaacacttttttcagaaaattggcatgctatactgatgaataattaaattataatgtggtatgaacccaggc

SEQ ID NO: 5301 - protein, 51 aa, Homo sapiens
MACREFEMGRKKCERYWPLYGEDPITFAPFKISCVSIHFCKHFFQKIGMLY

SEQ ID NO: 5302 - DNA, 1224 bp, Homo sapiens
ggaatttttagaatgtcaagaaagctctctgattttgtttagatgacatgttaatttgtctaaatttttatgtgtttaatttagatgttgatgttagtgaagattcacctcctcccctacctgaaagaactcctgaatcgtttgtgttagcaagtgaacataatacacctgtaagatcggaatggagtgaacttcaaagtcaggaacgatctgaacaaaaaaagtctgaaggcttgataacctctgaaaatgagaaatgtgatcatccagcgggaggtattcactatgaaatgtgcatagaatgtccacctactttcagtgacaagagagaacaaatatcagaaaatccaacagaagccacagatattggttttggtaatcgatgtggaaaacccaaaggaccaagagatccaccttcagaatggacatgattcagggagctagaagacactttaagttatactggaaaattcaggtgccactgaaagccagatttatagtattccatctttaatatgtgggactaacagcagtgtagattgttaccttaatattttttgctgggaccatctacctgccttatactacacttaggaaaaagtattacatatggtttattttgaaacttcaagtattattgccttaatgtctcttaaccctgttacacgctgcttgtagacatgttaatatagtaatacctttatgatatattgagtttaaggactactctttttctgttttatcatgtatgcattattttgtatatgtacagggcaagtaggtatataatttgataaagttgcaattgaaatattattaacagaagatgtaagaaatttctgcatggtctaaatctttgtgtactttatttgtaaattatttgccctggagttttagaaaatagtttctgaattttaaacttgctggattcatgcagccagctttgcaggttatcagagatcaaagattgtaataataattttgtaaattgtaagcaaaaagttatttttatattatatacagtctaattgttcatcctaattgttcctgttttcatctagtcagagattcagtaagtgccttggaacaatattgaattctcttagcttgtgtgtgtttctttaatatttgaactcaagtgggattagaagactatcaaaatacatgtatgtttcaggatatttgacctgtcattaaaaaaaacaaacagttttacagtgccta

SEQ ID NO: 5303 - protein, 127 aa, Homo sapiens [sequence omitted]

SEQ ID NO: 5304 - DNA, 500 bp, Homo sapiens
tatttacagtgtctcatgctcagtggaggtgctcacttgtctaagtacattttaccaatatattaattttgactgatttttgttttgtttcatttggttttctttttatttatttattttttatttattcatttttttgagatggagtctcattctgtcgccccggctggagtgcagtggcacgatctcggctcactgcaagctccacctcttgggttcatgccattctcctgcctcagcctctcaaagtgctgggattacaggcatgagccaccacgcccggctaatttttttgtatttttttagtagagacagggtttcaccatgttagccaggatggtctccatctcctgacctcgtgatcgcccgcctcagcctcccaaagtgctgggattacaggcgggagccaccacgcccggccttgttttgttttatttcgagttggagttccactctgtcactcaggctggagtgcagtggcacgatctgggctcaagctg

SEQ ID NO: 5305 - protein, 54 aa, Homo sapiens
MESHSVAPAGVQWHDLGSLQAPPLGFMPFSCLSLSKCWDYRHEPPRPANFFVFF

SEQ ID NO: 5306 - DNA, 1247 bp, Homo sapiens
aacacagctgtatgttccttcatgcagtagcccatgcttttcagtgctcatccagaaacatttactccaaggagaaatagcataacattttaaaattttaagcctaattaaaaaacaattgtttgcttttcctctgatgctgaaaatgataggccttgatttcttgggatatatacccataacagacccagctttctattatttgtatataaaatgaatgtattgtaataggtattaaatgtcttcctcgtagggcttgataacctctgaaaatgagaaatgtgatcatccagcgggaggtattcactatgaaatgtgcatagaatgtccacctactttcagtgacaagagagaacaaatatcagaaaatccaacagaagccacagatattggttttggtaatcgatgtggaaaacccaaaggaccaagagatccaccttcagaatggacatgattcagggagctagaagacactttaagttatactggaaaattcaggtgccactgaaagccagatttatagtattccatctttaatatgtgggactaacagcagtgtagattgttaccttaatattttttgctgggaccatctacctgccttatactacacttaggaaaaagtattacatatggtttattttgaaacttcaagtattattgccttaatgtctcttaaccctgttacacgctgcttgtagacatgttaatatagtaatacctttatgatatattgagtttaaggactactctttttctgttttatcatgtatgcattattttgtatatgtacagggcaagtaggtatataatttgataaagttgcaattgaaatattattaacagaagatgtaagaaatttctgcatggtctaaatctttgtgtactttatttgtaaattatttgccctggagttttagaaaatagtttctgaattttaaacttgctggattcatgcagccagctttgcaggttatcagagatcaaagattgtaataataattttgtaaattgtaagcaaaaagttatttttatattatatacagtctaattgttcatcctaattgttcctgttttcatctagtcagagattcagtaagtgccttggaacaatattgaattctcttagcttgtgtgtgtttctttaatatttgaactcaagtgggattagaagactatcaaaatacatgtatgtttcaggatatttgacctgtcattaaaaaaaacaaacagttttacagtgccta

SEQ ID NO: 5307 - protein, 46 aa, Homo sapiens
MCIECPPTFSDKREQISENPTEATDIGFGNRCGKPKGPRDPPSEWT

SEQ ID NO: 5308 - DNA, 395 bp, Homo sapiens
tataaaatgaatgtattgtaataggtattaaatgtcttcctcgtagggcttgataacctctgaaaatgagaaatgtgatcatccagcgggaggtattcactatgaaatgtgcatagaatgtccacctactttcagtgacaagagagaacaaatatcagaaaatccaacagaagccacagatattggtaatttgtttaataaataatttttagtaagtagttaacactggcaggaatgagaaaagctcatttgccattgtgaaatgacacttgccaagaataaaacatgattttccaaagttgcttggactagtcatgaaataaatgaaatacttaattctatttcacattgagattaaaaactaaaatagaaaactgcagtataaaaaatctttt

SEQ ID NO: 5309 - protein, 32 aa, Homo sapiens
MCIECPPTFSDKREQISENPTEATDIGNLFNK

SEQ ID NO: 5310 - DNA, 2832 bp, Homo sapiens
cggcacccacctcggggcagcggcttcacctccccgttctcctcccgggaggccccgccggcctctcgggccccaccgagaccgtgcctcctcctctccttctcccgcttctccttaggtctgcgcgacttggcgttagccgaggcagcggcggcggcggcgggcaggaggagatggtgaggctgagcgtgcagcagcgtaggagggaccagcagtttgcgcggcaccggctgagacaaggaagcggaggctgaggagggaacggccgtgccagcggagaaagagaaactgctccgagaagaggacggggagggagcagcagacagaggggcaaagctccaagacgcggggctgccatagctctgaggcgaaggtgctgccggcggctgcagctgcctgctgttcccgccgctgcccccttctccgttcactctccgcggtgccttcttctcctcagtccggaccttcttggcggacagagaacccggagggtcccgggaggagagttgcagcttgccaaacggttctttctccgagacggtggcggtgggggccgcggcagcgacacagtgcacggggctcggcggttccgccattttgcgctcctgttgtatttactctcctccgctagccggcgcggggcagggggcgggccctccgcgaggggtagggaaggggcggagcggccaggccaccagccggcattgctccattgggcaagccacgctgagggatccacctaagagccaatcaaaggcacaaacatcagacgaaggggcgggatcgccacagggaccctcttcggaggtcagagctcggcggggtgcggctagtggcggagcgcgctgcgaggggagggctttccactgtcgctggcgtgaactcgcgtgcccggtgggtatcagggaagaacccccgccccggacccccagatctgccatggccgaggtagcgatcgtctctgcggccacgaagactgttttaacttgtaccactttcccttccatttttcctggggtgcctctcaccctgcatctgcgcgttcagcaagctggatttcgggaatgctcagttcagaagagaaaaaattgccgggaatcaagtccttctttttgttagtcggtagtcgattgatgggaagtgttcaaaatcattcgatgtggtgacaaggtatcaccagtctgtgggtacaaaaggagagtaacatgaacgattcaaattccactggctcttgttcccatggattcacagaagttcagccccatttcaaaacttcacatttgcttctgggaagcccattctggaaagtttctctgtggccctctccagaaggcagcgcgacttccacccagcaacacaagtctctgcagcacctgccccagcagcgccagctgagccccggaagctgggaaggcttaagctgactcttctgctgcacatagcaaaaaatggtcatttctgtagttgcagctccagatctacaataatcaatctatatccatattttatggggtttttttgagacaaagtcttgctctgttactcaggctggagtgcagtggcattatcatcattcacttgtagccttgacctccctggctcaggtgatcctgtcacctcagccttccaagtagctgagaccacaggcatgcaccactaagcctggctaatttttcaatttttatttttcgtagagacagggtctccctgggttgcccaaactggtcttgaattcctgggctcaagcaatcctcctgtcccggcaccccgaagtgttgggactacaggcatgagccactgtgcacagccctttttgtttttgtttttgtttttttttaaaggtaatttcccagtggaatcctcgagatttcttcacgtttttggaaaaatgagttacattttagattgttttcctttttggaatttaatggtatacattatattacatagctatgttgagctctatttctattacactaaaaagtaggctaattgtcttaactttcatcagtaatgacattaaatgtgtgaagattatacttggaataaagcacttggattcattcatttcttcagtaaatatttattgagcactagtatgttccaacgagtgtctgtctacattctggggacaagtgataactaaatccctgtcctcgtggagagttaacaatcaacaaactaacaaacatttaatttatgtcatcaactcatttccacaaatataacaacatcttgacttcaagtttcctgagtttctggtctaaagaattgctaccttcaagagctcaaatcatttgttggggagagaggcctgtgatatattttctcctttacaatgaaagtagctgtaaaaagaggaagagaaattctgagggtaaagataaaaaatgttgaaatcttctttctggatttcagattgagtctcttgccctaattgatgcaatttacactccatgcatctccttccctggaccttctccagttcttggggactacagatgaacttacttttaatgcattttatggcatttggaggccctccagtggacaaatactatacctgaaaaaaatccttttgctgtgctaaagtgttcaggtgtgaagtgtactcatgtttgcaaatcactttgaaatatataaacaaaaatgaattaatggatgaatagagtgatgcatagatcattagacatgtgataaaaataactgttaattgtagaatctagatgatgagtatattatatgatatggcccactgtataattctttcaacttttctgtttgaatgtttgataataaaatattgaataaaaatctttttgctaaagattt

SEQ ID NO: 5311 - protein, 72 aa, Homo sapiens [sequence omitted]

SEQ ID NO: 5312 - DNA, 1435 bp, Homo sapiens
cggcacccacctcggggcagcggcttcacctccccgttctcctcccgggaggccccgccggcctctcgggccccaccgagaccgtgcctcctcctctccttctcccgcttctccttaggtctgcgcgacttggcgttagccgaggcagcggcggcggcggcgggcaggaggagatggtgaggctgagcgtgcagcagcgtaggagggaccagcagtttgcgcggcaccggctgagacaaggaagcggaggctgaggagggaacggccgtgccagcggagaaagagaaactgctccgagaagaggacggggagggagcagcagacagaggggcaaagctccaagacgcggggctgccatagctctgaggcgaaggtgctgccggcggctgcagctgcctgctgttcccgccgctgcccccttctccgttcactctccgcggtgccttcttctcctcagtccggaccttcttggcggacagagaacccggagggtcccgggaggagagttgcagcttgccaaacggttctttctccgagacggtggcggtgggggccgcggcagcgacacagtgcacggggctcggcggttccgccattttgcgctcctgttgtatttactctcctccgctagccggcgcggggcagggggcgggccctccgcgaggggtagggaaggggcggagcggccaggccaccagccggcattgctccattgggcaagccacgctgagggatccacctaagagccaatcaaaggcacaaacatcagacgaaggggcgggatcgccacagggaccctcttcggaggtcagagctcggcggggtgcggctagtggcggagcgcgctgcgaggggagggctttccactgtcgctggcgtgaactcgcgtgcccggtgggtatcagggaagaacccccgccccggacccccagatctgccatggccgaggtagcgatcgtctctgcggccacgaagactgttttaacttgtaccactttcccttccatttttcctggggtgcctctcaccctgcatctgcgcgttcagcaagctggatttcgggaatgctcagttcagaagagaaaaaattgccgggaatcaagtccttctttttgttagtcggtagtcgattgatgggaagtgttcaaaatcattcgatgtggtgacaaggcttcaccaggtactgccttctaacgagctggccatttccacatgtcagataggaccaacttgccttttaactacccgtgtgatacttaaacactgttgccggtatcacagcttttcttcaaaacaggtaatattagggacacagtctgtgggtacaaaaggagagtaacatgaacgattcaaattccactggctcttgttcccatggattcacagaagttcagccccatttcaaaacttcacatttgcttctgggaagcccatt

SEQ ID NO: 5313 - protein, 59 aa, Homo sapiens
MAEVAIVSAATKTVLTCTTFPSIFPGVPLTLHLRVQQAGFRECSVQKRKNCRESSPSFC

SEQ ID NO: 5314 - DNA, 2291 bp, Homo sapiens
ggagagtagggtgcagggagggtaccttacgaaacagcgcacttcgggccctgcacgctacctcatttccctaatagggatgaaaagctcaggcctctggtagcttccagctgacgccagtgctctctccacaccccttttttgacaggattatccggggttgaacgctgtgtcacaaatacgaattcccgcgaccacgtctaagtggtctaacaatcaatcaagcatcttttacaaaaccaaacccttcccccatcccgttccctccatctctctccctagccaaacaaacctaggagagtcctcaagatggattttcacaaatcctgcagcgcactaactgggaggaagaaacgatacagaaaataagagtgtcggccatccccctctctgcaaccgaaattacaggctccatttcctgtccccttgggaactgcaaaatcctctgctgaaaaccggacgcctcccagcccctccaggccggcgcacgcggccgccgcgctcccccttcccgggccccgtgggcgccagggggcggcggggacccacggcgccctcccctccccctccccgcacggcacccacctcggggcagcggcttcacctccccgttctcctcccgggaggccccgccggcctctcgggccccaccgagaccgtgcctcctcctctccttctcccgcttctccttaggtctgcgcgacttggcgttagccgaggcagcggcggcggcggcgggcaggaggagatggtgaggctgagcgtgcagcagcgtaggagggaccagcagtttgcgcggcaccggctgagacaaggaagcggaggctgaggagggaacggccgtgccagcggagaaagagaaactgctccgagaagaggacggggagggagcagcagacagaggggcaaagctccaagacgcggggctgccatagctctgaggcgaaggtgctgccggcggctgcagctgcctgctgttcccgccgctgcccccttctccgttcactctccgcggtgccttcttctcctcagtccggaccttcttggcggacagagaacccggagggtcccgggaggagagttgcagcttgccaaacggttctttctccgagacggtggcggtgggggccgcggcagcgacacagtgcacggggctcggcggttccgccattttgcgctcctgttgtatttactctcctccgctagccggcgcggggcagggggcgggccctccgcgaggggtagggaaggggcggagcggccaggccaccagccggcattgctccattgggcaagccacgctgagggatccacctaagagccaatcaaaggcacaaacatcagacgaaggggcgggatcgccacagggaccctcttcggaggtcagagctcggcggggtgcggctagtggcggagcgcgctgcgaggggagggctttccactgtcgctggcgtgaactcgcgtgcccggtgggtatcagggaagaacccccgccccggacccccagatctgccatggccgaggtagcgatcgtctctgcggccacgaagactgttttaacttgtaccactttcccttccatttttcctggggtgcctctcaccctgcatctgcgcgttcagcaagctggatttcgggaatgctcagttcagaagagaaaaaattgccgggaatcaagtccttctttttgttagtcggtagtcgattgatgggaagtgttcaaaatcattcgatgtggtgacaaggcttcaccaggtactgccttctaacgagctggccatttccacatgtcagataggaccaacttgccttttaactacccgtgtgatacttaaacactgttgccggtatcacagcttttcttcaaaacaggaagcaacgagaatgagggcattccagtagcaggagacagcatgcatagagatgctgatgaagaaagagcctagcgcacgtgggaaactgcaaaagttcagactggttggaatgctggaaatgttgtgaatgacaggagatgaggctggcgagaaaacagaggtcagattgtggaaggctgtcaagccaaagactttgattttattcttgagattgatgagatgtgtgtaatccaggagtgtgcaaaacaatctgtaagggttcagaaaacatactgcttctatatatagttacctttgtcttaacttgaaaatttcaaattgtgtaggagttacaatgtgtgtaattgttattatagtactggatccaaataatttataaataaataaatatagacataatatggtgtattacaggtt

SEQ ID NO: 5315 - protein, 59 aa, Homo sapiens; identical to SEQ ID NO: 5313

SEQ ID NO: 5316 - DNA, 2570 bp, Homo sapiens
cggcacccacctcggggcagcggcttcacctccccgttctcctcccgggaggccccgccggcctctcgggccccaccgagaccgtgcctcctcctctccttctcccgcttctccttaggtctgcgcgacttggcgttagccgaggcagcggcggcggcggcgggcaggaggagatggtgaggctgagcgtgcagcagcgtaggagggaccagcagtttgcgcggcaccggctgagacaaggaagcggaggctgaggagggaacggccgtgccagcggagaaagagaaactgctccgagaagaggacggggagggagcagcagacagaggggcaaagctccaagacgcggggctgccatagctctgaggcgaaggtgctgccggcggctgcagctgcctgctgttcccgccgctgcccccttctccgttcactctccgcggtgccttcttctcctcagtccggaccttcttggcggacagagaacccggagggtcccgggaggagagttgcagcttgccaaacggttctttctccgagacggtggcggtgggggccgcggcagcgacacagtgcacggggctcggcggttccgccattttgcgctcctgttgtatttactctcctccgctagccggcgcggggcagggggcgggccctccgcgaggggtagggaaggggcggagcggccaggccaccagccggcattgctccattgggcaagccacgctgagggatccacctaagagccaatcaaaggcacaaacatcagacgaaggggcgggatcgccacagggaccctcttcggaggtcagagctcggcggggtgcggctagtggcggagcgcgctgcgaggggagggctttccactgtcgctggcgtgaactcgcgtgcccggtgggtatcagggaagaacccccgccccggacccccagatctgccatggccgaggtagcgatcgtctctgcggccacgaagactgttttaacttgtaccactttcccttccatttttcctggggtgcctctcaccctgcatctgcgcgttcagcaagctggatttcgggaatgctcagttcagaagagaaaaaattgccgggaatcaagtccttctttttgttagtcggtagtcgattgatgggaagtgttcaaaatcattcgatgtggtgacaaggcttcaccaggtactgccttctaacgagctggccatttccacatgtcagataggaccaacttgccttttaactacccgtgtgatacttaaacactgttgccggtatcacagcttttcttcaaaacaggtaatattagggacacttgaaatttgggaattagatttacctttgctgttactaaataattgttagaattttaaatgtcatattcattttactcaactaatctctttagctttcctatttatattcctacttatgattacgtgtaattctcattggaaggattaaaatattttgaaagtaagacagtaaaattgtgaaatactttggtattggttacaaaacagtacttaggtaccttcttcctgatttttctgtatttttaaaaaataaggccaggcacagtggcaaatgcttatattcccaactgcccagtaagctgaagcaagagaattgcttgagcccaacctgggcaacatagtgaaaccccagtcaccaattaaaaacaaacaaacaaaaagagtatattttttgaagatattttatcacatatacagaagcaaacaaagaggggaaggaattgtttaaaataatgttaagctaaataaagtcaaagaaaatttaagtaatagttaatagttattgttatagaagacatcaatttactaccccgttctcaaaaaggaaaatctgcaagtagactgtagtgctagagtaagcttttccttaatttcagaaagcctgtattaagcatttactttatgccaaactccattttagggactggaaatataaaataaataaaacacagtccctgctctcagtgaacttgttgtctagggaatgttaagtagaaccacctgaaattgcattgtttttgtaagccagctatcggttccacctgacattatatgtggaaacagaaatttgcaataataaagatatgaccacggtgctacggggcactgacaaaatgcttcatgctgcccagggcagtcagtgaaggctccccaggggagatgacgtttgagccgagtttcagaagatgattggagtttaccacgtgttcacaggaagcaacgagaatgagggcattccagtagcaggagacagcatgcatagagatgctgatgaagaaagagcctagcgcacgtgggaaactgcaaaagttcagactggttggaatgctggaaatgttgtgaatgacaggagatgaggctggcgagaaaacagaggtcagattgtggaaggctgtcaagccaaagactttgattttattcttgagattgatgagatgtgtgtaatccaggagtgtgcaaaacaatctgtaagggttcagaaaacatactgcttctatatatagttacctttgtcttaacttgaaaatttcaaattg

SEQ ID NO: 5317 - protein, 59 aa, Homo sapiens; identical to SEQ ID NO: 5313

SEQ ID NO: 5318 - DNA, 1402 bp, Homo sapiens
ctcggggcagcggcttcacctccccgttctcctcccgggaggccccgccggcctctcgggccccaccgagaccgtgcctcctcctctccttctcccgcttctccttaggtctgcgcgacttggcgttagccgaggcagcggcggcggcggcgggcaggaggagatggtgaggctgagcgtgcagcagcgtaggagggaccagcagtttgcgcggcaccggctgagacaaggaagcggaggctgaggagggaacggccgtgccagcggagaaagagaaactgctccgagaagaggacggggagggagcagcagacagaggggcaaagctccaagacgcggggctgccatagctctgaggcgaaggtgctgccggcggctgcagctgcctgctgttcccgccgctgcccccttctccgttcactctccgcggtgccttcttctcctcagtccggaccttcttggcggacagagaacccggagggtcccgggaggagagttgcagcttgccaaacggttctttctccgagacggtggcggtgggggccgcggcagcgacacagtgcacggggctcggcggttccgccattttgcgctcctgttgtatttactctcctccgctagccggcgcggggcagggggcgggccctccgcgaggggtagggaaggggcggagcggccaggccaccagccggcattgctccattgggcaagccacgctgagggatccacctaagagccaatcaaaggcacaaacatcagacgaaggggcgggatcgccacagggaccctcttcggaggtcagagctcggcggggtgcggctagtggcggagcgcgctgcgaggggagggctttccactgtcgctggcgtgaactcgcgtgcccggcttcaccaggtactgccttctaacgagctggccatttccacatgtcagataggaccaacttgccttttaactacccgtgtgatacttaaacactgttgccggtatcacagcttttcttcaaaacagggcagtcagtgaaggctccccaggggagatgacgtttgagccgagtttcagaagatgattggagtttaccacgtgttcacaggaagcaacgagaatgagggcattccagtagcaggagacagcatgcatagagatgctgatgaagaaagagcctagcgcacgtgggaaactgcaaaagttcagactggttggaatgctggaaatgttgtgaatgacaggagatgaggctggcgagaaaacagaggtcagattgtggaaggctgtcaagccaaagactttgattttattcttgagattgatgagatgtgtgtaatccaggagtgtgcaaaacaatctgtaagggttcagaaaacatactgcttctatatatagttacctttgtcttaacttg

SEQ ID NO: 5319 - protein, 33 aa, Homo sapiens [sequence omitted]

SEQ ID NO: 5320 - DNA, 3105 bp, Homo sapiens
ccgcgccggctagcggaggagagtaaatacaacaggagcgcaaaatggcggaaccgccgagccccgtgcactgtgtcgctgccgcggcccccaccgccaccgtctcggagaaagaaccgtttggcaagctgcaactctcctcccgggaccctccgggttctctgtccgccaagaaggtccggactgaggagaagaaggcaccgcggagagtgaacggagaagggggcagcggcgggaacagcaggcagctgcagccgccggcagcaccttcgcctcagagctatggcagccccgcgtcttggagctttgcccctctgtctgctgctccctccccgtcctcttctcggagcagtttctctttctccgctggcacggccgttccctcctcagcctccgcttccttgtctcagccggtgccgcgcaaactgctggtccctcctacgctgctgcacgctcagcctcaccatctcctcctgcccgccgccgccgccgctgcctcggctaacgccaagtcgcgcagacctaaggagaagcgggagaaggagaggaggaggcacggtctcggtggggcccgagaggccggcggggcctcccgggaggagaacggggaggtgaagccgctgccccgagataaaatcaaagacaaaattaaagagagagacaaagaaaaagaaagagaaaaaaagaaacataaagtaatgaatgagatcaagaaagagaatggagaagtaaagattttgctgaaaagtgggaaggagaaaccaaaaacaaatatagaagacttacaaattaaaaaggtaaagaagaaaaagaaaaagaaacacaaagagaatgaaaaacggaagcgtccgaaaatgtatagcaaatctattcagaccatctgctcaggattgctaactgatgttgaagatcaagcagccaaaggcatcctaaatgataacataaaagattacgttgggaagaatttggataccaagaactatgattccaaaattccagagaacagtgagtttccatttgtctcattaaaggagccacgagttcagaataacctcaaaaggttggacactttggaatttaaacaactcattcatatagagcaccagcctaatggaggtgcatcggttatccatgcctacagtaacgaactctcccacctgtctcctatggagatggagaggtttgcagaagagtttgtgggtctagtgttcagtgaaaatgaaaactctgcagctttctacgtgatgggtattgttcatggggcagctacttatttacctgactttttagactatttttcatttaattttcccaattcaccagtgaaaatggagatattgggaaagaaagatatagagacaacgactatgtccaattttcatgctcaggtaaaaagaacgtattctcatggtacttacagagctggcccaatgagacaaataagcttggtgggagcagttgatgaagaagtaggagattatttccctgagttccttgacatgttggaagagtcaccatttttaaaatgtacactgccatgggggacgctatctagtctaaaattacagagtcgaaaagatagtgatgatggtcccatcatgtgggttcgtccaggagaacaaatgatccctgtggctgatatgccaaagtcacctttcaaaaggaaaagaactaccaatgaaataaaaaatcttcagtacctacctcgaacaagtgagccccgtgagatgctctttgaagacaggacaagagctcatgcagatcatataggacaaggttttgaacgacagactacagctgctgttggagtgctgaaggctgtgcactgtggagagtggcctgatcaaccccgtataaccaaagatgtaatttgttttcatgctgaagatttcttagaagtagttcaacgaatgcagttagatttacatgaacctccactgtcccagtgtgtccaatgggttgatgatgcaaaactgaatcaactgaggagggaaggcattcgctatgccaggattcagctatatgataatgacatttattttattccaaggaatgttgttcatcagttcaagacagtttcagctgtatgcagtttagcatggcatattcggctcaaattatatcactcagaggaggacacttctcagaatacagctactcatgaaacaggcacatcatcagattccacatcatctgttcttggacctcacactgacaacatgatttgtgctgtaagcaaagcctccttggattctgttttttcagataaacttcattctaaatatgaattacagcagattaaacatgaacctattgcatctgtaagaatcaaggaagaacctgtgaatgttaatattcctgaaaagactacagcactgaataatatggatggcaagaatgttaaagcaaaattggatcatgttcaatttgcagaatttaagattgacatggattctaaatttgaaaatagcaacaaagatttaaaggaagaattgtgccctggaaatctaagtctagttgatacaaggcaacacagttcagcacattcaaatcaagataaaaaagacgatgacattttgtgctaaatttgcatataccatctaaaatccttttttaaaaaaatttaatgtaataaagattcatgaattctgaaagcaagccaaggacttgctcctatgtctgttacaaaacatagtttatgtagctttgtaacattcctcagtgcctgtccataactgtgaagtattaagcacttagggccagatgcactgtaaacattgcaggtttaaacataaaggagtctttaaaaaaaaatcatttacgttggaattttaggttttagaatagagctgacattaacatatatatatatatataaatatatatatatattttgtaatatgagccagaattctttttcaacaatttaaagcttttccatagagcttatttatatccttttttttcattttaaatgtgtcagcactgtagtgtaaatagcttttaaatatctttttagtgtgatttatactgaaatgtgagccacttaataaaggttcatatgttcatattaataaatatgttttctgttgagtctgtaaagac

SEQ ID NO: 5321 - protein, 846 aa, Homo sapiens; identical to SEQ ID NO: 478

SEQ ID NO: 5322 - DNA, 514 bp, Homo sapiens
aggagcgcaaaatggcggaaccgccgagccccgtgcactgtgtcgctgccgcggcccccaccgccaccgtctcggagaaagaaccgtttggcaagctgcaactctcctcccgggaccctccgggttctctgtccgccaagaaggtccggactgaggagaagaaggcaccgcggagagtgaacggagaagggggcagcggcgggaacagcaggcagctgcagccgccggcagcaccttcgcctcagagctatggcagcggccgttccctcctcagcctccgcttccttgtctcagccggtgccgcgcaaactgctggtccctcctacgctgctgcacgctcagcctcaccatctcctcctgcccgccgccgccgccgctgcctcggctaacgccaagtcgcgcagacctaaggagaagcgggagaaggagaggaggaggcacggtctcggtggggcccgagaggccggcggggcctcccgggaggagaacggggaggtgaagccgctgccccgag

SEQ ID NO: 5323 - protein, 125 aa, Homo sapiens
MAEPPSPVHCVAAAAPTATVSEKEPFGKLQLSSRDPPGSLSAKKVRTEEKKAPRRVNGEGGSGGNSRQLQPPAAPSPQSYGSGRSLLSLRFLVSAGAAQTAGPSYAAARSASPSPPARRRRRCLG

SEQ ID NO: 5324 - DNA, 2667 bp, Homo sapiens
cgtgcgccggcctggaggggctgggaggcgtccggttttcagcagaggattttgcagttcccaaggggacaggaaatggagcctgtaatttcggttgcagagagggggatggccgacactcttattttctgtatcgtttcttcctcccagttagtgcgctgcaggatttgtgaaaatccatcttgaggactctcctagataaaatcaaagacaaaattaaagagagagacaaagaaaaagaaagagaaaaaaagaaacataaagtaatgaatgagatcaagaaagagaatggagaagtaaagattttgctgaaaagtgggaaggagaaaccaaaaacaaatatagaagacttacaaattaaaaaggtaaagaagaaaaagaaaaagaaacacaaagagaatgaaaaacggaagcgtccgaaaatgtatagcaaatctattcagaccatctgctcaggattgctaactgatgttgaagatcaagcagccaaaggcatcctaaatgataacataaaagattacgttgggaagaatttggataccaagaactatgattccaaaattccagagaacagtgagtttccatttgtctcattaaaggagccacgagttcagaataacctcaaaaggttggacactttggaatttaaacaactcattcatatagagcaccagcctaatggaggtgcatcggttatccatgcctacagtaacgaactctcccacctgtctcctatggagatggagaggtttgcagaagagtttgtgggtctagtgttcagtgaaaatgaaaactctgcagctttctacgtgatgggtattgttcatggggcagctacttatttacctgactttttagactatttttcatttaattttcccaattcaccagtgaaaatggagatattgggaaagaaagatatagagacaacgactatgtccaattttcatgctcaggtaaaaagaacgtattctcatggtacttacagagctggcccaatgagacaaataagcttggtgggagcagttgatgaagaagtaggagattatttccctgagttccttgacatgttggaagagtcaccatttttaaaatgtacactgccatgggggacgctatctagtctaaaattacagagtcgaaaagatagtgatgatggtcccatcatgtgggttcgtccaggagaacaaatgatccctgtggctgatatgccaaagtcacctttcaaaaggaaaagaactaccaatgaaataaaaaatcttcagtacctacctcgaacaagtgagccccgtgagatgctctttgaagacaggacaagagctcatgcagatcatataggacaaggttttgaacgacagactacagctgctgttggagtgctgaaggctgtgcactgtggagagtggcctgatcaaccccgtataaccaaagatgtaatttgttttcatgctgaagatttcttagaagtagttcaacgaatgcagttagatttacatgaacctccactgtcccagtgtgtccaatgggttgatgatgcaaaactgaatcaactgaggagggaaggcattcgctatgccaggattcagctatatgataatgacatttattttattccaaggaatgttgttcatcagttcaagacagtttcagctgtatgcagtttagcatggcatattcggctcaaattatatcactcagaggaggacacttctcagaatacagctactcatgaaacaggcacatcatcagattccacatcatctgttcttggacctcacactgacaacatgatttgtgctgtaagcaaagcctccttggattctgttttttcagataaacttcattctaaatatgaattacagcagattaaacatgaacctattgcatctgtaagaatcaaggaagaacctgtgaatgttaatattcctgaaaagactacagcactgaataatatggatggcaagaatgttaaagcaaaattggatcatgttcaatttgcagaatttaagattgacatggattctaaatttgaaaatagcaacaaagatttaaaggaagaattgtgccctggaaatctaagtctagttgatacaaggcaacacagttcagcacattcaaatcaagataaaaaagacgatgacattttgtgctaaatttgcatataccatctaaaatccttttttaaaaaaatttaatgtaataaagattcatgaattctgaaagcaagccaaggacttgctcctatgtctgttacaaaacatagtttatgtagctttgtaacattcctcagtgcctgtccataactgtgaagtattaagcacttagggccagatgcactgtaaacattgcaggtttaaacataaaggagtctttaaaaaaaaatcatttacgttggaattttaggttttagaatagagctgacattaacatatatatatatatataaatatatatatatattttgtaatatgagccagaattctttttcaacaatttaaagcttttccatagagcttatttatatccttttttttcattttaaatgtgtcagcactgtagtgtaaatagcttttaaatatctttttagtgtgatttatactgaaatgtgagccacttaataaaggttcatatgttcatattaataaatatgttttctgttgagtctgt

SEQ ID NO: 5325 - protein, 628 aa, Homo sapiens
MNEIKKENGEVKILLKSGKEKPKTNIEDLQIKKVKKKKKKKHKENEKRKRPKMYSKSIQTICSGLLTDVEDQAAKGILNDNIKDYVGKNLDTKNYDSKIPENSEFPFVSLKEPRVQNNLKRLDTLEFKQLIHIEHQPNGGASVIHAYSNELSHLSPMEMERFAEEFVGLVFSENENSAAFYVMGIVHGAATYLPDFLDYFSFNFPNSPVKMEILGKKDIETTTMSNFHAQVKRTYSHGTYRAGPMRQISLVGAVDEEVGDYFPEFLDMLEESPFLKCTLPWGTLSSLKLQSRKDSDDGPIMWVRPGEQMIPVADMPKSPFKRKRTTNEIKNLQYLPRTSEPREMLFEDRTRAHADHIGQGFERQTTAAVGVLKAVHCGEWPDQPRITKDVICFHAEDFLEVVQRMQLDLHEPPLSQCVQWVDDAKLNQLRREGIRYARIQLYDNDIYFIPRNVVHQFKTVSAVCSLAWHIRLKLYHSEEDTSQNTATHETGTSSDSTSSVLGPHTDNMICAVSKASLDSVFSDKLHSKYELQQIKHEPIASVRIKEEPVNVNIPEKTTALNNMDGKNVKAKLDHVQFAEFKIDMDSKFENSNKDLKEELCPGNLSLVDTRQHSSAHSNQDKKDDDILC

SEQ ID NO: 5326 - DNA, 2872 bp, Homo sapiens
cgtgcgccggcctggaggggctgggaggcgtccggttttcagcagaggattttgcagttcccaaggggacaggaaatggagcctgtaatttcggttgcagagagggggatggccgacactcttattttctgtatcgtttcttcctcccagttagtgcgctgcaggatttgtgaaaatccatcttgaggactctcctagataaaatcaaagacaaaattaaagagagagacaaagaaaaagaaagagaaaaaaagaaacataaagtaatgaatgagatcaagaaagagaatggagaagtaaagattttgctgaaaagtgggaaggagaaaccaaaaacaaatatagaagacttacaaattaaaaaggtaaagaagaaaaagaaaaagaaacacaaagagaatgaaaaacggaagcgtccgaaaatgtatagcaaatctattcagaccatctgctcaggattgctaactgatgttgaagatcaagcagccaaaggcatcctaaatgataacataaaagattacgttgggaagaatttggataccaagaactatgattccaaaattccagagaacagtgagtttccatttgtctcattaaaggagccacgagttcagaataacctcaaaaggttggacactttggaatttaaacaactcattcatatagagcaccagcctaatggaggtgcatcggttatccatgcctacagtaacgaactctcccacctgtctcctatggagatggagaggtttgcagaagagtttgtgggtctagtgttcagtgaaaatgaaaactctgcagctttctacgtgatgggtattgttcatggggcagctacttatttacctgactttttagactatttttcatttaattttcccaattcaccagtgaaaatggagatattgggaaagaaagatatagagacaacgactatgtccaattttcatgctcaggtaaaaagaacgtattctcatggtacttacagagctggcccaatgagacaaataagcttggtgggagcagttgatgaagaagtaggagattatttccctgagttccttgacatgttggaagagtcaccatttttaaaatgtacactgccatgggggacgctatctagtctaaaattacagagtcgaaaagatagtgatgatggtcccatcatgtgggttcgtccaggagaacaaatgatccctgtggctgatatgccaaagtcacctttcaaaaggaaaagaactaccaatgaaataaaaaatcttcagtacctacctcgaacaagtgagccccgtgagatgctctttgaagacaggacaagagctcatgcagatcatataggacaaggttttgaacgacagactacagctgctgttggagtgctgaaggctgtgcactgtggagagtggcctgatcaaccccgtataaccaaagatgtaatttgttttcatgctgaagatttcttagaagtagttcaacgaatgcagttagatttacatgaacctccactgtcccagtgtgtccaatgggttgatgatgcaaaactgaatcaactgaggagggaaggcattcgctatgccaggattcagctatatgataatgacatttattttattccaaggaatgttgttcatcagttcaagacagtttcagctgtatgcagtttagcatggcatattcggctcaaattatatcactcagaggaggacacttctcagaatacagctactcatgaaacaggcacatcatcagattccacatcatctgttcttggacctcacactgacaacatgatttgtgctgtaagcaaagcctccttggattctgttttttcagataaacttcattctaaatatgaattacagcagattaaacatgaacctattgcatctgtaagaatcaaggaagaacctgtgaatgttaatattcctgaaaagactacagcactgaataatatggatggcaagaatgttaaagcaaaattggatcatgttcaatttgcagaatttaagattgacatggattctaaatttgaaaatagcaacaaagatttaaaggaagaattgtgccctggaaatctaagtctagttgatacaaggcaacacagttcagcacattcaaatcaagataaaaaagacgatgacattttgtgctaaatttgcatataccatctaaaatccttttttaaaaaaatttaatgtaataaagattcatgaattctgaaagcaagccaaggacttgctcctatgtctgttacaaaacatagtttatgtagctttgtaacattcctcagtgcctgtccataactgtgaagtattaagcacttagggccagatgcactgtaaacattgcaggtttaaacataaaggagtctttaaaaaaaaatcatttacgttggaattttaggttttagaatagagctgacattaacatatatatatatatataaatatatatatatattttgtaatatgagccagaattctttttcaacaatttaaagcttttccatagagcttatttatatccttttttttcattttaaatgtgtcagcactgtagtgtaaatagcttttaaatatctttttagtgtgatttatactgaaatgtgagccacttaataaaggttcatatgttcatattaataaatatgttttctgttgagtctgtaaagacaaactgacaattcatttaagtcatttgataatgattctctgctggtatatctatttagtgtggtattgtagtgcaaatgtacgtaattcaaatctagtaaatatttaagttcctcacactgtgcaggcttttttttttttttctttttttcttttttttgatacggagtttcattctgtcaccaggctggagttcagtg

SEQ ID NO: 5327 - protein, 628 aa, Homo sapiens; identical to SEQ ID NO: 5325

SEQ ID NO: 5328 - DNA, 1412 bp, Homo sapiens
cagaattgaatcaacagcttctgctcccacccccctcaattctttggctctaataatgatcctgtttttgtattttcttcacattggtgctgatacaagctaaaaatatctgtatctccatatttatggtggatcactatgaaggtaaaaagaacgtattctcatggtacttacagagctggcccaatgagacaaataagcttggtgggagcagttgatgaagaagtaggagattatttccctgagttccttgacatgttggaagagtcaccatttttaaaatgtacactgccatgggggacgctatctagtctaaaattacagagtcgaaaagatagtgatgatggtcccatcatgtgggttcgtccaggagaacaaatgatccctgtggctgatatgccaaagtcacctttcaaaaggaaaagaactaccaatgaaataaaaaatcttcagtacctacctcgaacaagtgagccccgtgagatgctctttgaagacaggacaagagctcatgcagatcatataggacaaggttttgaacgacagactacagctgctgttggagtgctgaaggctgtgcactgtggagagtggcctgatcaaccccgtataaccaaagatgtaatttgttttcatgctgaagatttcttagaagtagttcaacgaatgcagttagatttacatgaacctccactgtcccagtgtgtccaatgggttgatgatgcaaaactgaatcaactgaggagggaaggcattcgctatgccaggattcagctatatgataatgacatttattttattccaaggaatgttgttcatcagttcaagacagtttcagctgtatgcagtttagcatggcatattcggctcaaattatatcactcagaggaggacacttctcagaatacagctactcatgaaacaggcacatcatcagattccacatcatctgttcttggacctcacactgacaacatgatttgtgctgtaagcaaagcctccttggattctgttttttcagataaacttcattctaaatatgaattacagcagattaaacatgaacctattgcatctgtaagaatcaaggaagaacctgtgaatgttaatattcctgaaaagactacagcactgaataatatggatggcaagaatgttaaagcaaaattggatcatgttcaatttgcagaatttaagattgacatggattctaaatttgaaaatagcaacaaagatttaaaggaagaattgtgccctggaaatctaagtctagttgatacaaggcaacacagttcagcacattcaaatcaagataaaaaagacgatgacattttgtgctaaatttgcatataccatctaaaatccttttttaaaaaaatttaatgtaataaagattcatgaattctgaaagc

SEQ ID NO: 5329 - protein, 400 aa, Homo sapiens
MKVKRTYSHGTYRAGPMRQISLVGAVDEEVGDYFPEFLDMLEESPFLKCTLPWGTLSSLKLQSRKDSDDGPIMWVRPGEQMIPVADMPKSPFKRKRTTNEIKNLQYLPRTSEPREMLFEDRTRAHADHIGQGFERQTTAAVGVLKAVHCGEWPDQPRITKDVICFHAEDFLEVVQRMQLDLHEPPLSQCVQWVDDAKLNQLRREGIRYARIQLYDNDIYFIPRNVVHQFKTVSAVCSLAWHIRLKLYHSEEDTSQNTATHETGTSSDSTSSVLGPHTDNMICAVSKASLDSVFSDKLHSKYELQQIKHEPIASVRIKEEPVNVNIPEKTTALNNMDGKNVKAKLDHVQFAEFKIDMDSKFENSNKDLKEELCPGNLSLVDTRQHSSAHSNQDKKDDDILC

SEQ ID NO: 5330 - DNA, 1855 bp, Homo sapiens
cagaattgaatcaacagcttctgctcccacccccctcaattctttggctctaataatgatcctgtttttgtattttcttcacattggtgctgatacaagctaaaaatatctgtatctccatatttatggtggatcactatgaaggtaaaaagaacgtattctcatggtacttacagagctggcccaatgagacaaataagcttggtgggagcagttgatgaagaagtaggagattatttccctgagttccttgacatgttggaagagtcaccatttttaaaatgtacactgccatgggggacgctatctagtctaaaattacagagtcgaaaagatagtgatgatggtcccatcatgtgggttcgtccaggagaacaaatgatccctgtggctgatatgccaaagtcacctttcaaaaggaaaagaactaccaatgaaataaaaaatcttcagtacctacctcgaacaagtgagccccgtgagatgctctttgaagacaggacaagagctcatgcagatcatataggacaaggttttgaacgacagactacagctgctgttggagtgctgaaggctgtgcactgtggagagtggcctgatcaaccccgtataaccaaagatgtaatttgttttcatgctgaagatttcttagaagtagttcaacgaatgcagttagatttacatgaacctccactgtcccagtgtgtccaatgggttgatgatgcaaaactgaatcaactgaggagggaaggcattcgctatgccaggattcagctatatgataatgacatttattttattccaaggaatgttgttcatcagttcaagacagtttcagctgtatgcagtttagcatggcatattcggctcaaattatatcactcagaggaggacacttctcagaatacagctactcatgaaacaggcacatcatcagattccacatcatctgttcttggacctcacactgacaacatgatttgtgctgtaagcaaagcctccttggattctgttttttcagataaacttcattctaaatatgaattacagcagattaaacatgaacctattgcatctgtaagaatcaaggaagaacctgtgaatgttaatattcctgaaaagactacagcactgaataatatggatggcaagaatgttaaagcaaaattggatcatgttcaatttgcagaatttaagattgacatggattctaaatttgaaaatagcaacaaagatttaaaggaagaattgtgccctggaaatctaagtctagttgatacaaggcaacacagttcagcacattcaaatcaagataaaaaagacgatgacattttgtgctaaatttgcatataccatctaaaatccttttttaaaaaaatttaatgtaataaagattcatgaattctgaaagcaagccaaggacttgctcctatgtctgttacaaaacatagtttatgtagctttgtaacattcctcagtgcctgtccataactgtgaagtattaagcacttagggccagatgcactgtaaacattgcaggtttaaacataaaggagtctttaaaaaaaaatcatttacgttggaattttaggttttagaatagagctgacattaacatatatatatatatataaatatatatatatattttgtaatatgagccagaattctttttcaacaatttaaagcttttccatagagcttatttatatccttttttttcattttaaatgtgtcagcactgtagtgtaaatagcttttaaatatctttttagtgtgatttatactgaaatgtgagccacttaataaaggttcatatgttcatattaataaatatgttttctgttgagtctgt

SEQ ID NO: 5331 - protein, 400 aa, Homo sapiens; identical to SEQ ID NO: 5329

SEQ ID NO: 5332 - DNA, 2060 bp, Homo sapiens
cagaattgaatcaacagcttctgctcccacccccctcaattctttggctctaataatgatcctgtttttgtattttcttcacattggtgctgatacaagctaaaaatatctgtatctccatatttatggtggatcactatgaaggtaaaaagaacgtattctcatggtacttacagagctggcccaatgagacaaataagcttggtgggagcagttgatgaagaagtaggagattatttccctgagttccttgacatgttggaagagtcaccatttttaaaatgtacactgccatgggggacgctatctagtctaaaattacagagtcgaaaagatagtgatgatggtcccatcatgtgggttcgtccaggagaacaaatgatccctgtggctgatatgccaaagtcacctttcaaaaggaaaagaactaccaatgaaataaaaaatcttcagtacctacctcgaacaagtgagccccgtgagatgctctttgaagacaggacaagagctcatgcagatcatataggacaaggttttgaacgacagactacagctgctgttggagtgctgaaggctgtgcactgtggagagtggcctgatcaaccccgtataaccaaagatgtaatttgttttcatgctgaagatttcttagaagtagttcaacgaatgcagttagatttacatgaacctccactgtcccagtgtgtccaatgggttgatgatgcaaaactgaatcaactgaggagggaaggcattcgctatgccaggattcagctatatgataatgacatttattttattccaaggaatgttgttcatcagttcaagacagtttcagctgtatgcagtttagcatggcatattcggctcaaattatatcactcagaggaggacacttctcagaatacagctactcatgaaacaggcacatcatcagattccacatcatctgttcttggacctcacactgacaacatgatttgtgctgtaagcaaagcctccttggattctgttttttcagataaacttcattctaaatatgaattacagcagattaaacatgaacctattgcatctgtaagaatcaaggaagaacctgtgaatgttaatattcctgaaaagactacagcactgaataatatggatggcaagaatgttaaagcaaaattggatcatgttcaatttgcagaatttaagattgacatggattctaaatttgaaaatagcaacaaagatttaaaggaagaattgtgccctggaaatctaagtctagttgatacaaggcaacacagttcagcacattcaaatcaagataaaaaagacgatgacattttgtgctaaatttgcatataccatctaaaatccttttttaaaaaaatttaatgtaataaagattcatgaattctgaaagcaagccaaggacttgctcctatgtctgttacaaaacatagtttatgtagctttgtaacattcctcagtgcctgtccataactgtgaagtattaagcacttagggccagatgcactgtaaacattgcaggtttaaacataaaggagtctttaaaaaaaaatcatttacgttggaattttaggttttagaatagagctgacattaacatatatatatatatataaatatatatatatattttgtaatatgagccagaattctttttcaacaatttaaagcttttccatagagcttatttatatccttttttttcattttaaatgtgtcagcactgtagtgtaaatagcttttaaatatctttttagtgtgatttatactgaaatgtgagccacttaataaaggttcatatgttcatattaataaatatgttttctgttgagtctgtaaagacaaactgacaattcatttaagtcatttgataatgattctctgctggtatatctatttagtgtggtattgtagtgcaaatgtacgtaattcaaatctagtaaatatttaagttcctcacactgtgcaggcttttttttttttttctttttttcttttttttgatacggagtttcattctgtcaccaggctggagttcagtg

SEQ ID NO: 5333 - protein, 400 aa, Homo sapiens; identical to SEQ ID NO: 5329

SEQ ID NO: 5334 - DNA, 1035 bp, Homo sapiens
aaaggtcggttggtttgcactggcggacaaatggtccaattaccgcggaaaagggacctctgaatccagattggcgtcctctctacctatagggtaggctcaggggcggtgagaaccagccccggatgtgggcgcggcactgaggtagaactgagagatcctctaccgcagtcgtttgaggaggcggaactgaagttttttcttaattatcatgtgacgggttctggatttaatggggggaaaagggcggaaaaggacaaggatccaaactggcgaatttgctgatcttcgcgtccctctccgctttccggccggcagcgctgccagggtatatttccttttttccgatcctgcaacagcctctttaaactgtttaaatgagaatgtccttggctcagagagtactactcacctggcttttcacactactcttcttgatcatgttggtgttgaaactggatgagaaagcaccttggaactggttcctcatattcattccagtctggatatttgatactatccttcttgtcctgctgattgtgaaaatggctgggcggtgtaagtctggctttgaccctcgacatggatcacacaatattaaaaaaaaagcctggtacctcattgcaatgttacttaaattagccttctgcctcgcactctgtgctaaactggaacagtttactaccatgaatctatcctatgtcttcattcctttatgggccttgctggctggggctttaacagaactcggatataatgtcttttttgtgagagactgacttctaagtacatcatctcctttctattgctgttcaacaagttaccattaaagtgttctgaatctgtcaagcttcaagaataccagagaactgagggaaaataccaaatgtagttttatactacttccataaaacaggattggtgaatcacggacttctagtcaacctacagcttaattattcagcatttgagttattgagatccttattatctctatgtaaataaagtttgttttggacctcatttttctacatg

SEQ ID NO: 5335 - protein, 76 aa, Homo sapiens [sequence omitted]

SEQ ID NO: 5336 - DNA, 674 bp, Homo sapiens
atcctccctgcccgcgcgcagtgactgcaggctccggcgcaaaatcctgcgggagagggggtggggcaaccctctggaggcagcgcgcccgcgggcagcctcgttgtggctccttgggctctgttggcggcggcgctagcttcggagtctcccgcgcgcacctcagccgcctcctagcggcgcggcgctcgctcctacgcctaaaatgaccaatgtgtgatttcagtggaataaatggcgtccaaagtcacagatgctatagtctggtatcaaaagaagattggagcatatgatcaacaaatatgggaaaaatctgttgaacagagagaaatcaaggggctaaggaataaaccaaagaaaacagcacatgtgaaaccagacctcatagatgttgatcttgtaagagggtctgcatttgcaaaggcaaagcctgaaagtccttggacttctctgaccagaaagggaattgttcgagttgtatttttcccctttttcttccggtggtggttacaagtaacatcaaaggtcatctttttctggcttcttgtcctttatcttcttcaaggtactccttggccctggattcaggcatggctggattgagaggctcggataatatcttcacttctttttgctgtagactttggtcttgctggtcacattcttaggttggc

SEQ ID NO: 5337 - protein, 122 aa, Homo sapiens
MASKVTDAIVWYQKKIGAYDQQIWEKSVEQREIKGLRNKPKKTAHVKPDLIDVDLVRGSAFAKAKPESPWTSLTRKGIVRVVFFPFFFRWWLQVTSKVIFFWLLVLYLLQGTPWPWIQAWLD

SEQ ID NO: 5338 - DNA, 1852 bp, Homo sapiens
atcctccctgcccgcgcgcagtgactgcaggctccggcgcaaaatcctgcgggagagggggtggggcaaccctctggaggcagcgcgcccgcgggcagcctcgttgtggctccttgggctctgttggcggcggcgctagcttcggagtctcccgcgcgcacctcagccgcctcctagcggcgcggcgctcgctcctacgcctaaaatgaccaatgtgtgatttcagtggaataaatggcgtccaaagtcacagatgctatagtctggtatcaaaagaagattggagcatatgatcaacaaatatgggaaaaatctgttgaacagagagaaatcaaggggctaaggaataaaccaaagaaaacagcacatgtgaaaccagacctcatagatgttgatcttgtaagagggtctgcatttgcaaaggcaaagcctgaaagtccttggacttctctgaccagaaagggaattgttcgagttgtatttttcccctttttcttccggtggtggttacaagtaacatcaaaggtcatctttttctggcttcttgtcctttatcttcttcaagttgctgcaatagtattattctgctccacttctagcccacacagcatacctctgacagaggtgattgggccgatatggctgatgctgctcctgggaactgtgcattgccagattgtttccacaagaacacccaaacctcctctaagtacagggggtaaaagaagaaggaaattaagaaaagcagcccatttggaagtacatagggaaggagatggttctagtaccacagataacacacaagagggagcagttcagaaccacggtacaagcacctctcacagcgttggcactgtcttcagagatctctggcatgctgctttctttttatcaggatcaaagaaagcaaagaattcaattgataaatcaactgaaactgacaatggctatgtatcccttgatgggaagaagactgttaaaagcggtgaagatggaatacaaaaccatgaacctcagtgtgaaactattcgaccagaagagacagcctggaacacaggaacactgaggaatggtcctagcaaagatacccaaaggacaataacaaatgtctctgatgaagtctccagtgaggaaggtcctgaaacaggatactcattacgtcgtcatgtggacaggacttctgaaggtgttcttcggaatagaaagtcacaccattataagaaacattaccctaatgaggtatatactttgtccttaagtgtatacatacgtatctattttatatgttactaatttataacttctttcaacaattaaaaattgttgaaataaatatttcacattattatcaatatttattattgttgtatgatctggatttataaaatagcagttttaggtttacgtattgcacatgtattgatagatagccacacatttgagctcattttatgcattatctttgaagactcatacattgtttgttgtttgcttttaaagaagaacattctggagagagaatctgcaaactcctgtgttcactttttccacaatttgaaaggctttatacatttgatcatagcaaagttattttaagtaacttccttcatattgctgtcaccagttattaagtccccatacttcaaaattcagttcttttttctttgtttctatttttccttattaatctttattttctctaaacccttttcaactatatcatatctcttgagcttcaaattgtttaaataaagaatttcattcaattgtattttcagtttctaatctaagggtagaacatttggctttaaggcaaataaattacactgtttatcacttttttataaacatt

SEQ ID NO: 5339 - protein, 352 aa, Homo sapiens
MASKVTDAIVWYQKKIGAYDQQIWEKSVEQREIKGLRNKPKKTAHVKPDLIDVDLVRGSAFAKAKPESPWTSLTRKGIVRVVFFPFFFRWWLQVTSKVIFFWLLVLYLLQVAAIVLFCSTSSPHSIPLTEVIGPIWLMLLLGTVHCQIVSTRTPKPPLSTGGKRRRKLRKAAHLEVHREGDGSSTTDNTQEGAVQNHGTSTSHSVGTVFRDLWHAAFFLSGSKKAKNSIDKSTETDNGYVSLDGKKTVKSGEDGIQNHEPQCETIRPEETAWNTGTLRNGPSKDTQRTITNVSDEVSSEEGPETGYSLRRHVDRTSEGVLRNRKSHHYKKHYPNEVYTLSLSVYIRIYFICY

SEQ ID NO: 5340 - DNA, 1935 bp, Homo sapiens
atcctccctgcccgcgcgcagtgactgcaggctccggcgcaaaatcctgcgggagagggggtggggcaaccctctggaggcagcgcgcccgcgggcagcctcgttgtggctccttgggctctgttggcggcggcgctagcttcggagtctcccgcgcgcacctcagccgcctcctagcggcgcggcgctcgctcctacgcctaaaatgaccaatgtgtgatttcagtggaataaatggcgtccaaagtcacagatgctatagtctggtatcaaaagaagattggagcatatgatcaacaaatatgggaaaaatctgttgaacagagagaaatcaaggggctaaggaataaaccaaagaaaacagcacatgtgaaaccagacctcatagatgttgatcttgtaagagggtctgcatttgcaaaggcaaagcctgaaagtccttggacttctctgaccagaaagggaattgttcgagttgtatttttcccctttttcttccggtggtggttacaagtaacatcaaaggtcatctttttctggcttcttgtcctttatcttcttcaagttgctgcaatagtattattctgctccacttctagcccacacagcatacctctgacagaggtgattgggccgatatggctgatgctgctcctgggaactgtgcattgccagattgtttccacaagaacacccaaacctcctctaagtacagggggtaaaagaagaaggaaattaagaaaagcagcccatttggaagtacatagggaaggagatggttctagtaccacagataacacacaagagggagcagttcagaaccacggtacaagcacctctcacagcgttggcactgtcttcagagatctctggcatgctgctttctttttatcaggatcaaagaaagcaaagaattcaattgataaatcaactgaaactgacaatggctatgtatcccttgatgggaagaagactgttaaaagcggtgaagatggaatacaaaaccatgaacctcagtgtgaaactattcgaccagaagagacagcctggaacacaggaacactgaggaatggtcctagcaaagatacccaaaggacaataacaaatgtctctgatgaagtctccagtgaggaaggtcctgaaacaggatactcattacgtcgtcatgtggacaggacttctgaaggtgttcttcggaatagaaagtcacaccattataagaaacattaccctaatgaggacgcccctaaatcgggtactagttgcagctctcgctgttcaagttccagacaggattctgagagtgcaaggccagaatctgaaacagaagatgtgttatgggaagacttgttacattgtgcagaatgccattcatcttgtaccagtgagacagatgtggaaaatcatcagattaatccatgtgtgaaaaaagaatatagagatgacccttttcatcagagtcatttgccctggctccatagttcccacccaggattagaaaaaataagtgctatagtatgggaaggtaatgattgtaagaaagcagacatgtctgtacttgaaatcagtggaatgataatgaacagagtgaacagccatataccaggaataggataccagatttttggaaatgcagtctctctcatactgggtttaactccatttgttttccgactttctcaagctacagacttggaacaactcacagcacattctgcttcagaactttatgtgattgcatttggttctaatgaagatgtcatagttctttctatggttataataagttttgtggttcgcgtgtctcttgtgtggattttcttttttttgctctgtgtagcagaaagaacttataaacaggtgggtataatgtagacttccgaataagaatattttatcgttttcataatattaaaagtattcctgaagtacttt

SEQ ID NO: 5341 - protein, 546 aa, Homo sapiens
MASKVTDAIVWYQKKIGAYDQQIWEKSVEQREIKGLRNKPKKTAHVKPDLIDVDLVRGSAFAKAKPESPWTSLTRKGIVRVVFFPFFFRWWLQVTSKVIFFWLLVLYLLQVAAIVLFCSTSSPHSIPLTEVIGPIWLMLLLGTVHCQIVSTRTPKPPLSTGGKRRRKLRKAAHLEVHREGDGSSTTDNTQEGAVQNHGTSTSHSVGTVFRDLWHAAFFLSGSKKAKNSIDKSTETDNGYVSLDGKKTVKSGEDGIQNHEPQCETIRPEETAWNTGTLRNGPSKDTQRTITNVSDEVSSEEGPETGYSLRRHVDRTSEGVLRNRKSHHYKKHYPNEDAPKSGTSCSSRCSSSRQDSESARPESETEDVLWEDLLHCAECHSSCTSETDVENHQINPCVKKEYRDDPFHQSHLPWLHSSHPGLEKISAIVWEGNDCKKADMSVLEISGMIMNRVNSHIPGIGYQIFGNAVSLILGLTPFVFRLSQATDLEQLTAHSASELYVIAFGSNEDVIVLSMVIISFVVRVSLVWIFFFLLCVAERTYKQVGIM

SEQ ID NO: 5342 - DNA, 2026 bp, Homo sapiens
atcctccctgcccgcgcgcagtgactgcaggctccggcgcaaaatcctgcgggagagggggtggggcaaccctctggaggcagcgcgcccgcgggcagcctcgttgtggctccttgggctctgttggcggcggcgctagcttcggagtctcccgcgcgcacctcagccgcctcctagcggcgcggcgctcgctcctacgcctaaaatgaccaatgtgtgatttcagtggaataaatggcgtccaaagtcacagatgctatagtctggtatcaaaagaagattggagcatatgatcaacaaatatgggaaaaatctgttgaacagagagaaatcaaggggctaaggaataaaccaaagaaaacagcacatgtgaaaccagacctcatagatgttgatcttgtaagagggtctgcatttgcaaaggcaaagcctgaaagtccttggacttctctgaccagaaagggaattgttcgagttgtatttttcccctttttcttccggtggtggttacaagtaacatcaaaggtcatctttttctggcttcttgtcctttatcttcttcaagttgctgcaatagtattattctgctccacttctagcccacacagcatacctctgacagaggtgattgggccgatatggctgatgctgctcctgggaactgtgcattgccagattgtttccacaagaacacccaaacctcctctaagtacagggggtaaaagaagaaggaaattaagaaaagcagcccatttggaagtacatagggaaggagatggttctagtaccacagataacacacaagagggagcagttcagaaccacggtacaagcacctctcacagcgttggcactgtcttcagagatctctggcatgctgctttctttttatcaggatcaaagaaagcaaagaattcaattgataaatcaactgaaactgacaatggctatgtatcccttgatgggaagaagactgttaaaagcggtgaagatggaatacaaaaccatgaacctcagtgtgaaactattcgaccagaagagacagcctggaacacaggaacactgaggaatggtcctagcaaagatacccaaaggacaataacaaatgtctctgatgaagtctccagtgaggaaggtcctgaaacaggatactcattacgtcgtcatgtggacaggacttctgaaggtgttcttcggaatagaaagtcacaccattataagaaacattaccctaatgaggacgcccctaaatcgggtactagttgcagctctcgctgttcaagttccagacaggattctgagagtgcaaggccagaatctgaaacagaagatgtgttatgggaagacttgttacattgtgcagaatgccattcatcttgtaccagtgagacagatgtggaaaatcatcagattaatccatgtgtgaaaaaagaatatagagatgacccttttcatcagagtcatttgccctggctccatagttcccacccaggattagaaaaaataagtgctatagtatgggaaggtaatgattgtaagaaagcagacatgtctgtacttgaaatcagtggaatgataatgaacagagtgaacagccatataccaggaataggataccagatttttggaaatgcagtctctctcatactgggtttaactccatttgttttccgactttctcaagctacagacttggaacaactcacagcacattctgcttcagaactttatgtgattgcatttggttctaatgaagatgtcatagttctttctatggttataataagttttgtggttcgcgtgtctcttgtgtggattttcttttttttgctctgtgtagcagaaagaacttataaacaggtgggtataatgtagacttccgaataagaatattttatcgttttcataatattaaaagtattcctgaagtactttattatttcattatatcatttttacctaattattttttattttgcttttatagtacctaaccaaataaaatcttaacaattcatattttgtt

SEQ ID NO: 5343 - protein, 546 aa, Homo sapiens; identical to SEQ ID NO: 5341

SEQ ID NO: 5344 - DNA, 4668 bp, Homo sapiens
atcctccctgcccgcgcgcagtgactgcaggctccggcgcaaaatcctgcgggagagggggtggggcaaccctctggaggcagcgcgcccgcgggcagcctcgttgtggctccttgggctctgttggcggcggcgctagcttcggagtctcccgcgcgcacctcagccgcctcctagcggcgcggcgctcgctcctacgcctaaaatgaccaatgtgtgatttcagtggaataaatggcgtccaaagtcacagatgctatagtctggtatcaaaagaagattggagcatatgatcaacaaatatgggaaaaatctgttgaacagagagaaatcaaggggctaaggaataaaccaaagaaaacagcacatgtgaaaccagacctcatagatgttgatcttgtaagagggtctgcatttgcaaaggcaaagcctgaaagtccttggacttctctgaccagaaagggaattgttcgagttgtatttttcccctttttcttccggtggtggttacaagtaacatcaaaggtcatctttttctggcttcttgtcctttatcttcttcaagttgctgcaatagtattattctgctccacttctagcccacacagcatacctctgacagaggtgattgggccgatatggctgatgctgctcctgggaactgtgcattgccagattgtttccacaagaacacccaaacctcctctaagtacagggggtaaaagaagaaggaaattaagaaaagcagcccatttggaagtacatagggaaggagatggttctagtaccacagataacacacaagagggagcagttcagaaccacggtacaagcacctctcacagcgttggcactgtcttcagagatctctggcatgctgctttctttttatcaggatcaaagaaagcaaagaattcaattgataaatcaactgaaactgacaatggctatgtatcccttgatgggaagaagactgttaaaagcggtgaagatggaatacaaaaccatgaacctcagtgtgaaactattcgaccagaagagacagcctggaacacaggaacactgaggaatggtcctagcaaagatacccaaaggacaataacaaatgtctctgatgaagtctccagtgaggaaggtcctgaaacaggatactcattacgtcgtcatgtggacaggacttctgaaggtgttcttcggaatagaaagtcacaccattataagaaacattaccctaatgaggacgcccctaaatcgggtactagttgcagctctcgctgttcaagttccagacaggattctgagagtgcaaggccagaatctgaaacagaagatgtgttatgggaagacttgttacattgtgcagaatgccattcatcttgtaccagtgagacagatgtggaaaatcatcagattaatccatgtgtgaaaaaagaatatagagatgacccttttcatcagagtcatttgccctggctccatagttcccacccaggattagaaaaaataagtgctatagtatgggaaggtaatgattgtaagaaagcagacatgtctgtacttgaaatcagtggaatgataatgaacagagtgaacagccatataccaggaataggataccagatttttggaaatgcagtctctctcatactgggtttaactccatttgttttccgactttctcaagctacagacttggaacaactcacagcacattctgcttcagaactttatgtgattgcatttggttctaatgaagatgtcatagttctttctatggttataataagttttgtggttcgcgtgtctcttgtgtggattttcttttttttgctctgtgtagcagaaagaacttataaacagcgattactttttgcaaaactctttggacatttaacatctgcaaggagggctcgaaaatctgaggttcctcatttccggttgaagaaagtacagaatataaaaatgtggctatctctccgttcctatcttaagcgtcgaggtcctcagcgatcagttgatgtaatagtttcatctgctttcttattgactatctcagttgtatttatctgttgtgcccagataaacctctacttgaaaatggagaaaaaacctaacaaaaaggaggaactgacactagtgaataatgttttaaaactggctactaaactgctaaaggagttggacagtccttttagattatatgggcttacaatgaatccgctgctttataacatcacccaggttgttatcctgtcagctgtttctggtgttatcagtgacttgcttggatttaatttaaagctatggaagattaagtcatgacaattcaaagaaaagaagatgtagcctcttttccagaataagagtactgactaagctgcctgaaagcttgtcactgattctttgcttcaggagtctcagctagggagttgaagtgtttacatcagactgtcttgtgcaattcttatatttattttactggttcacttttttttacatttattttagtctttatatttttatttttaagcattgatgtacttagttgttgaaagggtgatgaaactgatatccagatacttgagatcctggtaattggtcataaataattggcaaaataacaaattgtgaaaatagaagccattgctcagcaccgtttctccatcaatgccgtgaacttgccttacttgaggaaaaattctttaactttggaatattgcattgaactcagctatacacataaaacattttctttggtaaatcaagatccagtcagggtttctcttgaattattttggaacaatgccaggatccaaactgattaagttacagtttaagcacccttcagtattaatatatacggtattatataacaggtcaacaagtgctctttgatgataaaacttgtaatagagcaataattgtaaatggttaccatactgtaagatattttgataaaaattaactagtaatacttgtatttatttgaaacactgggctgtttgcacagctccaactgtgcatgctcaaaatgtgcactttttaaaattgttacttttaatgcgtatctttatatgggatctgttatagtatactagggcatgatatggtatccttttgagtgaggtatatactcatctcacaagtgaagtgcctactgatattactaaagtacattatgtttactcaagtaaataattttctccccatggtacactctagtgtaggctattcataccacactgaaatgaacaactgaagaataaggctaagaaccaataaaatatttctctaattgctagttgtaaaactgtatccaaattttcagaaaagacagcttcagcttgcaaattctatcctctaaacttatctggtgcattctccccaccccacccccattatataagggctattttagatgcttttaacctccccaacaaataatttgccaagtgtccaatgagaacttatcatgttggtgtgttaggtaaatcgggcaaatatgatagtgtcttacattgggccttgattttaagttgttatatttgtacaatcgagtattttagaaattacatgaaacatgaaacagtttttgcaattttttttaaactgggcatctggtttctaaaaatttatttgaaacaatctagaattttcttggtgcaaagtgtatcatgtggaatatcctcatatttttaccatattttaagaactttaagacgattaattgtaaataatttatttgattggtgcagttctaatccctaaatcataatcttaaaatcaggaatgtgtggagaacagagccatgtcatatcactttgctcttaccattccttttgatcagcctcaattcagcctcattgtgtagtatgttttttctttctatgaaaaacaacagaaagcatttcattttatttgcctatgttcaaatatgtttaataatgaccaaagtgcattctgagttttttcaaggaatgtaatactggagctttaagaacatacttagtttctcatgtgaaaacttaggctttgtctgatgtttttccttcctctattgtctaatgttgaggttgtttttaggaattatgttttataaactttttcaatataaggtacatgcctatacagaacttaacattttgcacagaatatatcaaatatattttgagaaaaaaagtacggcatgagttctgttaggaataaaagatgaaactattgtatctcacaaaaaatcttatttcagaatggaaatatttttgagaaaagtagctgagtatactggtttaagaaaatgcttgttttagattgaggttaacttagagttgggagttgatttattaagtacagtatacctctcaacagtttataaataatatgttgaattatgtcagtgtgggcagcagtagaatactaaaaggaaaatgtcatgttaagcaatttcagaacattaactgaactattttcaaagcagaaaaattgacattgctgcctttaagaataccatgaatgtaagaaattgaaagaaattgtaaaatatcacataatatagaaatggcagttcaaagagaattgtggcagatgttgtgtgtgaactgttgtttctttgccacatgtgttgtatttgaaagttttacagtaagtttaaaataaaacattctgtgactg

SEQ ID NO: 5345 - protein, 695 aa, Homo sapiens
MASKVTDAIVWYQKKIGAYDQQIWEKSVEQREIKGLRNKPKKTAHVKPDLIDVDLVRGSAFAKAKPESPWTSLTRKGIVRVVFFPFFFRWWLQVTSKVIFFWLLVLYLLQVAAIVLFCSTSSPHSIPLTEVIGPIWLMLLLGTVHCQIVSTRTPKPPLSTGGKRRRKLRKAAHLEVHREGDGSSTTDNTQEGAVQNHGTSTSHSVGTVFRDLWHAAFFLSGSKKAKNSIDKSTETDNGYVSLDGKKTVKSGEDGIQNHEPQCETIRPEETAWNTGTLRNGPSKDTQRTITNVSDEVSSEEGPETGYSLRRHVDRTSEGVLRNRKSHHYKKHYPNEDAPKSGTSCSSRCSSSRQDSESARPESETEDVLWEDLLHCAECHSSCTSETDVENHQINPCVKKEYRDDPFHQSHLPWLHSSHPGLEKISAIVWEGNDCKKADMSVLEISGMIMNRVNSHIPGIGYQIFGNAVSLILGLTPFVFRLSQATDLEQLTAHSASELYVIAFGSNEDVIVLSMVIISFVVRVSLVWIFFFLLCVAERTYKQRLLFAKLFGHLTSARRARKSEVPHFRLKKVQNIKMWLSLRSYLKRRGPQRSVDVIVSSAFLLTISVVFICCAQINLYLKMEKKPNKKEELTLVNNVLKLATKLLKELDSPFRLYGLTMNPLLYNITQVVILSAVSGVISDLLGFNLKLWKIKS

SEQ ID NO: 5346 - DNA, 1315 bp, Homo sapiens
aaatttacagctgccttgcacaattactcttacacctccttcagggctacttagaaccaccataacacaaagacaacatcatggctggatccacgacttgcgaaaaaggctaaacctccagaagagtgcaaagaaaatgagcttccatatggctgggaaaaaatcgatgatcccatttatggcacttattatgttgaccacataaatagaagaacacagtttgaaaatcctgtcctggaagcaaaaaggaagctacagcaacataacatgccccacacagaacttggaacaaagcccctgcaggccccaggtttccgagaaaaaccactcttcacccgggatgcatcccagttgaagggaacattcctcagcaccaccctaaaaaagagcaacatgggctttggatttaccatcattggtggagacgagcctgatgagtttctgcaggtgaaaagtgtgattccggatgggcctgcagcacaggatggaaaaatggaaacaggtgatgtcattgtctatattaatgaagtttgtgtccttggacacactcatgcagatgttgtcaaacttttccagtctgttcctattggtcagagtgtcaacctggtgttgtgtcgtggctaccctttgccctttgatcctgaagaccctgctaacagcatggtgccaccccttgcaataatggagaggccacctccagtgatggtcaatggaagacacaactatgaaacatatttggagtacatttctcggacctcacagtcagttccagatataacagatcggccgcctcattctctgcactccatgccaactgatggtcagctagacggcacgtatccaccgcccgtccatgatgacaatgtgtctatggcttcatctggggccacccaagctgaacttatgaccttaaccattgtgaaaggtgcccagggcttcggcttcactattgccgacagtcctacaggacagcgggtgaaacaaatacttgacattcagggatgccctggcctgtgtgaaggcgacctcattgttgagatcaaccagcagaatgtacagaacctgagccatacagaagtagtggatatacttaaggactgtcccattggaagtgaaacttctttgattatccatcgaggaggtaagacaaacactggctcagcaataaaatatgtgggtaaaatagtaggatcatttaataatattgttaaaatgcagatttccttggagttgaatgaaattatactttaaaaaataaagcttaaagagtgagagagaaaaacatgaattaaaggaaactttgtttttgaattca

SEQ ID NO: 5347 - protein, 327 aa, Homo sapiens
MPHTELGTKPLQAPGFREKPLFTRDASQLKGTFLSTTLKKSNMGFGFTIIGGDEPDEFLQVKSVIPDGPAAQDGKMETGDVIVYINEVCVLGHTHADVVKLFQSVPIGQSVNLVLCRGYPLPFDPEDPANSMVPPLAIMERPPPVMVNGRHNYETYLEYISRTSQSVPDITDRPPHSLHSMPTDGQLDGTYPPPVHDDNVSMASSGATQAELMTLTIVKGAQGFGFTIADSPTGQRVKQILDIQGCPGLCEGDLIVEINQQNVQNLSHTEVVDILKDCPIGSETSLIIHRGGKTNTGSAIKYVGKIVGSFNNIVKMQISLELNEIIL

SEQ ID NO: 5348 - DNA, 1882 bp, Homo sapiens
ggatatacaatttcacattggcatgtgcacacacacttattgtgtgtatacaccctgcacgtccccaacataaaccacttacagcttcagaaaggaaaggagacagaagcagcaacatctcaacaaccaatttccaatactatgaatcagatcatttcaaagcagttcccagaaacatgatacccagggagaacccaacaatgaagttatggttgttatttttttgagaagggaaagactactgatgagagatgcttccaaattaaaagtggcaaaggactcaggatatttaaggatgagattccattgcctgatctctttgtctttacattcacttatctgcagtctgactctctcctctcaccatggaatggaaacttagaccttgggaagacttcataattttttctctactgtcatgtttgaataaatggaataaaaacaacttcatgctttggaaactgggaggaaaataaccctagaaggatcttctggagccaaccctcttcaaagaagacaggatagtataattatgaactcagtctctgtagtcatgatgctcacatccaagcccctgcacatcctaggaagattcatcactaagccattactcttcactaattccatggaaaacttcgaactaactcctagcagacatggccgtgtgcaccatcaatcatgtcatgaagcacccaggacctacaaggtggctgctgaagacagcagaaagacagaacctggtgctcagtggccaaggccatcttgtgggccacccggcagccatcttggccaagtgggttctgctgggaaggaaactggtggttgagcaccacgagggcatcaacatttctggcaatttctggagaaacaaattaaagtatctggccttcctctgcaagcagatgagcaccaacccttcccaaggcccacccgccccgccattcctgggcccccagcgcatcttttggtggccttgcagaaccaagtggggccaggctgccctggaccaccttatggtgttttatgggatctcactgccctatgacaaggtggttcctgctgccctttaggttgtacgactgaagcctacaagaaagtttgcctccttggggtgcctggctcacgaggttggctggaaataccaggtagtgacagccaccatgggggagaagaggaaggagaaggccaagatgcactacaggaagaaaaagcagctcatgcggctgcagaaacaggccacaaagaacgtggagaagacaaatgacaaatacacagaggtcctaagaccgagggactccctgtttgagaccagaaaagactgtttattcctcatgcttggcctggcctacccttctgccattgcgaccttgggatatgggggagcctacccttcctgcatcaccgccctgggatgtgggggatccaagggcagcaatataggtgccatgggcagcctgggacttaagctgggggcaagggaagggccttagtcactgcctttctataaggttattttaaacagctctaagatttgtacaggaataatttgtctatgacctacttgttcaggacagagttttagaaaaccaatagagcaaccagttactttggttttaatattggcaaaagggacctggaacattaattggagggagccccgcctcgtgaaaggggcatctctttttaactcccaccttctcgtgctatactctgtggctgttataatatgaaaaagtgcttagggacagcatgatcttactgttattcaaaggatattatagagaagcttagactaggaagatgtgtgaccaagaggtggcaggggtcgcccttgctccttccctgtattttgtgaccagaatgaaataaattactttcaaag

SEQ ID NO: 5349 - protein, 137 aa, Homo sapiens
MAVCTINHVMKHPGPTRWLLKTAERQNLVLSGQGHLVGHPAAILAKWVLLGRKLVVEHHEGINISGNFWRNKLKYLAFLCKQMSTNPSQGPPAPPFLGPQRIFWWPCRTKWGQAALDHLMVFYGISLPYDKVVPAAL

SEQ ID NO: 5350 - DNA, 543 bp, Homo sapiens
aacataaaccacttacagcttcagaaaggaaaggagacagaagcagcaacatctcaacaaccaatttccaatactatgaatcagatcatttcaaagcagttcccagaaacatgaagggaaagactactgatgagagatgcttccaaattaaaagtggcaaaggactcaggatatttaaggatgagattccattgcctgatctctttgtctttacattcacttatctgcagtctgactctctcctctcaccatggaatggaaacttagagtaagttcgtatgtggcagtgctttgaaattccagatgcaccagagagcttcaaaaacaaacagaaaacagaagactcagggctaccctaaatcaactgattcataatttcagaatgagatccacaggcattggcattttttagatgaaagaaagcttcccaggtgtctctagtgtgcagctacggctgtgatcccctgagttagaagctgagaatgtgtgaagaggtgttgcataaggagtatcttgcctgataagatttatgcagaagcctct

SEQ ID NO: 5351 - protein, 53 aa, Homo sapiens
MKGKTTDERCFQIKSGKGLRIFKDEIPLPDLFVFTFTYLQSDSLLSPWNGNLE

SEQ ID NO: 5352 - DNA, 543 bp, Homo sapiens
agaaaggaaaggagacagaagcagcaacatctcaacaaccaatttccaatactatgaatcagatcatttcaaagcagttcccagaaacatgatacccagggagaacccaacaatgaagttatggttgttatttttttgagaagggaaagactactgatgagagatgcttccaaattaaaagtggcaaaggactcaggatatttaaggatgagattccattgcctgatctctttgtctttacattcacttatctgcagtctgactctctcctctcaccatggaatggaaacttagagtaagttcgtatgtggcagtgctttgaaattccagatgcaccagagagcttcaaaaacaaacagaaaacagaagactcagggctaccctaaatcaactgattcataatttcagaatgagatccacaggcattggcattttttagatgaaagaaagcttcccaggtgtctctagtgtgcagctacggctgtgatcccctgagttagaagctgagaatgtgtgaagaggtgttgcataaggagtatcttg

SEQ ID NO: 5353 - protein, 57 aa, Homo sapiens
MVVIFLRRERLLMRDASKLKVAKDSGYLRMRFHCLISLSLHSLICSLTLSSHHGMET

SEQ ID NO: 5354 - DNA, 5618 bp, Homo sapiens
actgattagtgctttcaagcctgcctgccttagttcatgtagctcctcctctggtactgggataaacacttgtattaccattttaaaggctatcattactctttacctgtgaagagtagaacatgaagaaatctactttattcagatattctccagattcctaaagattagagatcatttctcattctcctaggagtactcacttcaggaagcaaccagataaaagagaggtgcaacggaagccagaacattcctcctggaaattcaacctgtttcgcagtttctcgaggaatcagcattcagtcaatccgggccgggagcagtcatctgtggtgaggctgattggctgggcaggaacagcgccggggcgtgggctgagcacagccgcttcgctctctttgccacaggaagcctgagctcattcgagtagcggctcttccaagctcaaagaagcagaggccgctgttcgtttcctttaggtctttccactaaagtcggagtatcttcttccaaaatttcacgtcttggtggccgttccaaggagcgcgaggtcggaatggatcttgaaggggaccgcaatggaggagcaaagaagaagaacttttttaaactgaacaataaaagtgaaaaagataagaaggaaaagaaaccaactgtcagtgtattttcaatgtttcgctattcaaattggcttgacaagttgtatatggtggtgggaactttggctgccatcatccatggggctggacttcctctcatgatgctggtgtttggagaaatgacagatatctttgcaaatgcaggaaatttagaagatctgatgtcaaacatcactaatagaagtgatatcaatgatacagggttcttcatgaatctggaggaagacatgaccaggtatgcctattattacagtggaattggtgctggggtgctggttgctgcttacattcaggtttcattttggtgcctggcagctggaagacaaatacacaaaattagaaaacagttttttcatgctataatgcgacaggagataggctggtttgatgtgcacgatgttggggagcttaacacccgacttacagatgatgtctccaagattaatgaaggaattggtgacaaaattggaatgttctttcagtcaatggcaacatttttcactgggtttatagtaggatttacacgtggttggaagctaacccttgtgattttggccatcagtcctgttcttggactgtcagctgctgtctgggcaaagatactatcttcatttactgataaagaactcttagcgtatgcaaaagctggagcagtagctgaagaggtcttggcagcaattagaactgtgattgcatttggaggacaaaagaaagaacttgaaaggtacaacaaaaatttagaagaagctaaaagaattgggataaagaaagctattacagccaatatttctataggtgctgctttcctgctgatctatgcatcttatgctctggccttctggtatgggaccaccttggtcctctcaggggaatattctattggacaagtactcactgtattcttttctgtattaattggggcttttagtgttggacaggcatctccaagcattgaagcatttgcaaatgcaagaggagcagcttatgaaatcttcaagataattgataataagccaagtattgacagctattcgaagagtgggcacaaaccagataatattaagggaaatttggaattcagaaatgttcacttcagttacccatctcgaaaagaagttaagatcttgaagggtctgaacctgaaggtgcagagtgggcagacggtggccctggttggaaacagtggctgtgggaagagcacaacagtccagctgatgcagaggctctatgaccccacagaggggatggtcagtgttgatggacaggatattaggaccataaatgtaaggtttctacgggaaatcattggtgtggtgagtcaggaacctgtattgtttgccaccacgatagctgaaaacattcgctatggccgtgaaaatgtcaccatggatgagattgagaaagctgtcaaggaagccaatgcctatgactttatcatgaaactgcctcataaatttgacaccctggttggagagagaggggcccagttgagtggtgggcagaagcagaggatcgccattgcacgtgccctggttcgcaaccccaagatcctcctgctggatgaggccacgtcagccttggacacagaaagcgaagcagtggttcaggtggctctggataaggccagaaaaggtcggaccaccattgtgatagctcatcgtttgtctacagttcgtaatgctgacgtcatcgctggtttcgatgatggagtcattgtggagaaaggaaatcatgatgaactcatgaaagagaaaggcatttacttcaaacttgtcacaatgcagacagcaggaaatgaagttgaattagaaaatgcagctgatgaatccaaaagtgaaattgatgccttggaaatgtcttcaaatgattcaagatccagtctaataagaaaaagatcaactcgtaggagtgtccgtggatcacaagcccaagacagaaagcttagtaccaaagaggctctggatgaaagtatacctccagtttccttttggaggattatgaagctaaatttaactgaatggccttattttgttgttggtgtattttgtgccattataaatggaggcctgcaaccagcatttgcaataatattttcaaagattataggggtttttacaagaattgatgatcctgaaacaaaacgacagaatagtaacttgttttcactattgtttctagcccttggaattatttcttttattacatttttccttcagggtttcacatttggcaaagctggagagatcctcaccaagcggctccgatacatggttttccgatccatgctcagacaggatgtgagttggtttgatgaccctaaaaacaccactggagcattgactaccaggctcgccaatgatgctgctcaagttaaaggggctataggttccaggcttgctgtaattacccagaatatagcaaatcttgggacaggaataattatatccttcatctatggttggcaactaacactgttactcttagcaattgtacccatcattgcaatagcaggagttgttgaaatgaaaatgttgtctggacaagcactgaaagataagaaagaactagaaggttctgggaagatcgctactgaagcaatagaaaacttccgaaccgttgtttctttgactcaggagcagaagtttgaacatatgtatgctcagagtttgcaggtaccatacagaaactctttgaggaaagcacacatctttggaattacattttccttcacccaggcaatgatgtatttttcctatgctggatgtttccggtttggagcctacttggtggcacataaactcatgagctttgaggatgttctgttagtattttcagctgttgtctttggtgccatggccgtggggcaagtcagttcatttgctcctgactatgccaaagccaaaatatcagcagcccacatcatcatgatcattgaaaaaacccctttgattgacagctacagcacggaaggcctaatgccgaacacattggaaggaaatgtcacatttggtgaagttgtattcaactatcccacccgaccggacatcccagtgcttcagggactgagcctggaggtgaagaagggccagacgctggctctggtgggcagcagtggctgtgggaagagcacagtggtccagctcctggagcggttctacgaccccttggcagggaaagtgctgcttgatggcaaagaaataaagcgactgaatgttcagtggctccgagcacacctgggcatcgtgtcccaggagcccatcctgtttgactgcagcattgctgagaacattgcctatggagacaacagccgggtggtgtcacaggaagagattgtgagggcagcaaaggaggccaacatacatgccttcatcgagtcactgcctaataaatatagcactaaagtaggagacaaaggaactcagctctctggtggccagaaacaacgcattgccatagctcgtgcccttgttagacagcctcatattttgcttttggatgaagccacgtcagctctggatacagaaagtgaaaaggttgtccaagaagccctggacaaagccagagaaggccgcacctgcattgtgattgctcaccgcctgtccaccatccagaatgcagacttaatagtggtgtttcagaatggcagagtcaaggagcatggcacgcatcagcagctgctggcacagaaaggcatctatttttcaatggtcagtgtccaggctggaacaaagcgccagtgaactctgactgtatgagatgttaaatactttttaatatttgtttagatatgacatttattcaaagttaaaagcaaacacttacagaattatgaagaggtatctgtttaacatttcctcagtcaagttcagagtcttcagagacttcgtaattaaaggaacagagtgagagacatcatcaagtggagagaaatcatagtttaaactgcattataaattttataacagaattaaagtagattttaaaagataaaatgtgtaattttgtttatattttcccatttggactgtaactgactgccttgctaaaagattatagaagtagcaaaaagtattgaaatgtttgcataaagtgtctataataaaactaaactttcatgtgactggagtcatcttgtccaaactgcctgtgaatatatcttctctcaattggaatattgtagataacttctgctttaaaaaagttttctttaaatatacctactcatttttgtgggaatggttaagcagtttaaataattcctgttgtatatgtctattcacattgggtcttacagaaccatctggcttcattcttcttggacttgatcctgctgattcttgcatttccacattaaggtggctctcaaacccaaaacacagatcgatataagattttaggaggtggggtgaggcacaattatgaagtgcatattattcagatgtatagtaaatactttgcattgcttttataaagggttctttaaggattttttaagatttttacacttccaaagtacatttactttttgtcttgataatgaatcacttttgccagtaattggcctcttccaaaagtgatccttctgacttacagatgtttaaaatgtgccatgagtttaactacatcttgatacaaacatgataaaaaaagaaaaaaatatattccaaaggttgggactctggacgacaaatttttttaaattagccaaaaagcattattaacattataaactatatttactataaacaattgctatcttaaataagcaacttctaaaaataaaaaaaagaagccatcacctccaggaaaaaaaaataggaaaggatataatcaggtaattctcaaagaagaaatgcatgagaaaaatgtatacagtttcaacaatcaaataaatgcaaattaaaacaaaatatcatttttttgccttgtaatttaatgatgaataaaaaaatctaatgt

SEQ ID NO: 5355 - protein, 1280 aa, Homo sapiens; identical to SEQ ID NO: 484

SEQ ID NO: 5356 - DNA, 2259 bp, Homo sapiens
gctggggcacgagtggctgcggagtgtgggtggttgggcgtgaggggccgacgggctcgcgcgcgcgccgtctgctgaggtccctcgggaaggaggagagcgcctgacgccgacccgcaggcgcagcccggcagtcggcggcgcgccgagggcggaggtggtgcgtgcgtgcgtgtgtgtgtgtgtgtgtgtgtgtgtgtgtgtgtgtgtgtggagctcgggtgccaagggcgagccgtcagtccccgggtgcgagtccctgctgtcttccacacccttcctccctccaggctcctttcctacatccttcccgcgcccccacggttgcggaccgagcgagaacccccttaagcaggtgtggggggcgtgcggggtggcacgagacaaaaggggcacgggggtaagcccgccatggcctcccggagcctggggggcctgagcgggatccgcggcggtggcggcggaggcggcaagaaaagcctgagcgcccgcaatgctgcggtggagaggaggaacctgatcaccgtgtgcaggttttctgtgaagaccctgattgatcggtcttgctttgagacaattgatgattcttctcctgaatttaacaattttgcagctattttggaacagattttaagccaccggctaaaagagatttcccaaagttgcagatggctggctcatctccaaatacctcttcaaggtcaagtaacctggtttggttatgaaagtcctcgtagcttctgggactatatcagagtggcttgccggaaagtttcacagaattgtatctgcagcattgaaaatatggaaaatgtcagttcttctagagctaagggtagagcctggatcagagtagcactcatggaaaaacatttatctgaatacatctctacagctctgagagacttcaaaacaaccaggagattttatgaagatggagcaattgtcttgggtgaagaagcaaatatgcttgctggcatgcttctaggactcaatgctattgatttcagtttctgcctaaagggagaggggctggatggcagttttcctgctgtaatagactatacaccatatttgaagtatatccaaagttctgatagtatcagcagtgatgaggaggagctaaggactttgggaagcagtggtagcgaaagcagtactccagagaatgtcggacctcctttcctcatggatgagaacagttggttcaacaagtgtaagagagttaaacaaaagtatcagcttaccctggaacagaagggttaccttgaagaactcttacgacttcgagagaaccaactatctgaatctgtctcccagaataaaatactacttcaaaggattgaagattccgatctggctcataaactggagaaggaacaattagaatatataattgtggagcttcaagatcagctgactgtgctaaagaataatgatttaagatcgagacaagagttaactgcccatctcaccaaccagtggccttctccaggagctctggatgtcaatgctgttgccttggatacgttgctttaccgaaaacacaataaacagtggtatgagaaaagttatcaaagtcttgaccagttatcagcagaagttagcctttctcagacttcactagatccaggccagtcacaagaaggagatggaaaacaagacacattaaatgtaatgagtgaaggtaaggaagatactccctcattacttggcctctgtggatctctaacgtcagtggcaagttacaagtctctaacaagcttaaaatctaatgactaccttgcaagtcctacaacagagatgacaagtccaggcctaactccatcctgaaaatttttgtgtaaaagccaaaactttttatgttgtaaatgtttaatttacatgtttgactgctgggaagacctttgaaattttatattgttctggtacatgtctgaaattctattgcttggagagaatcccctccagataagagattttgagtgaaaaacataatgatcctgccatttttcatttttaaaattcttacatttgtcattgagaaagttcaaaatggaataggctttaaaaaaaaaaaaactttcaaagatccgccaaatcattcatagcaaattgtacatattgttcagctgatttttatatatttaaatacaccttagtggccagagactgacttcaaggttttattccagagactccagagacttaagctaagtattttttcattctttcagattttcaaaaaaaaaaaaaaaa

SEQ ID NO: 5357 - protein, 473 aa, Homo sapiens; identical to SEQ ID NO: 486

SEQ ID NO: 5358 - DNA, 3388 bp, Homo sapiens
gcagtgagctgtgatcgtgccatcatgccactgcaatctagcctgggcaatagaatgagaccctgtctcaaaacaaacaacaacaacaaaactttggaataacaggaagaaaggatacagtaaacaagaatatgggtcaagtaacctggtttggttatgaaagtcctcgtagcttctgggactatatcagagtggcttgccggaaagtttcacagaattgtatctgcagcattgaaaatatggaaaatgtcagttcttctagagctaagggtagagcctggatcagagtagcactcatggaaaaacatttatctgaatacatctctacagctctgagagacttcaaaacaaccaggagattttatgaagatggagcaattgtcttgggtgaagaagcaaatatgcttgctggcatgcttctaggactcaatgctattgatttcagtttctgcctaaagggagaggggctggatggcagttttcctgctgtaatagactatacaccatatttgaagtatatccaaagttctgatagtatcagcagtgatgaggaggagctaaggactttgggaagcagtggtagcgaaagcagtactccagagaatgtcggacctcctttcctcatggatgagaacagttggttcaacaagtgtaagagagttaaacaaaagtatcagcttaccctggaacagaagggttaccttgaagaactcttacgacttcgagagaaccaactatctgaatctgtctcccagaataaaatactacttcaaaggattgaagattccgatctggctcataaactggagaaggaacaattagaatatataattgtggagcttcaagatcagctgaaaagttatcaaagtcttgaccagttatcagcagaagttagcctttctcagacttcactagatccaggccagtcacaagaaggagatggaaaacaagacacattaaatgtaatgagtgaaggtaaggaagatactccctcattacttggcctctgtggatctctaacgtcagtggcaagttacaagtctctaacaagcttaaaatctaatgactaccttgcaagtcctacaacagagatgacaagtccaggcctaactccatcctgaaaatttttgtgtaaaagccaaaactttttatgttgtaaatgtttaatttacatgtttgactgctgggaagacctttgaaattttatattgttctggtacatgtctgaaattctattgcttggagagaatcccctccagataagagattttgagtgaaaaacataatgatcctgccatttttcatttttaaaattcttacatttgtcattgagaaagttcaaaatggaataggctttaaaaaaaaaaaaactttcaaagatccgccaaatcattcatagcaaattgtacatattgttcagctgatttttatatatttaaatacaccttagtggccagagactgacttcaaggttttattccagagactccagagacttaagctaagtattttttcattctttcagattttcaaaaaaaaaaaaaaaaaaagttaatttcattttttcattaatgtcttcctaagttctatgctttaaatgccttgtttttaataacgggaaagttctcagctgcattttcacagtggcttattcagtttttctttaatatttaccatttggtatcaattcagcattccacttaacattttataaattccataggaacatgcctgttttggtagttactgacttaatttgttagtgccacaaggaaaatattttacagtattttatgccatttaggcaaaatgaataaactgttttccaagattttcttaaaagattatcaatttaaaagtatgatcaagtatgcctcaaaaactagaaacatttcaaaatgtagaacaaacgttgaaaaattgttttgccaggaaagagttcaagttcagttaaggatttgagaggcttttaaacaaggatcagtaggatagttatcatatttacttaatatatgtctgatattcagtgctggttctttttcctgtttgtgcaacaatgaagtgtgtcatgtgtgttttatagcctctatcattaatcacaccagagtctcattttaaaacattttaatgttaaaacatccccacacttatacacaggtaaaattagtttttttttttttaaagttgtaatctgtacttttttttttttgcaatttttgaaacagctacattaatccctaaaaatcccaccatactgaaaatgtatggcgtgtattttctatagtaagtaatatgaggaaaacatgattagctgtgccaaagaaattttatacattgtttacatgatgaggccacagtacttactgaggacttcatatggtttttttgtttattattattgagaaaagagctgaggttaccacattcattctttgtgttagaaatgtaggagtgtggtggttttctgcaatatttagagcttagtctcataatttggaatttaagataataagtagtaacaaggcaagtcttttatgtaagacagtcaaacagtgtcacttcagggacaaaggcctggaagcccttaaaataagttatcttagatgtgccagaacatattcagagctttattcctttaagcttaaggcttcaatacttgtagaaatgcaaatattcttgagaaatgatacattttttgttctcaatttctcaattctacatacctgattatgagtgaagtatccaaagcaggttttcatcagcatgggggatggaaggtaggtataatatgaggacaatggaaactttgggagaagggagtgaggaaatggataaagagaaatttgaaaattttaggctggacttgagcactattgctgctttcctatgaactatcagaatgtttaaatgctttatcattcatggtccactctcaaccaacatttattatcctttagtaattaaacaatggttttacatacatttttataatgtagaaggaaattcaagattccataatcgtaaaatttttcagatttgtctaatgtgtaatttgtgcatcttcacatgctgctaaatgcagatttaaacattacatctgaggatcatgacttttcctcctttcttggagatcttggtataaaattcatctgctgttataaaatcaggtttctacagagttcgtttcacactaaaggtagtttgttactgtttgcatgaggaaaccatgtatgtctcaatctttaattttaggtggtagtgtttattgttcaccctccctcttgcctccaaaagaatgctgaattatacgccaatatttccatgtgtattctgttgccttgatgcgtactatacttgttgcatgtatattaaaaattttgtactatgc

SEQ ID NO: 5359 - protein, 329 aa, Homo sapiens
MGQVTWFGYESPRSFWDYIRVACRKVSQNCICSIENMENVSSSRAKGRAWIRVALMEKHLSEYISTALRDFKTTRRFYEDGAIVLGEEANMLAGMLLGLNAIDFSFCLKGEGLDGSFPAVIDYTPYLKYIQSSDSISSDEEELRTLGSSGSESSTPENVGPPFLMDENSWFNKCKRVKQKYQLTLEQKGYLEELLRLRENQLSESVSQNKILLQRIEDSDLAHKLEKEQLEYIIVELQDQLKSYQSLDQLSAEVSLSQTSLDPGQSQEGDGKQDTLNVMSEGKEDTPSLLGLCGSLTSVASYKSLTSLKSNDYLASPTTEMTSPGLTPS

SEQ ID NO: 5360 - DNA, 3140 bp, Homo sapiens
cgccccctcacgccgccgtccttctcgcgcctcgctctggccctgcaggttgtgtttccgcctctaccccgcctccattccgttgctctctcagtctcagacccgggctctcggtccgccgcttcaggtcttggcgcagcctcagagagttggcgcggctctgtgttgaccaaacctagtggatgcagttagcgccggagcccggccccgcccgtcaccagggttattcccgccttctaggtttgccaggactgccggccctgcagctgccttctgccccaggtttttggctactgatgttacaaacaataaaatattggagcatagagttgaagaacagactcaaaccaggtttttatttaattagttaaaaatatggatcctgagacaaggggacaagagattatcaaagtgacacctcttcaacaaatgcttgcctcatgtactggagctatactgacatcagtaatagtgacacccctggatgttgttaaaattagactccaagcccaaaacaacccactccccaaaggaaaatgttttgtatatagtaatggactcatggatcatctatgtgtctgtgaagagggaggcaacaaactatggtataagaagccaggaaatttccagggaacattggatgcattttttaaaatcattcgaaatgagggcattaaatctctatggagtggccttcctcctaccctagtgatggcagttcctgccacagttatttattttacctgctatgatcaattaagtgctcttctgagatctaagttaggagaaaatgaaacctgcataccaattgttgctggaattgtagccagatttggtgcagtaactgtgataagtccactagaattgattagaaccaagatgcagtccaagaagttttcttacgtggaactgcatcgatttgtcagcaagaaagtatctgaagatggttggatttccctttggaggggctgggctcctactgttcttagagatgtacctttctcagcaatgtactggtataactatgaaattttaaagaagtggttatgtgagaaatctggtttatatgagccaacatttatgatcaactttacttcaggggcattgtctggttcttttgctgctgttgcaactttaccatttgatgtagtaaaaacacaaaagcagacacaactttggacatatgaaagtcataaaatttctatgcctttgcatatgtcaacctggattataatgaagaacattgttgctaaaaatggattttccggattattttcaggcctaattcctcgcttaattaaaattgctcctgcttgtgccattatgatcagtacatatgaatttggaaaggcttttttccagaaacaaaatgttcgaaggcagcaatactagtgatgctgtttcaacttgaaacaacaactatagccaaagaagatggagactcttaggcaagaatgtttttcaccattattctctcacaatgattttatgtctttctttcctataatttaaataaataatttcagctctacctctaaatcataattttaaaataaattttatcttatttttggtgatattgaaaaagatattctagaaatcaccaccattgagcattcttgtaaaaatagattactccttagcatcaaaagcagtctcttgaaagtttaatattatatgtttcagtgtaacataatcttactgggagtgtgttgaatacaccagaactttttgaattgtgtgctgaatgatgtacatagtctagaagaaaaaagcccaagtcttgtgcacatttaaatcgtgtacataagtatttccgtatttcagtaaagtagataaagcactcgttaaatagcattgtttacatcgaccaaatattgcctgtttcctttaattcaaatgcattaggttcccgcctccctctccttccccgccatgttgctgttttaaggcttcatatgtattaacatttctctgatcaaaattgtggctgttttccttatgaaccataatataatcatttgtgtgatgtacattgtgccatttttgatgactaaatgtctatatttctgccattcctgtaagagagggagttttttactgatagtagcaaatgttcacttcagtcaaacttgggtgttcagtggtaaaccatatagtatttagactggtaaaaatagtttgcacacaggaatagcctctgatttttagctctcttgtaatccaagtatcattgttcatggaattctctaggtcatttttattgtgttgttctaacaagacagattattgctacaacaatagttacaagatatttctaaaatatcctttgatttttactctaagtatggtagagtaagaggctaaacaagaagctgtttccttgaagacattgctttcagtcaccatacatgtctaaataatttagcttatcattcattctatgtaggaatgagataagaaaggatatgatggcaggaaaagaaatgctattcattttttatactttagttttattttcttaggatctatatcctatatatatatattttttaaagcactaatttattgcagtctttattttagaaaaatgtgaagcatttttttctcccctaaaatgaatatatttagatgacaagtctttagtgctggtagaggaactaattgattttgtactatagtaggaaagtgtttatatgtttcaccagaaataaaatatgtagggtttgtatgtaatcttctgtgtttatcctatgttgatttaccttaaatttgcaacatacatatccacataaatattcatgactttcttatatttcattaaaatgttttatggcttcttaaaatcatcactgtgcttctaaatatttttacgtaaaatcattgtataatgctatactgtgatatacatgaaagtttatcttgaacagtgctctttaacaatattaaatttaaatttatcttggttttgctatgcttatgggtaattcatagaaaacagaaaaaatactgttcccaaaaggcagttatatatttcagtttaatatcacctataagtatgagaaaggtttccatgtctcctacccctcactgcacttaggaaaattcttatttatgaataaagtaagataagtaaatct

SEQ ID NO: 5361 - protein, 338 aa, Homo sapiens; identical to SEQ ID NO: 488

SEQ ID NO: 5362 - DNA, 1536 bp, Homo sapiens
cgccccctcacgccgccgtccttctcgcgcctcgctctggccctgcaggttgtgtttccgcctctaccccgcctccattccgttgctctctcagtctcagacccgggctctcggtccgccgcttcaggtcttggcgcagcctcagagagttggcgcggctctgtgttgaccaaacctagtggatgcagttagcgccggagcccggccccgcccgtcaccagggttattcccgccttctaggtttgccaggactgccggccctgcagctgccttctgccccaggtttttggctactgatgttacaaacaataaaatattggagcatagagttgaagaacagactcaaaccaggtttttatttaattagttaaaaatatggatcctgagacaaggggacaagagattatcaaagtgacacctcttcaacaaatgcttgcctcatgtactggagctatactgacatcagtaatagtgacacccctggatgttgttaaaattagactccaagcccaaaacaacccactccccaaaggaaaatgttttgtatatagtaatggactcatggatcatctatgtgtctgtgaagagggaggcaacaaactatggtataagaagccaggaaatttccagggaacattggatgcattttttaaaatcattcgaaatgagggcattaaatctctatggagtggccttcctcctaccctagtgatggcagttcctgccacagttatttattttacctgctatgatcaattaagtgctcttctgagatctaagttaggagaaaatgaaacctgcataccaattgttgctggaattgtagccagatttggtgcagtaactgtgataagtccactagaattgattagaaccaagatgcagtccaagaagttttcttacgtggaactgcatcgatttgtcagcaagaaagtatctgaagatggttggatttccctttggaggggctgggctcctactgttcttagagatgtacctttctcagcaatgtactggtataactatgaaattttaaagaagtggttatgtgagaaatctggtttatatgagccaacatttatgatcaactttacttcaggggcattgtctggttcttttgctgctgttgcaactttaccatttgatgtagtaaaaacacaaaagcagacacaactttggacatatgaaagtcataaaatttctatgcctttgcatatgtcaacctggattataatgaagaacattgttgctaaaaatggattttccggattattttcaggcctaattcctcgcttaattaaaattgctcctgcttgtgccattatgatcagtacatatgaatttggaaaggcttttttccagaaacaaaatgttcgaaggcagcaatactagtgatgctgtttcaacttgaaacaacaactatagccaaagaagatggagactcttaggcaagaatgtttttcaccattattctctcacaatgattttatgtctttctttcctataatttaaataaataatttcagctctacctct

SEQ ID NO: 5363 - protein, 338 aa, Homo sapiens; identical to SEQ ID NO: 488

SEQ ID NO: 5364 - DNA, 748 bp, Homo sapiens
ggaaaaaatgtgatttgtgaaccattgtaagtatattttaatatgtaaacatttacataactattttaaaaggcttatagagttaaaagttcaaaattcattttctttattcaaatttaattttttattctattttaaaagcgtttgctggaaatttttaaatgctcactagatacttgagaatttctgctttgacatatgtgttgtatcttcttgtgatgtaaaggaataatagaacacaaaggagcgtgagaaattgtgaatgctggtagtggagtcagagaggcttggttggaattgtggctctgcaactagtagctgtgtgacctcaggaaagtaagggaatttttctgaggctttttacttttgagtatagtgagaaatacatatctatttgctttaatgaaaacttaaaaatatatatattatttcattttaaagttcggttattgttttcattatccttaaataatatactaataagaagaatgtaaaaatattttaggaaaaattaacaggttgattgaaattaatcaattttactttctgatagtttgctgctgttgcaactttaccatttgatgtagtaaaaacacaaaagcagacacaactttggacatatgaaagtcataaaagcctaattcctcgcttaattaaaattgctcctgcttgtgccattatgatcagtacatatgaatttggaaaggcttttttccagaaacaaaatgttcgaaggcagcaatactag

SEQ ID NO: 5365 - protein, 52 aa, Homo sapiens
FVNHCKYILICKHLHNYFKRLIELKVQNSFSLFKFNFLFYFKSVCWKFLNAH

SEQ ID NO: 5366 - DNA, 858 bp, Homo sapiens
aaataagcgagatgttattattagctaaaataaaccctttgaaggagacagcactggtctaatttatttcaagaatagcgtatccattcagaaaggtagtaataactcaggacactgctagggagaatgagctgttttcctcagaaactccttttagaaaaaaaaagttttaaaactatttacaataaaatgtgaatgaaaaaatggttgtgaggacttttctttggcattggataccccatgaaggtttctatacactttttaagagataggggtctcacttaagagttcaagaccaggctggtcttgaactcttaagctcaagagatcgatcttcccacctcagcctcccaagtagctgtcttttaaaaatttcattatgaaaaatttttaagacctagaaaaagtttaaaaaataactaccatcaagtttaagaaacaagcattatcaagtcaggagaaaccttcagtacattcctccttaattgcatccagtcctatacatctttaaacatacagcctttttctgtttattatttttaatgaatctaactattaaaaataaaacttaaagtagctttttaggtaaacaaacctcttcttatggtaaagaaatgatatatccgcaagggccatggacactatgttatctgtagtaggaattattaaattgttatttataatagcattatttctttattttaacatttagtttctatgcctttgcatatgtcaacctggattataatgaagaacattgttgctaaaaatggattttccggattattttcaggcctaattcctcgcttaattaaaattgctcctgcttgtgccattatgatcagtacatatgaattt

SEQ ID NO: 5367 - protein, 46 aa, Homo sapiens
MPLHMSTWIIMKNIVAKNGFSGLFSGLIPRLIKIAPACAIMISTYE

SEQ ID NO: 5368 - DNA, 702 bp, Homo sapiens
cttctcgcgcctcgctctggccctgcaggttgtgtttccgcctctaccccgcctccattccgttgctctctcagtctcagacccgggctctcggtccgccgcttcaggtcttggcgcagcctcagagagttggcgcggctctgtgttgaccaaacctagtggatgcagttagcgccggagcccggccccgcccgtcaccagggttattcccgccttctaggtttgccaggactgccggccctgcagctgccttctgccccaggtttttggctactgatgttacaaacaataaaatattggagcatagagttgaagaacagactcaaaccaggctggagtgcagtaatgcgatcttggctcattgcaacttctgcctcctgggttaaagggattctcatgcctcagtcccccacggaactgggactacaggtttttatttaattagttaaaaatatggatcctgagacaaggggacaagagattatcaaagtgacacctcttcaacaaatgcttgcctcatgtactggagctatactgacatcagtaatagataccactcgctaattgaaacttaacatatcttcatagtgacacccctggatgttgttaaaattagactccaagcccaaaacaacccactccccaaaggaaaatgttttgtatatagtaatggactcatggatcatctatgtgtctgtgaag

SEQ ID NO: 5369 - protein, 92 aa, Homo sapiens
MQLAPEPGPARHQGYSRLLGLPGLPALQLPSAPGFWLLMLQTIKYWSIELKNRLKPGWSAVMRSWLIATSASWVKGILMPQSPTELGLQVFI

SEQ ID NO: 5370 - DNA, 3256 bp, Homo sapiens
ctctctgaggctgcgccaagacctgaagcggcggaccgagagcccgggtctgagactgagagagcaacggaatggaggcggggtagaggcggaaacacaacctgcagggccagagcgaggcgcgagaaggacggcggcgtgagggggcggggcgcgcagcgcgagaaggcaggcacgaggggcgagcgcgaggcggggcacggcgcgtggcgtgagacggggcggggcgcgcgtatcggcgccgcggccgcgtgacgcgttttcaaatcttcaaccgccgcagcccactcgtttgtgctttgcgccttcctcctccgcgccttggagccggatccggccccggaaacccgacctgcagacgcggtacctctactgcgtagaggccgtagctggcggaaggagagaggcggccgtcctgtcaacaggccgggggaagccgtgctttcgcggctgcccggtgcgacactttctccggacccagcatgtaggtgccgggcgactgccatgaactccggagccatgaggatccacagtaaaggacatttccagggtggaatccaagtcaaaaatgaaaaaaacagaccatctctgaaatctctgaaaactgataacaggccagaaaaatccaaatgtaagccactttggggaaaagtattttaccttgacttaccttctgtcaccatatctgaaaaacttcaaaaggacattaaggatctgggagggcgagttgaagaatttctcagcaaagatatcagttatcttatttcaaataagaaggaagctaaatttgcacaaaccttgggtcgaatttctcctgtaccaagtccagaatctgcatatactgcagaaaccacttcacctcatcccagccatgatggaagttcatttaagtcaccagacacagtgtgtttaagcagaggaaaattattagttgaaaaagctatcaaggaccatgattttattccttcaaatagtatattatcaaatgccttgtcatggggagtaaaaattcttcatattgatgacattagatactacattgaacaaaagaaaaaagagttgtatttactcaagaaatcaagtacttcagtaagagatgggggcaaaagagttggtagtggtgcacaaaaaacaagaacaggaagactcaaaaagccttttgtaaaggtggaagatatgagccaaagccctgcagtccatttgatgtagacaagccatctagtatgcaaaagcaaactcaggttaaactaagaatccaaacagatggcgataagtatggtggaacctcaattcaactccagttgaaagagaagaagaaaaaaggatattgtgaatgttgcttgcagaaatatgaagatctagaaactcaccttctaagtgagcaacacagaaactttgcacagagtaaccagtatcaagttgttgatgatattgtatctaagttagtttttgactttgtggaatatgaaaaggacacacctaaaaagaaaagaataaaatacagtgttggatccctttctcctgtttctgcaagtgtcctgaaaaagactgaacaaaaggaaaaagtggaattgcaacatatttctcagaaagattgccaggaagatgatacaacagtgaaggagcagaatttcctgtataaagagacccaggaaactgaaaaaaagctcctgtttatttcagagcccatcccccacccttcaaatgaattgagagggcttaatgagaaaatgagtaataaatgttccatgttaagtacagctgaagatgacataagacagaattttacacagctacctctacataaaaacaaacaggaatgcattcttgacatttccgaacacacattaagtgaaaatgacttagaagaactaagggtagatcactataaatgtaacatacaggcatctgtacatgtttctgatttcagtacagataatagtggatctcaaccaaaacagaagtcagatactgtgctttttccagcaaaggatctcaaggaaaaggaccttcattcaatatttactcatgattctggtctgataacaataaacagttcacaagagcacctaactgttcaggcaaaggctccattccatactcctcctgaggaacccaatgaatgtgacttcaagaatatggatagtttaccttctggtaaaatacatcgaaaagtgaaaataatattaggacgaaatagaaaagaaaatctggaaccaaatgctgaatttgataaaagaactgaatttattacacaagaagaaaacagaatttgtagttcaccggtacagtctttactagacttgtttcagactagtgaagagaaatcagaatttttgggtttcacaagctacacagaaaagagtggtatatgcaatgttttagatatttgggaagaggaaaattcagataatctgttaacagcgtttttctcgtccccttcaacttctacatttactggcttttagaatttaaaaaatgcatacttttcagaagtgataaggatcatattcttgaaatttttataaatatgtatggaaattcttaggatttttttaccagctttgtttacagacccaaatgtaaatattaaaaataaatatttgcaattttctacagaattgaatacctgttaaagaaaaattacagaataaacttgtgactggtcttgttttacattatatatatgttcgtaattgtttcctgagaattacaatgaataataatttgctttgtcactgaaaaccaccagtgaagtgcaatttggggaatatcaaacttagcattatacatttggatattctagttgtattgtaaattttaaaagattatcaggataacatgaccttgccttgaaaaacctaaatttcatacagaaaggaaaaatacatttctatgcttgaattctggaaatcatcagaaatattgacacttgagggtcactggtggaccatgctagtattttggtgctgagtaattagattatgtataggggtaactggaagccatgaaggaaggacttaaccaggctaccaagtggaatataatttatctgctatttttaattacttaccttgtaaataactttaataatattcaaaagttgactctcctgtggctcatgccacaggatcccagcactttgggaggccgaggcaggctgatcacgaggtcagaagatcaagaccatcctggccaacatggtgaaaccttgtctactaaaaatacaaaaaattagctgggcatggcggcatgc

SEQ ID NO: 5371 - protein, 414 aa, Homo sapiens
MQKQTQVKLRIQTDGDKYGGTSIQLQLKEKKKKGYCECCLQKYEDLETHLLSEQHRNFAQSNQYQVVDDIVSKLVFDFVEYEKDTPKKKRIKYSVGSLSPVSASVLKKTEQKEKVELQHISQKDCQEDDTTVKEQNFLYKETQETEKKLLFISEPIPHPSNELRGLNEKMSNKCSMLSTAEDDIRQNFTQLPLHKNKQECILDISEHTLSENDLEELRVDHYKCNIQASVHVSDFSTDNSGSQPKQKSDTVLFPAKDLKEKDLHSIFTHDSGLITINSSQEHLTVQAKAPFHTPPEEPNECDFKNMDSLPSGKIHRKVKIILGRNRKENLEPNAEFDKRTEFITQEENRICSSPVQSLLDLFQTSEEKSEFLGFTSYTEKSGICNVLDIWEEENSDNLLTAFFSSPSTSTFTGF

SEQ ID NO: 5372 - DNA, 3916 bp, Homo sapiens
ctctctgaggctgcgccaagacctgaagcggcggaccgagagcccgggtctgagactgagagagcaacggaatggaggcggggtagaggcggaaacacaacctgcagggccagagcgaggcgcgagaaggacggcggcgtgagggggcggggcgcgcagcgcgagaaggcaggcacgaggggcgagcgcgaggcggggcacggcgcgtggcgtgagacggggcggggcgcgcgtatcggcgccgcggccgcgtgacgcgttttcaaatcttcaaccgccgcagcccactcgtttgtgctttgcgccttcctcctccgcgccttggagccggatccggccccggaaacccgacctgcagacgcggtacctctactgcgtagaggccgtagctggcggaaggagagaggcggccgtcctgtcaacaggccgggggaagccgtgctttcgcggctgcccggtgcgacactttctccggacccagcatgtaggtgccgggcgactgccatgaactccggagccatgaggatccacagtaaaggacatttccagggtggaatccaagtcaaaaatgaaaaaaacagaccatctctgaaatctctgaaaactgataacaggccagaaaaatccaaatgtaagccactttggggaaaagtattttaccttgacttaccttctgtcaccatatctgaaaaacttcaaaaggacattaaggatctgggagggcgagttgaagaatttctcagcaaagatatcagttatcttatttcaaataagaaggaagctaaatttgcacaaaccttgggtcgaatttctcctgtaccaagtccagaatctgcatatactgcagaaaccacttcacctcatcccagccatgatggaagttcatttaagtcaccagacacagtgtgtttaagcagaggaaaattattagttgaaaaagctatcaaggaccatgattttattccttcaaatagtatattatcaaatgccttgtcatggggagtaaaaattcttcatattgatgacattagatactacattgaacaaaagaaaaaagagttgtatttactcaagaaatcaagtacttcagtaagagatgggggcaaaagagttggtagtggtgcacaaaaaacaagaacaggaagactcaaaaagccttttgtaaaggtggaagatatgagccaactttataggccattttatcttcagctgaccaatatgccttttataaattattctattcagaagccctgcagtccatttgatgtagacaagccatctagtatgcaaaagcaaactcaggttaaactaagaatccaaacagatggcgataagtatggtggaacctcaattcaactccagttgaaagagaagaagaaaaaaggatattgtgaatgttgcttgcagaaatatgaagatctagaaactcaccttctaagtgagcaacacagaaactttgcacagagtaaccagtatcaagttgttgatgatattgtatctaagttagtttttgactttgtggaatatgaaaaggacacacctaaaaagaaaagaataaaatacagtgttggatccctttctcctgtttctgcaagtgtcctgaaaaagactgaacaaaaggaaaaagtggaattgcaacatatttctcagaaagattgccaggaagatgatacaacagtgaaggagcagaatttcctgtataaagagacccaggaaactgaaaaaaagctcctgtttatttcagagcccatcccccacccttcaaatgaattgagagggcttaatgagaaaatgagtaataaatgttccatgttaagtacagctgaagatgacataagacagaattttacacagctacctctacataaaaacaaacaggaatgcattcttgacatttccgaacacacattaagtgaaaatgacttagaagaactaagggtagatcactataaatgtaacatacaggcatctgtacatgtttctgatttcagtacagataatagtggatctcaaccaaaacagaagtcagatactgtgctttttccagcaaaggatctcaaggaaaaggaccttcattcaatatttactcatgattctggtctgataacaataaacagttcacaagagcacctaactgttcaggcaaaggctccattccatactcctcctgaggaacccaatgaatgtgacttcaagaatatggatagtttaccttctggtaaaatacatcgaaaagtgaaaataatattaggacgaaatagaaaagaaaatctggaaccaaatgctgaatttgataaaagaactgaatttattacacaagaagaaaacagaatttgtagttcaccggtacagtctttactagacttgtttcagactagtgaagagaaatcagaatttttgggtttcacaagctacacagaaaagagtggtatatgcaatgttttagatatttgggaagaggaaaattcagataatctgttaacagcgtttttctcgtccccttcaacttctacatttactggcttttagaatttaaaaaatgcatacttttcagaagtgataaggatcatattcttgaaatttttataaatatgtatggaaattcttaggatttttttaccagctttgtttacagacccaaatgtaaatattaaaaataaatatttgcaattttctacagaattgaatacctgttaaagaaaaattacagaataaacttgtgactggtcttgttttacattatatatatgttcgtaattgtttcctgagaattacaatgaataataatttgctttgtcactgaaaaccaccagtgaagtgcaatttggggaatatcaaacttagcattatacatttggatattctagttgtattgtaaattttaaaagattatcaggataacatgaccttgccttgaaaaacctaaatttcatacagaaaggaaaaatacatttctatgcttgaattctggaaatcatcagaaatattgacacttgagggtcactggtggaccatgctagtattttggtgctgagtaattagattatgtataggggtaactggaagccatgaaggaaggacttaaccaggctaccaagtggaatataatttatctgctatttttaattacttaccttgtaaataactttaataatattcaaaagttgactctcctgtggctcatgccacaggatcccagcactttgggaggccgaggcaggctgatcacgaggtcagaagatcaagaccatcctggccaacatggtgaaaccttgtctactaaaaatacaaaaaattagctgggcatggcggcatgcgcctgtagtcccagctactccctccagaggctgagaattgcttgaacctgggaagtgcaggttgcagtgagccaagattgtgccactgtattccagactgggtgacagagtgagactccatctcaaaaaaaaaaaagttgactctaccccctaatttggtaggagatgaaggagaaaaggatggcattgaattatagatacagttttgggatatatacaaggattgccttgatctggcacttactgatacaagcatttggagaagagaaaattcaaatataagaaatttcaatttgaatctgtggatataaggcatttgcctttgagtatgttcttgtaggagtaagactaccaccagtgacattcaattggttctattgcatagtacatgaatctattgtcactaaaaattaggttactaatcttaatttttttgaaatatatgattctcagtacaggactaattcatatgcttttcctgcatacattattttgatcatttggataacatcaatgaacactggctttttaacacctttgtttttcataccagtacctgaagtaggctcaataaaagagtctttacagtgcatacacgc

SEQ ID NO: 5373 - protein, 674 aa, Homo sapiens; identical to SEQ ID NO: 490

SEQ ID NO: 5374 - DNA, 1037 bp, Homo sapiens
agacctgaagcggcggaccgagagcccgggtctgagactgagagagcaacggaatggaggcggggtagaggcggaaacacaacctgcagggccagagcgaggcgcgagaaggacggcggcgtgagggggcggggcgcgcagcgcgagaaggcaggcacgaggggcgagcgcgaggcggggcacggcgcgtggcgtgagacggggcggggcgcgcgtatcggcgccgcggccgcgtgacgcgttttcaaatcttcaaccgccgcagcccactcgtttgtgctttgcgccttcctcctccgcgccttggagccggatccggccccggaaacccgacctgcagacgcggtacctctactgcgtagaggccgtagctggcggaaggagagaggcggccgtcctgtcaacaggccgggggaagccgtgctttcgcggctgcccggtgcgacactttctccggacccagcatgtaggtgccgggcgactgccatgaactccggagccatgaggatccacagtaaaggacatttccagggtggaatccaagtcaaaaatgaaaaaaacagaccatctctgaaatctctgaaaactgataacaggccagaaaaatccaaatgtaagccactttggggaaaagtattttaccttgacttaccttctgtcaccatatctgaaaaacttcaaaaggacattaaggatctgggaggggtaagtgaaaaccgtacactggcatagaaggaaaaatttgtaactagtactttctactgtgtaatcatttaaatttttcattttggaaaacgcttctattagcaccaagcttaacatttttatcagctgtttatcgttaacaaaaaaccatttgttttaaccttttgtggactgacagacctttcaggtttctctgattagcagtctagtgtaaagttcttagagtgtaagactcccctgtcctagtggaactgctcattgactgcttactgtaatgttggaatgtcctccagataacagcaatttcttgattatgaatcttggggagctac

SEQ ID NO: 5375 - protein, 81 aa, Homo sapiens
MNSGAMRIHSKGHFQGGIQVKNEKNRPSLKSLKTDNRPEKSKCKPLWGKVFYLDLPSVTISEKLQKDIKDLGGVSENRTLA

SEQ ID NO: 5376 - DNA, 910 bp, Homo sapiens
agacctgaagcggcggaccgagagcccgggtctgagactgagagagcaacggaatggaggcggggtagaggcggaaacacaacctgcagggccagagcgaggcgcgagaaggacggcggcgtgagggggcggggcgcgcagcgcgagaaggcaggcacgaggggcgagcgcgaggcggggcacggcgcgtggcgtgagacggggcggggcgcgcgtatcggcgccgcggccgcgtgacgcgttttcaaatcttcaaccgccgcagcccactcgtttgtgctttgcgccttcctcctccgcgccttggagccggatccggccccggaaacccgacctgcagacgcggtacctctactgcgtagaggccgtagctggcggaaggagagaggcggccgtcctgtcaacaggccgggggaagccgtgctttcgcggctgcccggtgcgacactttctccggacccagcatgtaggtgccgggcgactgccatgaactccggagccatgaggatccacagtaaaggacatttccagggtggaatccaagtcaaaaatgaaaaaaacagaccatctctgaaatctctgaaaactgataacaggccagaaaaatccaaataagccctgcagtccatttgatgtagacaagccatctagtatgcaaaagcaaactcaggttaaactaagaatccaaacagatggcgataagtatggtggaacctcaattcaactccagttgaaagagaagaagaaaaaaggatattgtgaatgttgcttgcagaaatatgaagatctagaaactcaccttctaagtgagcaacacagaaactttgcacagagtaaccagtatcaagttgttgatgatattgtatctaagttagtttttgactttgtggaatatgaaaaggacacacct

SEQ ID NO: 5377 - protein, 85 aa, Homo sapiens
MQKQTQVKLRIQTDGDKYGGTSIQLQLKEKKKKGYCECCLQKYEDLETHLLSEQHRNFAQSNQYQVVDDIVSKLVFDFVEYEKDT

SEQ ID NO: 5378 - DNA, 1524 bp, Homo sapiens
agacctgaagcggcggaccgagagcccgggtctgagactgagagagcaacggaatggaggcggggtagaggcggaaacacaacctgcagggccagagcgaggcgcgagaaggacggcggcgtgagggggcggggcgcgcagcgcgagaaggcaggcacgaggggcgagcgcgaggcggggcacggcgcgtggcgtgagacggggcggggcgcgcgtatcggcgccgcggccgcgtgacgcgttttcaaatcttcaaccgccgcagcccactcgtttgtgctttgcgccttcctcctccgcgccttggagccggatccggccccggaaacccgacctgcagacgcggtacctctactgcgtagaggccgtagctggcggaaggagagaggcggccgtcctgtcaacaggccgggggaagccgtgctttcgcggctgcccggtgcgacactttctccggacccagcatgtaggtgccgggcgactgccatgaactccggagccatgaggatccacagtaaaggacatttccagggtggaatccaagtcaaaaatgaaaaaaacagaccatctctgaaatctctgaaaactgataacaggccagaaaaatccaaatgtaagccactttggggaaaagtattttaccttgacttaccttctgtcaccatatctgaaaaacttcaaaaggacattaaggatctgggagggcgagttgaagaatttctcagcaaagatatcagttatcttatttcaaataagaaggaagctaaatttgcacaaaccttgggtcgaatttctcctgtaccaagtccagaatctgcatatactgcagaaaccacttcacctcatcccagccatgatggaagttcatttaagtcaccagacacagtgtgtttaagcagaggaaaattattagttgaaaaagctatcaaggaccatgattttattccttcaaatagtatattatcaaatgccttgtcatggggagtaaaaattcttcatattgatgacattagatactacattgaacaaaagaaaaaagagttgtatttactcaagaaatcaagtacttcagtaagagatgggggcaaaagagttggtagtggtgcacaaaaaacaagaacaggaagactcaaaaagccttttgtaaaggtggaagatatgagccaactttataggccattttatcttcagctgaccaatatgccttttataaattattctattcagaagccctgcagtccatttgatgtagacaagccatctagtatgcaaaagcaaactcaggttaaactaagaatccaaacagatggcgataagtatggtggaacctcaattcaactccagttgaaagagaagaagaaaaaaggatattgtgaatgttgcttgcagaaatatgaagatctagaaactcaccttctaagtgagcaacacagaaactttgcacagagtaaccagtatcaagttgttgatgatattgtatctaagttagtttttgactttgtggaatatgaaaaggacacacct

SEQ ID NO: 5379 - protein, 345 aa, Homo sapiens
MNSGAMRIHSKGHFQGGIQVKNEKNRPSLKSLKTDNRPEKSKCKPLWGKVFYLDLPSVTISEKLQKDIKDLGGRVEEFLSKDISYLISNKKEAKFAQTLGRISPVPSPESAYTAETTSPHPSHDGSSFKSPDTVCLSRGKLLVEKAIKDHDFIPSNSILSNALSWGVKILHIDDIRYYIEQKKKELYLLKKSSTSVRDGGKRVGSGAQKTRTGRLKKPFVKVEDMSQLYRPFYLQLTNMPFINYSIQKPCSPFDVDKPSSMQKQTQVKLRIQTDGDKYGGTSIQLQLKEKKKKGYCECCLQKYEDLETHLLSEQHRNFAQSNQYQVVDDIVSKLVFDFVEYEKDT

SEQ ID NO: 5380 - DNA, 2723 bp, Homo sapiens
agacctgaagcggcggaccgagagcccgggtctgagactgagagagcaacggaatggaggcggggtagaggcggaaacacaacctgcagggccagagcgaggcgcgagaaggacggcggcgtgagggggcggggcgcgcagcgcgagaaggcaggcacgaggggcgagcgcgaggcggggcacggcgcgtggcgtgagacggggcggggcgcgcgtatcggcgccgcggccgcgtgacgcgttttcaaatcttcaaccgccgcagcccactcgtttgtgctttgcgccttcctcctccgcgccttggagccggatccggccccggaaacccgacctgcagacgcggtacctctactgcgtagaggccgtagctggcggaaggagagaggcggccgtcctgtcaacaggccgggggaagccgtgctttcgcggctgcccggtgcgacactttctccggacccagcatgtaggtgccgggcgactgccatgaactccggagccatgaggatccacagtaaaggacatttccagggtggaatccaagtcaaaaatgaaaaaaacagaccatctctgaaatctctgaaaactgataacaggccagaaaaatccaaatgtaagccactttggggaaaagtattttaccttgacttaccttctgtcaccatatctgaaaaacttcaaaaggacattaaggatctgggagggcgagttgaagaatttctcagcaaagatatcagttatcttatttcaaataagaaggaagctaaatttgcacaaaccttgggtcgaatttctcctgtaccaagtccagaatctgcatatactgcagaaaccacttcacctcatcccagccatgatggaagttcatttaagtcaccagacacagtgtgtttaagcagaggaaaattattagttgaaaaagctatcaaggaccatgattttattccttcaaatagtatattatcaaatgccttgtcatggggagtaaaaattcttcatattgatgacattagatactacattgaacaaaagaaaaaagagttgtatttactcaagaaatcaagtacttcagtaagagatgggggcaaaagagttggtagtggtgcacaaaaaacaagaacaggaagactcaaaaagccttttgtaaaggtggaagatatgagccaactttataggccattttatcttcagctgaccaatatgccttttataaattattctattcagaagccctgcagtccatttgatgtagacaagccatctagtatgcaaaagcaaactcaggttaaactaagaatccaaacagatggcgataagtatggtggaacctcaattcaactccagttgaaagagaagaagaaaaaaggatattgtgaatgttgcttgcagaaatatgaagatctagaaactcaccttctaagtgagcaacacagaaactttgcacagagtaaccagtatcaagttgttgatgatattgtatctaagttagtttttgactttgtggaatatgaaaaggacacacctaaaaagaaaagaataaaatacagtgttggatccctttctcctgtttctgcaagtgtcctgaaaaagactgaacaaaaggaaaaagtggaattgcaacatatttctcagaaagattgccaggaagatgatacaacagtgaaggagcagaatttcctgtataaagagacccaggaaactgaaaaaaagctcctgtttatttcagagcccatcccccacccttcaaatgaattgagagggcttaatgagaaaatgagtaataaatgttccatgttaagtacagctgaagatgacataagacagaattttacacagctacctctacataaaaacaaacaggaatgcattcttgacatttccgaacacacattaagtgaaaatgacttagaagaactaagggtagatcactataaatgtaacatacaggcatctgtacatgtttctgatttcagtacagataatagtggatctcaaccaaaacagaagtcagatactgtgctttttccagcaaaggatctcaaggaaaaggaccttcattcaatatttactcatgattctggtctgataacaataaacagttcacaagagcacctaactgttcaggcaaaggctccattccatactcctcctgaggaacccaatgaatgtgacttcaagaatatggatagtttaccttctggtaaaatacatcgaaaagtgaaaataatattaggacgaaatagaaaagaaaatctggaaccaaatgctgaatttgataaaagaactgaatttattacacaagaagaaaacagaatttgtagttcaccggtacagtctttactagacttgtttcagactagtgaagagaaatcagaatttttgggtttcacaagctacacagaaaagagtggtatatgcaatgttttagatatttgggaagaggaaaattcagataatctgttaacagcgtttttctcgtccccttcaacttctacatttactggcttttagaatttaaaaaatgcatacttttcagaagtgataaggatcatattcttgaaatttttataaatatgtatggaaattcttaggatttttttaccagctttgtttacagacccaaatgtaaatattaaaaataaatatttgcaattttctacagaattgaatacctgttaaagaaaaattacagaataaacttgtgactggtcttgttttacatt

SEQ ID NO: 5381 - protein, 674 aa, Homo sapiens; identical to SEQ ID NO: 490

SEQ ID NO: 5382 - DNA, 2631 bp, Homo sapiens
agacctgaagcggcggaccgagagcccgggtctgagactgagagagcaacggaatggaggcggggtagaggcggaaacacaacctgcagggccagagcgaggcgcgagaaggacggcggcgtgagggggcggggcgcgcagcgcgagaaggcaggcacgaggggcgagcgcgaggcggggcacggcgcgtggcgtgagacggggcggggcgcgcgtatcggcgccgcggccgcgtgacgcgttttcaaatcttcaaccgccgcagcccactcgtttgtgctttgcgccttcctcctccgcgccttggagccggatccggccccggaaacccgacctgcagacgcggtacctctactgcgtagaggccgtagctggcggaaggagagaggcggccgtcctgtcaacaggccgggggaagccgtgctttcgcggctgcccggtgcgacactttctccggacccagcatgtaggtgccgggcgactgccatgaactccggagccatgaggatccacagtaaaggacatttccagggtggaatccaagtcaaaaatgaaaaaaacagaccatctctgaaatctctgaaaactgataacaggccagaaaaatccaaatcgagttgaagaatttctcagcaaagatatcagttatcttatttcaaataagaaggaagctaaatttgcacaaaccttgggtcgaatttctcctgtaccaagtccagaatctgcatatactgcagaaaccacttcacctcatcccagccatgatggaagttcatttaagtcaccagacacagtgtgtttaagcagaggaaaattattagttgaaaaagctatcaaggaccatgattttattccttcaaatagtatattatcaaatgccttgtcatggggagtaaaaattcttcatattgatgacattagatactacattgaacaaaagaaaaaagagttgtatttactcaagaaatcaagtacttcagtaagagatgggggcaaaagagttggtagtggtgcacaaaaaacaagaacaggaagactcaaaaagccttttgtaaaggtggaagatatgagccaactttataggccattttatcttcagctgaccaatatgccttttataaattattctattcagaagccctgcagtccatttgatgtagacaagccatctagtatgcaaaagcaaactcaggttaaactaagaatccaaacagatggcgataagtatggtggaacctcaattcaactccagttgaaagagaagaagaaaaaaggatattgtgaatgttgcttgcagaaatatgaagatctagaaactcaccttctaagtgagcaacacagaaactttgcacagagtaaccagtatcaagttgttgatgatattgtatctaagttagtttttgactttgtggaatatgaaaaggacacacctaaaaagaaaagaataaaatacagtgttggatccctttctcctgtttctgcaagtgtcctgaaaaagactgaacaaaaggaaaaagtggaattgcaacatatttctcagaaagattgccaggaagatgatacaacagtgaaggagcagaatttcctgtataaagagacccaggaaactgaaaaaaagctcctgtttatttcagagcccatcccccacccttcaaatgaattgagagggcttaatgagaaaatgagtaataaatgttccatgttaagtacagctgaagatgacataagacagaattttacacagctacctctacataaaaacaaacaggaatgcattcttgacatttccgaacacacattaagtgaaaatgacttagaagaactaagggtagatcactataaatgtaacatacaggcatctgtacatgtttctgatttcagtacagataatagtggatctcaaccaaaacagaagtcagatactgtgctttttccagcaaaggatctcaaggaaaaggaccttcattcaatatttactcatgattctggtctgataacaataaacagttcacaagagcacctaactgttcaggcaaaggctccattccatactcctcctgaggaacccaatgaatgtgacttcaagaatatggatagtttaccttctggtaaaatacatcgaaaagtgaaaataatattaggacgaaatagaaaagaaaatctggaaccaaatgctgaatttgataaaagaactgaatttattacacaagaagaaaacagaatttgtagttcaccggtacagtctttactagacttgtttcagactagtgaagagaaatcagaatttttgggtttcacaagctacacagaaaagagtggtatatgcaatgttttagatatttgggaagaggaaaattcagataatctgttaacagcgtttttctcgtccccttcaacttctacatttactggcttttagaatttaaaaaatgcatacttttcagaagtgataaggatcatattcttgaaatttttataaatatgtatggaaattcttaggatttttttaccagctttgtttacagacccaaatgtaaatattaaaaataaatatttgcaattttctacagaattgaatacctgttaaagaaaaattacagaataaacttgtgactggtcttgttttacatt

SEQ ID NO: 5383 - protein, 450 aa, Homo sapiens
MSQLYRPFYLQLTNMPFINYSIQKPCSPFDVDKPSSMQKQTQVKLRIQTDGDKYGGTSIQLQLKEKKKKGYCECCLQKYEDLETHLLSEQHRNFAQSNQYQVVDDIVSKLVFDFVEYEKDTPKKKRIKYSVGSLSPVSASVLKKTEQKEKVELQHISQKDCQEDDTTVKEQNFLYKETQETEKKLLFISEPIPHPSNELRGLNEKMSNKCSMLSTAEDDIRQNFTQLPLHKNKQECILDISEHTLSENDLEELRVDHYKCNIQASVHVSDFSTDNSGSQPKQKSDTVLFPAKDLKEKDLHSIFTHDSGLITINSSQEHLTVQAKAPFHTPPEEPNECDFKNMDSLPSGKIHRKVKIILGRNRKENLEPNAEFDKRTEFITQEENRICSSPVQSLLDLFQTSEEKSEFLGFTSYTEKSGICNVLDIWEEENSDNLLTAFFSSPSTSTFTGF

SEQ ID NO: 5384 - DNA, 915 bp, Homo sapiens
caccgggcgctcgctccctgccgagctcttgtcgcccgcccgagcctttgccaggggatgaggtgggaggcgctagaaaccacttagctacagccaaccgcccaatgcagcactcgctcgctccccccgccagcggaagcgtccgcgaagcacaatgcagcactgagccgcggtggaggttgcagcgccacggccgccgcagcaccggccggggctgggtggaggtggccgcggggaccccgggggcgcggagcgagggaaacggactcggcggcgccggcatgaggagctgagcgtctcgggcgaggcgggctgacggcagcaccatgcaggcggcagtggctgtgtccgtgcccttcttgctgctctgtgtcctggggacctgccctccggcgcgctgcggccaggcaggagacgcctcattgatggagctagagaagaggaaggaaaaccgcttcgtggagcgccagagcatcgtgccactgcgcctcatctaccgctcgggcggcgaagacgaaagtcggcacgacgcgctcgacacgcgggtgcggggcgacctcggtggcccgcagattcagatgtttttgaagtcagaatcccagaagaccatataccagatacagttgactcatgttgaccaagcaagcttccaggttgatgcctttggaacgtcattcattctcgatgtcgtgctaaatcatgatttgctgtcctctgaatacatagagagacacattgaacatggaggcaagactgtggaagttaaaggaggagagcactgttactaccagggccatatccgaggaaaccctgactcatttgttgcattgtcaacatgccacggacttcatgggatgttctatgacgggaaccacacatatctcattgagccagaagaaaatgacactactcaag

SEQ ID NO: 5385 - protein, 195 aa, Homo sapiens
MQAAVAVSVPFLLLCVLGTCPPARCGQAGDASLMELEKRKENRFVERQSIVPLRLIYRSGGEDESRHDALDTRVRGDLGGPQIQMFLKSESQKTIYQIQLTHVDQASFQVDAFGTSFILDVVLNHDLLSSEYIERHIEHGGKTVEVKGGEHCYYQGHIRGNPDSFVALSTCHGLHGMFYDGNHTYLIEPEENDTT

SEQ ID NO: 5386 - DNA, 1026 bp, Homo sapiens
caccgggcgctcgctccctgccgagctcttgtcgcccgcccgagcctttgccaggggatgaggtgggaggcgctagaaaccacttagctacagccaaccgcccaatgcagcactcgctcgctccccccgccagcggaagcgtccgcgaagcacaatgcagcactgagccgcggtggaggttgcagcgccacggccgccgcagcaccggccggggctgggtggaggtggccgcggggaccccgggggcgcggagcgagggaaacggactcggcggcgccggcatgaggagctgagcgtctcgggcgaggcgggctgacggcagcaccatgcaggcggcagtggctgtgtccgtgcccttcttgctgctctgtgtcctggggacctgccctccggcgcgctgcggccaggcaggagacgcctcattgatggagctagagaagaggaaggaaaaccgcttcgtggagcgccagagcatcgtgccactgcgcctcatctaccgctcgggcggcgaagacgaaagtcggcacgacgcgctcgacacgcgggtgcggggcgacctcggtggcccgcagttgactcatgttgaccaagcaagcttccaggttgatgcctttggaacgtcattcattctcgatgtcgtgctaaatcatgatttgctgtcctctgaatacatagagagacacattgaacatggaggcaagactgtggaagttaaaggaggagagcactgttactaccagggccatatccgaggaaaccctgactcatttgttgcattgtcaacatgccacggacttcatgggatgttctatgacgggaaccacacatatctcattgagccagaagaaaatgacactactcaagaggatttccattttcattcagtttacaaatccagactgtttgaattttccttggatgatcttccatctgaatttcagcaagtaaacattactccatcaaaatttattttgaagccaagaccaaaaaggagtaaacggcagcttcgtcgatatcctcgtaatg

SEQ ID NO: 5387 - protein, 232 aa, Homo sapiens
MQAAVAVSVPFLLLCVLGTCPPARCGQAGDASLMELEKRKENRFVERQSIVPLRLIYRSGGEDESRHDALDTRVRGDLGGPQLTHVDQASFQVDAFGTSFILDVVLNHDLLSSEYIERHIEHGGKTVEVKGGEHCYYQGHIRGNPDSFVALSTCHGLHGMFYDGNHTYLIEPEENDTTQEDFHFHSVYKSRLFEFSLDDLPSEFQQVNITPSKFILKPRPKRSKRQLRRYPR

SEQ ID NO: 5388 - DNA, 2681 bp, Homo sapiens
caccgggcgctcgctccctgccgagctcttgtcgcccgcccgagcctttgccaggggatgaggtgggaggcgctagaaaccacttagctacagccaaccgcccaatgcagcactcgctcgctccccccgccagcggaagcgtccgcgaagcacaatgcagcactgagccgcggtggaggttgcagcgccacggccgccgcagcaccggccggggctgggtggaggtggccgcggggaccccgggggcgcggagcgagggaaacggactcggcggcgccggcatgaggagctgagcgtctcgggcgaggcgggctgacggcagcaccatgcaggcggcagtggctgtgtccgtgcccttcttgctgctctgtgtcctggggacctgccctccggcgcgctgcggccaggcaggagacgcctcattgatggagctagagaagaggaaggaaaaccgcttcgtggagcgccagagcatcgtgccactgcgcctcatctaccgctcgggcggcgaagacgaaagtcggcacgacgcgctcgacacgcgggtgcggggcgacctcggtggcccgcagttgactcatgttgaccaagcaagcttccaggttgatgcctttggaacgtcattcattctcgatgtcgtgctaaatcatgatttgctgtcctctgaatacatagagagacacattgaacatggaggcaagactgtggaagttaaaggaggagagcactgttactaccagggccatatccgaggaaaccctgactcatttgttgcattgtcaacatgccacggacttcatgggatgttctatgacgggaaccacacatatctcattgagccagaagaaaatgacactactcaagaggatttccattttcattcagtttacaaatccagactgtttgaattttccttggatgatcttccatctgaatttcagcaagtaaacattactccatcaaaatttattttgaagccaagaccaaaaaggagtaaacggcagcttcgtcgatatcctcgtaatgtagaagaagaaaccaaatacattgaactgatgattgtgaatgatcaccttatgtttaaaaaacatcggctttccgttgtacataccaatacctatgcgaaatctgtggtgaacatggcagatttaatatataaagaccaacttaagaccaggatagtattggttgctatggaaacctgggcgactgacaacaagtttgccatatctgaaaatccattgatcaccctacgtgagtttatgaaatacaggagggattttatcaaagagaaaagtgatgcagttcaccttttttcgtacgtaacttctgtaatgatgtattactttttttgattccatgttaaatgctttattgtgactgaaatgtatcctttctgctacataacacaattaggatttgacatggcagatggcagatagatttggaaaaagttttcaagtatagattgcttaaaattgccatgaaaatgtaaaagttttaattttgagttattttattatttaatgtttaatttttcaagatatttaaatagagcatttactgagtaaaaatactgctaatactcatatatagtattcttaactacagataaattatattctttaaagttactgtcttttaaatgttaatgttttctctgtttttggttctaagatgagagcttagtatttctggaatttatttttaattttttctcactcttatgttctttttttgatagcatgcatatttgacgtaatagcaaattatatatagtagaattttaaaaatctatcatctaaagtcagagctgttgaagaaagttataaaaggaagaaaagatgtattttggggtaactttatatataattccaaatttagagaaaagttgcaagaatactacaaggaaattgcatatgccctctattcagattcatcaattattcacattttccccatttgtttcataattttcttccattctccctcccttccttccattcatccatccttcagttttttttttgtttttttttgttttttttcctgaacctcttgaaagtaagttgaagacacttactggggatttattattaaatagtatatattctctaagagtaaaaagacattctcttatataaccacagtaaattattaaaaccagaaaatttaacacaaacataatacttttatgtaacccatggtctatattcaaatttcaccaattacctcaataatgtcttttaaagctaattttccccatccaaatccaatccaggatcacacattgcatttaatcatcatgtctctttagtctcctttaatctgaaagatttcctcagctttcctttgtctattttgagtttaatacttttgaagagtataggccaattattttattgactgttcctcattatgggaatgcctgatgttaagatatgtatttttggcagaaataccagagaagtgattttgtgtctgtctcagagtacatcatatcaaccaattattttttaatagatatacttcaatttaagatatttattaatcttgcaagaaaacatccctcataaacctttttctttggttacatgtataaacaattttcacattcttcccttgcaatgtgaatatattgtatagaaatcttatgtatagagaaaataaatgtagtaaac

SEQ ID NO: 5389 - protein, 342 aa, Homo sapiens
MQAAVAVSVPFLLLCVLGTCPPARCGQAGDASLMELEKRKENRFVERQSIVPLRLIYRSGGEDESRHDALDTRVRGDLGGPQLTHVDQASFQVDAFGTSFILDVVLNHDLLSSEYIERHIEHGGKTVEVKGGEHCYYQGHIRGNPDSFVALSTCHGLHGMFYDGNHTYLIEPEENDTTQEDFHFHSVYKSRLFEFSLDDLPSEFQQVNITPSKFILKPRPKRSKRQLRRYPRNVEEETKYIELMIVNDHLMFKKHRLSVVHTNTYAKSVVNMADLIYKDQLKTRIVLVAMETWATDNKFAISENPLITLREFMKYRRDFIKEKSDAVHLFSYVTSVMMYYFF

SEQ ID NO: 5390 - DNA, 2991 bp, Homo sapiens
caccgggcgctcgctccctgccgagctcttgtcgcccgcccgagcctttgccaggggatgaggtgggaggcgctagaaaccacttagctacagccaaccgcccaatgcagcactcgctcgctccccccgccagcggaagcgtccgcgaagcacaatgcagcactgagccgcggtggaggttgcagcgccacggccgccgcagcaccggccggggctgggtggaggtggccgcggggaccccgggggcgcggagcgagggaaacggactcggcggcgccggcatgaggagctgagcgtctcgggcgaggcgggctgacggcagcaccatgcaggcggcagtggctgtgtccgtgcccttcttgctgctctgtgtcctggggacctgccctccggcgcgctgcggccaggcaggagacgcctcattgatggagctagagaagaggaaggaaaaccgcttcgtggagcgccagagcatcgtgccactgcgcctcatctaccgctcgggcggcgaagacgaaagtcggcacgacgcgctcgacacgcgggtgcggggcgacctcggtggcccgcagttgactcatgttgaccaagcaagcttccaggttgatgcctttggaacgtcattcattctcgatgtcgtgctaaatcatgatttgctgtcctctgaatacatagagagacacattgaacatggaggcaagactgtggaagttaaaggaggagagcactgttactaccagggccatatccgaggaaaccctgactcatttgttgcattgtcaacatgccacggacttcatgggatgttctatgacgggaaccacacatatctcattgagccagaagaaaatgacactactcaagaggatttccattttcattcagtttacaaatccagactgtttgaattttccttggatgatcttccatctgaatttcagcaagtaaacattactccatcaaaatttattttgaagccaagaccaaaaaggagtaaacggcagcttcgtcgatatcctcgtaatgtagaagaagaaaccaaatacattgaactgatgattgtgaatgatcaccttatgtttaaaaaacatcggctttccgttgtacataccaatacctatgcgaaatctgtggtgaacatggcagatttaatatataaagaccaacttaagaccaggatagtattggttgctatggaaacctgggcgactgacaacaagtttgccatatctgaaaatccattgatcaccctacgtgagtttatgaaatacaggagggattttatcaaagagaaaagtgatgcagttcaccttttttcgggaagtcaatttgagagtagccggagcggggcagcttatattggtgggatttgctcgttgctgaaaggaggaggcgtgaatgaatttgggaaaactgatttaatggctgttacacttgcccagtcattagcccataatattggtattatctcagacaaaagaaagttagcaagtggtgaatgtaaatgcgaggacacgtggtccgggtgcataatgggagacactggctattatcttcctaaaaagttcacccagtgtaatattgaagagtatcatgacttcctgaatagtggaggtggtgcctgccttttcaacaaaccttctaagcttcttgatcctcctgagtgtggcaatggcttcattgaaactggagaggagtgtgattgtggaaccccggccgaatgtgtccttgaaggagcagagtgttgtaagaaatgcaccttgactcaagactctcaatgcagtgacggtctttgctgtaaaaagtgcaagtttcagcctatgggcactgtgtgccgagaagcagtaaatgattgtgatattcgtgaaacgtgctcaggaaattcaagccagtgtgcccctaatattcataaaatggatggatattcatgtgatggtgttcagggaatttgctttggaggaagatgcaaaaccagagatagacaatgcaaatacatttgggggcaaaaggtgacagcatcagacaaatattgctatgagaaactgaatattgaagggacggagaagggtaactgtgggaaagacaaagacacatggatacagtgcaacaaacgggatgtgctttgtggttaccttttgtgtaccaatattggcaatatcccaaggcttggagaactcgatggtgaaatcacatctactttagttgtgcagcaaggaagaacattaaactgcagtggtgggcatgttaagcttgaagaagatgtagatcttggctatgtggaagatgggacaccttgtggtccccaaatgatgtgcttagaacacaggtgtcttcctgtggcttctttcaactttagtacttgcttgagcagtaaagaaggcactatttgctcaggaaatggagtttgcagtaatgagctgaagtgtgtgtgtaacagacactggataggttctgattgcaacacttacttccctcacaatgatgatgcaaagactggtatcactctgtctggcaatggtgttgctggcaccaatatcataataggcataattgctggcaccattttagtgctggccctcatattaggaataactgcgtggggttataaaaactatcgagaacagagacagttaccccagggagattatgtaaaaaagcctggagatggtgactctttttatagcgacattcctcccggagtcagcacaaactcagcatctagttctaagaagaggtcaaatgggctctctcattcttggagtgaaaggattccagacacaaaacatatttcagacatctgtgaaaatgggcgacctcgaagtaactcttggcaaggtaacctgggaggcaacaaaaagaaaatcagaggcaaaagatttagacctcggtctaattcaactgagtaagtctgaacctctaatggaaaaaggcactccaaggtcctgtgcaaatagtgtcaaaagtaaattaagcagatagtcaaagaactgt

SEQ ID NO: 5391 - protein, 859 aa, Homo sapiens; identical to SEQ ID NO: 492

SEQ ID NO: 5392 - DNA, 2883 bp, Homo sapiens
caccgggcgctcgctccctgccgagctcttgtcgcccgcccgagcctttgccaggggatgaggtgggaggcgctagaaaccacttagctacagccaaccgcccaatgcagcactcgctcgctccccccgccagcggaagcgtccgcgaagcacaatgcagcactgagccgcggtggaggttgcagcgccacggccgccgcagcaccggccggggctgggtggaggtggccgcggggaccccgggggcgcggagcgagggaaacggactcggcggcgccggcatgaggagctgagcgtctcgggcgaggcgggctgacggcagcaccatgcaggcggcagtggctgtgtccgtgcccttcttgctgctctgtgtcctggggacctgccctccggcgcgctgcggccaggcaggagacgcctcattgatggagctagagaagaggaaggaaaaccgcttcgtggagcgccagagcatcgtgccactgcgcctcatctaccgctcgggcggcgaagacgaaagtcggcacgacgcgctcgacacgcgggtgcggggcgacctcggtggcccgcagttgactcatgttgaccaagcaagcttccaggttgatgcctttggaacgtcattcattctcgatgtcgtgctaaatcatgatttgctgtcctctgaatacatagagagacacattgaacatggaggcaagactgtggaagttaaaggaggagagcactgttactaccagggccatatccgaggaaaccctgactcatttgttgcattgtcaacatgccacggacttcatgggatgttctatgacgggaaccacacatatctcattgagccagaagaaaatgacactactcaagaggatttccattttcattcagtttacaaatccagactgtttgaattttccttggatgatcttccatctgaatttcagcaagtaaacattactccatcaaaatttattttgaagccaagaccaaaaaggagtaaacggcagcttcgtcgatatcctcgtaatgtagaagaagaaaccaaatacattgaactgatgattgtgaatgatcaccttatgtttaaaaaacatcggctttccgttgtacataccaatacctatgcgaaatctgtggtgaacatggcagatttaatatataaagaccaacttaagaccaggatagtattggttgctatggaaacctgggcgactgacaacaagtttgccatatctgaaaatccattgatcaccctacgtgagtttatgaaatacaggagggattttatcaaagagaaaagtgatgcagttcaccttttttcgggaagtcaatttgagagtagccggagcggggcagcttatattggtgggatttgctcgttgctgaaaggaggaggcgtgaatgaatttgggaaaactgatttaatggctgttacacttgcccagtcattagcccataatattggtattatctcagacaaaagaaagttagcaagtggtgaatgtaaatgcgaggacacgtggtccgggtgcataatgggagacactggctattatcttcctaaaaagttcacccagtgtaatattgaagagtatcatgacttcctgaatagtggaggtggtgcctgccttttcaacaaaccttctaagcttcttgatcctcctgagtgtggcaatggcttcattgaaactggagaggagtgtgattgtggaaccccggccgaatgtgtccttgaaggagcagagtgttgtaagaaatgcaccttgactcaagactctcaatgcagtgacggtctttgctgtaaaaagtgcaagtttcagcctatgggcactgtgtgccgagaagcagtaaatgattgtgatattcgtgaaacgtgctcaggaaattcaagccagtgtgcccctaatattcataaaatggatggatattcatgtgatggtgttcagggaatttgctttggaggaagatgcaaaaccagagatagacaatgcaaatacatttgggggcaaaaggtgacagcatcagacaaatattgctatgagaaactgaatattgaagggacggagaagggtaactgtgggaaagacaaagacacatggatacagtgcaacaaacgggatgtgctttgtggttaccttttgtgtaccaatattggcaatatcccaaggcttggagaactcgatggtgaaatcacatctactttagttgtgcagcaaggaagaacattaaactgcagtggtgggcatgttaagcttgaagaagatgtagatcttggctatgtggaagatgggacaccttgtggtccccaaatgatgtgcttagaacacaggtgtcttcctgtggcttctttcaactttagtacttgcttgagcagtaaagaaggcactatttgctcaggaaatggagtttgcagtaatgagctgaagtgtgtgtgtaacagacactggataggttctgattgcaacacttacttccctcacaatgatgatgcaaagactggtatcactctgtctggcaatggtgttgctggcaccaatatcataataggcataattgctggcaccattttagtgctggccctcatattaggaataactgcgtggggttataaaaactatcgagaacagaggtcaaatgggctctctcattcttggagtgaaaggattccagacacaaaacatatttcagacatctgtgaaaatgggcgacctcgaagtaactcttggcaaggtaacctgggaggcaacaaaaagaaaatcagaggcaaaagatttagacctcggtctaattcaactgagtaagtctgaacctctaatggaaaaaggcactccaaggtcctgtgcaaatagtgtcaaaagtaaattaagcagatagtcaaagaactgt

SEQ ID NO: 5393 - protein, 823 aa, Homo sapiens; identical to SEQ ID NO: 496

SEQ ID NO: 5394 - DNA, 3580 bp, Homo sapiens
caccgggcgctcgctccctgccgagctcttgtcgcccgcccgagcctttgccaggggatgaggtgggaggcgctagaaaccacttagctacagccaaccgcccaatgcagcactcgctcgctccccccgccagcggaagcgtccgcgaagcacaatgcagcactgagccgcggtggaggttgcagcgccacggccgccgcagcaccggccggggctgggtggaggtggccgcggggaccccgggggcgcggagcgagggaaacggactcggcggcgccggcatgaggagctgagcgtctcgggcgaggcgggctgacggcagcaccatgcaggcggcagtggctgtgtccgtgcccttcttgctgctctgtgtcctggggacctgccctccggcgcgctgcggccaggcaggagacgcctcattgatggagctagagaagaggaaggaaaaccgcttcgtggagcgccagagcatcgtgccactgcgcctcatctaccgctcgggcggcgaagacgaaagtcggcacgacgcgctcgacacgcgggtgcggggcgacctcggtggcccgcagttgactcatgttgaccaagcaagcttccaggttgatgcctttggaacgtcattcattctcgatgtcgtgctaaatcatgatttgctgtcctctgaatacatagagagacacattgaacatggaggcaagactgtggaagttaaaggaggagagcactgttactaccagggccatatccgaggaaaccctgactcatttgttgcattgtcaacatgccacggacttcatgggatgttctatgacgggaaccacacatatctcattgagccagaagaaaatgacactactcaagaggatttccattttcattcagtttacaaatccagactgtttgaattttccttggatgatcttccatctgaatttcagcaagtaaacattactccatcaaaatttattttgaagccaagaccaaaaaggagtaaacggcagcttcgtcgatatcctcgtaatgtagaagaagaaaccaaatacattgaactgatgattgtgaatgatcaccttatgtttaaaaaacatcggctttccgttgtacataccaatacctatgcgaaatctgtggtgaacatggcagatttaatatataaagaccaacttaagaccaggatagtattggttgctatggaaacctgggcgactgacaacaagtttgccatatctgaaaatccattgatcaccctacgtgagtttatgaaatacaggagggattttatcaaagagaaaagtgatgcagttcaccttttttcgggaagtcaatttgagagtagccggagcggggcagcttatattggtgggatttgctcgttgctgaaaggaggaggcgtgaatgaatttgggaaaactgatttaatggctgttacacttgcccagtcattagcccataatattggtattatctcagacaaaagaaagttagcaagtggtgaatgtaaatgcgaggacacgtggtccgggtgcataatgggagacactggctattatcttcctaaaaagttcacccagtgtaatattgaagagtatcatgacttcctgaatagtggaggtggtgcctgccttttcaacaaaccttctaagcttcttgatcctcctgagtgtggcaatggcttcattgaaactggagaggagtgtgattgtggaaccccggccgaatgtgtccttgaaggagcagagtgttgtaagaaatgcaccttgactcaagactctcaatgcagtgacggtctttgctgtaaaaagtgcaagtttcagcctatgggcactgtgtgccgagaagcagtaaatgattgtgatattcgtgaaacgtgctcaggaaattcaagccagtgtgcccctaatattcataaaatggatggatattcatgtgatggtgttcagggaatttgctttggaggaagatgcaaaaccagagatagacaatgcaaatacatttgggggcaaaaggtgacagcatcagacaaatattgctatgagaaactgaatattgaagggacggagaagggtaactgtgggaaagacaaagacacatggatacagtgcaacaaacgggatgtgctttgtggttaccttttgtgtaccaatattggcaatatcccaaggcttggagaactcgatggtgaaatcacatctactttagttgtgcagcaaggaagaacattaaactgcagtggtgggcatgttaagcttgaagaagatgtagatcttggctatgtggaagatgggacaccttgtggtccccaaatgatgtgcttagaacacaggtgtcttcctgtggcttctttcaactttagtacttgcttgagcagtaaagaaggcactatttgctcaggaaatggagtttgcagtaatgagctgaagtgtgtgtgtaacagacactggataggttctgattgcaacacttacttccctcacaatgatgatgcaaagactggtatcactctgtctggcaatggtgttgctggcaccaatatcataataggcataattgctggcaccattttagtgctggccctcatattaggaataactgcgtggggttataaaaactatcgagaacagaggtcaaatgggctctctcattcttggagtgaaaggattccagacacaaaacatatttcagacatctgtgaaaatgggcgacctcgaagtaactcttggcaaggtaacctgggaggcaacaaaaagaaaatcagaggcaaaagatttagacctcggtctaattcaactgagactttatctcctgccaagtctccttcttcatcaactgggtctattgcctccagcagaaaatacccttacccaatgcctccacttcctgatgaggacaagaaagtgaaccgacaaagtgccaggctatgggagacatccatttaagatcaactgtttacatgtgatacatcgaaaactgtttacttcaacttttatagaaacccaggctcatggaatcactgcaaatctatctgctcttcagacaatacgaagaccctctgagatgctacagaggagaggaagcggagtttcacatctggttaccattttctttttgtcattggcttaggatttaactaaccatgaaaagaactactgaaatattacactataacatggaacaataaaggtactggtatgttaatggataatccgcatgacagataatatgtagaaatattcataaagttaactcacatgacccaaatgtagcaagtttcctaaggtacaatagtggattcagaacttgacgttctgaggcacatcctcactgtaaacagtaatgctatatgcatgaagcttctgtttattgttttccatatttaaggaaacaacatcccataatagaaatgagcatgcagggctaaggcatataggatttttctgcaggactttaaagctttgaaaggccaatatcccataggctaactttaaacatgtatttttatttttgttttgttttttacttttcatatttatattagcatacaaggacaattgtatatatgtaacatttttaaaatttt

SEQ ID NO: 5395 - protein, 870 aa, Homo sapiens; identical to SEQ ID NO: 494

SEQ ID NO: 5396 - DNA, 3688 bp, Homo sapiens
caccgggcgctcgctccctgccgagctcttgtcgcccgcccgagcctttgccaggggatgaggtgggaggcgctagaaaccacttagctacagccaaccgcccaatgcagcactcgctcgctccccccgccagcggaagcgtccgcgaagcacaatgcagcactgagccgcggtggaggttgcagcgccacggccgccgcagcaccggccggggctgggtggaggtggccgcggggaccccgggggcgcggagcgagggaaacggactcggcggcgccggcatgaggagctgagcgtctcgggcgaggcgggctgacggcagcaccatgcaggcggcagtggctgtgtccgtgcccttcttgctgctctgtgtcctggggacctgccctccggcgcgctgcggccaggcaggagacgcctcattgatggagctagagaagaggaaggaaaaccgcttcgtggagcgccagagcatcgtgccactgcgcctcatctaccgctcgggcggcgaagacgaaagtcggcacgacgcgctcgacacgcgggtgcggggcgacctcggtggcccgcagttgactcatgttgaccaagcaagcttccaggttgatgcctttggaacgtcattcattctcgatgtcgtgctaaatcatgatttgctgtcctctgaatacatagagagacacattgaacatggaggcaagactgtggaagttaaaggaggagagcactgttactaccagggccatatccgaggaaaccctgactcatttgttgcattgtcaacatgccacggacttcatgggatgttctatgacgggaaccacacatatctcattgagccagaagaaaatgacactactcaagaggatttccattttcattcagtttacaaatccagactgtttgaattttccttggatgatcttccatctgaatttcagcaagtaaacattactccatcaaaatttattttgaagccaagaccaaaaaggagtaaacggcagcttcgtcgatatcctcgtaatgtagaagaagaaaccaaatacattgaactgatgattgtgaatgatcaccttatgtttaaaaaacatcggctttccgttgtacataccaatacctatgcgaaatctgtggtgaacatggcagatttaatatataaagaccaacttaagaccaggatagtattggttgctatggaaacctgggcgactgacaacaagtttgccatatctgaaaatccattgatcaccctacgtgagtttatgaaatacaggagggattttatcaaagagaaaagtgatgcagttcaccttttttcgggaagtcaatttgagagtagccggagcggggcagcttatattggtgggatttgctcgttgctgaaaggaggaggcgtgaatgaatttgggaaaactgatttaatggctgttacacttgcccagtcattagcccataatattggtattatctcagacaaaagaaagttagcaagtggtgaatgtaaatgcgaggacacgtggtccgggtgcataatgggagacactggctattatcttcctaaaaagttcacccagtgtaatattgaagagtatcatgacttcctgaatagtggaggtggtgcctgccttttcaacaaaccttctaagcttcttgatcctcctgagtgtggcaatggcttcattgaaactggagaggagtgtgattgtggaaccccggccgaatgtgtccttgaaggagcagagtgttgtaagaaatgcaccttgactcaagactctcaatgcagtgacggtctttgctgtaaaaagtgcaagtttcagcctatgggcactgtgtgccgagaagcagtaaatgattgtgatattcgtgaaacgtgctcaggaaattcaagccagtgtgcccctaatattcataaaatggatggatattcatgtgatggtgttcagggaatttgctttggaggaagatgcaaaaccagagatagacaatgcaaatacatttgggggcaaaaggtgacagcatcagacaaatattgctatgagaaactgaatattgaagggacggagaagggtaactgtgggaaagacaaagacacatggatacagtgcaacaaacgggatgtgctttgtggttaccttttgtgtaccaatattggcaatatcccaaggcttggagaactcgatggtgaaatcacatctactttagttgtgcagcaaggaagaacattaaactgcagtggtgggcatgttaagcttgaagaagatgtagatcttggctatgtggaagatgggacaccttgtggtccccaaatgatgtgcttagaacacaggtgtcttcctgtggcttctttcaactttagtacttgcttgagcagtaaagaaggcactatttgctcaggaaatggagtttgcagtaatgagctgaagtgtgtgtgtaacagacactggataggttctgattgcaacacttacttccctcacaatgatgatgcaaagactggtatcactctgtctggcaatggtgttgctggcaccaatatcataataggcataattgctggcaccattttagtgctggccctcatattaggaataactgcgtggggttataaaaactatcgagaacagagacagttaccccagggagattatgtaaaaaagcctggagatggtgactctttttatagcgacattcctcccggagtcagcacaaactcagcatctagttctaagaagaggtcaaatgggctctctcattcttggagtgaaaggattccagacacaaaacatatttcagacatctgtgaaaatgggcgacctcgaagtaactcttggcaaggtaacctgggaggcaacaaaaagaaaatcagaggcaaaagatttagacctcggtctaattcaactgagactttatctcctgccaagtctccttcttcatcaactgggtctattgcctccagcagaaaatacccttacccaatgcctccacttcctgatgaggacaagaaagtgaaccgacaaagtgccaggctatgggagacatccatttaagatcaactgtttacatgtgatacatcgaaaactgtttacttcaacttttatagaaacccaggctcatggaatcactgcaaatctatctgctcttcagacaatacgaagaccctctgagatgctacagaggagaggaagcggagtttcacatctggttaccattttctttttgtcattggcttaggatttaactaaccatgaaaagaactactgaaatattacactataacatggaacaataaaggtactggtatgttaatggataatccgcatgacagataatatgtagaaatattcataaagttaactcacatgacccaaatgtagcaagtttcctaaggtacaatagtggattcagaacttgacgttctgaggcacatcctcactgtaaacagtaatgctatatgcatgaagcttctgtttattgttttccatatttaaggaaacaacatcccataatagaaatgagcatgcagggctaaggcatataggatttttctgcaggactttaaagctttgaaaggccaatatcccataggctaactttaaacatgtatttttatttttgttttgttttttacttttcatatttatattagcatacaaggacaattgtatatatgtaacatttttaaaatttt

SEQ ID NO: 5397 - protein, 906 aa, Homo sapiens; identical to SEQ ID NO: 500

SEQ ID NO: 5398 - DNA, 9337 bp, Homo sapiens
caccgggcgctcgctccctgccgagctcttgtcgcccgcccgagcctttgccaggggatgaggtgggaggcgctagaaaccacttagctacagccaaccgcccaatgcagcactcgctcgctccccccgccagcggaagcgtccgcgaagcacaatgcagcactgagccgcggtggaggttgcagcgccacggccgccgcagcaccggccggggctgggtggaggtggccgcggggaccccgggggcgcggagcgagggaaacggactcggcggcgccggcatgaggagctgagcgtctcgggcgaggcgggctgacggcagcaccatgcaggcggcagtggctgtgtccgtgcccttcttgctgctctgtgtcctggggacctgccctccggcgcgctgcggccaggcaggagacgcctcattgatggagctagagaagaggaaggaaaaccgcttcgtggagcgccagagcatcgtgccactgcgcctcatctaccgctcgggcggcgaagacgaaagtcggcacgacgcgctcgacacgcgggtgcggggcgacctcggtggcccgcagttgactcatgttgaccaagcaagcttccaggttgatgcctttggaacgtcattcattctcgatgtcgtgctaaatcatgatttgctgtcctctgaatacatagagagacacattgaacatggaggcaagactgtggaagttaaaggaggagagcactgttactaccagggccatatccgaggaaaccctgactcatttgttgcattgtcaacatgccacggacttcatgggatgttctatgacgggaaccacacatatctcattgagccagaagaaaatgacactactcaagaggatttccattttcattcagtttacaaatccagactgtttgaattttccttggatgatcttccatctgaatttcagcaagtaaacattactccatcaaaatttattttgaagccaagaccaaaaaggagtaaacggcagcttcgtcgatatcctcgtaatgtagaagaagaaaccaaatacattgaactgatgattgtgaatgatcaccttatgtttaaaaaacatcggctttccgttgtacataccaatacctatgcgaaatctgtggtgaacatggcagatttaatatataaagaccaacttaagaccaggatagtattggttgctatggaaacctgggcgactgacaacaagtttgccatatctgaaaatccattgatcaccctacgtgagtttatgaaatacaggagggattttatcaaagagaaaagtgatgcagttcaccttttttcgggaagtcaatttgagagtagccggagcggggcagcttatattggtgggatttgctcgttgctgaaaggaggaggcgtgaatgaatttgggaaaactgatttaatggctgttacacttgcccagtcattagcccataatattggtattatctcagacaaaagaaagttagcaagtggtgaatgtaaatgcgaggacacgtggtccgggtgcataatgggagacactggctattatcttcctaaaaagttcacccagtgtaatattgaagagtatcatgacttcctgaatagtggaggtggtgcctgccttttcaacaaaccttctaagcttcttgatcctcctgagtgtggcaatggcttcattgaaactggagaggagtgtgattgtggaaccccggccgaatgtgtccttgaaggagcagagtgttgtaagaaatgcaccttgactcaagactctcaatgcagtgacggtctttgctgtaaaaagtgcaagtttcagcctatgggcactgtgtgccgagaagcagtaaatgattgtgatattcgtgaaacgtgctcaggaaattcaagccagtgtgcccctaatattcataaaatggatggatattcatgtgatggtgttcagggaatttgctttggaggaagatgcaaaaccagagatagacaatgcaaatacatttgggggcaaaaggtgacagcatcagacaaatattgctatgagaaactgaatattgaagggacggagaagggtaactgtgggaaagacaaagacacatggatacagtgcaacaaacgggatgtgctttgtggttaccttttgtgtaccaatattggcaatatcccaaggcttggagaactcgatggtgaaatcacatctactttagttgtgcagcaaggaagaacattaaactgcagtggtgggcatgttaagcttgaagaagatgtagatcttggctatgtggaagatgggacaccttgtggtccccaaatgatgtgcttagaacacaggtgtcttcctgtggcttctttcaactttagtacttgcttgagcagtaaagaaggcactatttgctcaggaaatggagtttgcagtaatgagctgaagtgtgtgtgtaacagacactggataggttctgattgcaacacttacttccctcacaatgatgatgcaaagactggtatcactctgtctggcaatggtgttgctggcaccaatatcataataggcataattgctggcaccattttagtgctggccctcatattaggaataactgcgtggggttataaaaactatcgagaacagaggtcaaatgggctctctcattcttggagtgaaaggattccagacacaaaacatatttcagacatctgtgaaaatgggcgacctcgaagtaactcttggcaaggtaacctgggaggcaacaaaaagaaaatcagaggcaaaagatttagacctcggtctaattcaactgagactttatctcctgccaagtctccttcttcatcaactgggtctattgcctccagcagaaaatacccttacccaatgcctccacttcctgatgaggacaagaaagtgaaccgacaaagtgccaggctatgggagacatccatttaagatcaactgtttacatgtgatacatcgaaaactgtttacttcaacttttatagaaacccaggctcatggaatcactgcaaatctatctgctcttcagacaatacgaagaccctctgagatgctacagaggagaggaagcggagtttcacatctggttaccattttctttttgtcattggcttaggatttaactaaccatgaaaagaactactgaaatattacactataacatggaacaataaaggtactggtatgttaatggataatccgcatgacagataatatgtagaaatattcataaagttaactcacatgacccaaatgtagcaagtttcctaaggtacaatagtggattcagaacttgacgttctgaggcacatcctcactgtaaacagtaatgctatatgcatgaagcttctgtttattgttttccatatttaaggaaacaacatcccataatagaaatgagcatgcagggctaaggcatataggatttttctgcaggactttaaagctttgaaaggccaatatcccataggctaactttaaacatgtatttttatttttgttttgttttttacttttcatatttatattagcatacaaggacaattgtatatatgtaacatttttaaaattttaaaaaaatgcagctgttacacacaagtgtattttgccaaatgcctaaaaattccgtcacaatcacatcatcgtcatccatccagtgatcttcaaagactataagcaggtaatgtaaatatagtggtcaatgctgtaaatgtgtctctccataattcgtatttgtccaaaacatgtgatatccctttaacctgtgcacagtctggaggcagttttattgagtgagtagttgagtgagagaacaaaatgcccagcaaaacttctggcctccacagtttgctgatgcaggagcccactctgctgccgatgggctgctccctggaaatcatctatcccatccgtccatcccatctcatcccagtgagccagcccctcagcagtgtgtgctgctgagattaagcaagtgcaccaaagacacatgagacaacgtactgccagtgagctggtagcttctggtttgccaatactctaaccctttgtggcctgaagttttgttccttggcaaaactttgtagtcacccttatctgtgaaatgaatgacttgttttaacaaaaacaactttgacactgttgattaagaatatttgtcatcactgggatgtgaatcccaacaagtcattctgcactgactctgaagcaagatgacggaagattctactgtttgagttgagcagcttcaaccattcataaagggttaagttagatctaaaccacagagatgcagcatctgcgaagttacactaacagctggtgggggaaagaatctgatgctttgaaacatatatttttaatccataggaaaataagattctattttaaaagacccttctttaaaaccaaagtttgatagctgttataatggcagatctgtcattccaaaagaaagctagctaccctagtgaggctggagattgatgggctcaatcacatggtctgctctgaagtatacttctgatttcctcatttgctgtgtgttcttaagaggaatggaatctgcagacaggttttcagatatactctcttaaatttgatcctctcccatagtatccatggacaaaatccatatcatcttcatatgtaatcaatttgattacatatcatgcccaaactgaagggccgagttagaaggcagcattttatactgtgtgtttatgtcttctgtaatggacctctcttttgaaagtctttgaaatgtttggaaagcaatttaatgatccaaaattacataatgtaaaacagcatttttcatgacaggaagggatgtgattgttgatatgaccataaagcgatccatcaggccaaggtttgggtgagtgttgggcagtgttgccacatagctcaagccaagaacagaagggcagacagattgaaagatgtagcaaataaagtgactttttaccaagatcactgtaacgtgcactgaatgtttcctggtactgagtgtacaaaaggctaatgctataaggtttattttgactataaaagagtttatagatttgaatataaggtgcctcatgtaaatatgcttcctagttacaggtacacaaactctaatttgaaagaatccacaaatggctagctgagaagttaacagatctctatcattcgtctgtgtgtctttcttccctcacctatttttacatgaaattattatttcaaatgaaaatcatgatcatgtgccttttgggagacatggtttctctagaggtatatagtttgtaattacccgccttggtaataaccttcctgtggaactgactaaaaatttttgttttatttgtagagattatgatttgaggtatacagtaactttaatgttctattcttggaatctactctatctcccatgtttaaacattcttagagccatttgtgggattcattgacaaatttatagtctcaagggagagtttcaagaagtatctatatgtatactcatggttggggttctagaggcattacatctaaatatttatgacttttcatccaccgaggtaggtagcattaaatatacaagcacagcattatttctctttaaatatctattttggagagaaactttgaggccgtatcacagtttatatcatgcaactaatatttatatttcccaatccactacaaaatcattgctaagcagaagagagcagttatttggcctttatgttccattgtatgcctttttcccctcttccagttttatgcattgataagactacagattggcaccctgctgcctgagaagttccatttatccatagtcattgcagtgcagtaaaccctgatttaaaggaacatttaagtctctccagtaagtgtgaacaggaaggcatgggatagaagagagtccttatggagtggactggccacatgaactgtcctccagccactctttatttagatgggaagtggcatggtcctctgaacgctgcaggctggaaatgatccccagggcacatgcaatctgtggaaaggaatacatcggacagtgcaacatggtgagggctttcaatttgctgtggttgctgtatttttaacaagacacccggagcttcgattaggaataacctatcattagagttgttcctttaaaaaatgttgatgaataaagcaaatgtgggtttaaaatgccaacttatttttcactttgatattggtgctttattaagtgataccatagtttctctctcttttccctgttactttaaaaagaattttaaaattgtgtttgtatataaggtcagtctggcatagaatttctgaaagtaacattaataggatttctaaagaagttgtcagaaagacaaaattggatattctctgcactttcagagaaggactatttatgtttgaatttcataacaggcttacatttcttttctattgattcccttgcatatctacataatttaatcctgtctattgtcccagatctcttgtggctactttacctgttaccttttttgggattttgttctttatgttttacagttaccttcggaccagaagatatatggtatttttattcacttttttcagtgttttaaaataaggtttgttcatttattcattttatccattcatttcctattgtcgtatagttctaaccatatatatagtactttaaatattttcttatgttattatttaacacaataataaattcttatctaaagaaaagattattttactttattttacttaaaggaaagagaatttattggcaggatattgagtagcttgtagagtatatggaaggggagagccaagttaggaactggcaggagcgaggagggacaagacagctgcctgcacagtctgataggacacatctggctgctgccactggatgcccacatgggcagcgtgttgtaaatatcaccctaccagttggtaagttggcatgaattttccatgaaacacttgactgccatttgcagcatcatatctactttttatgcacctaattatatttttcctttcacttttatgtttttttctaaaactgccacctaaatacctttccactccgttaaatgtatggagtcaagataaatttctcattcttgctctacagtttaagatgtataagaagtaaacacttccgtggaatagggcttaatttggggctcaaatgttttgttttcctcctgagatgtttttgaatggataagactactctggttttggatgcagcaacttttctcctggcatggaagaactaaggactttgataaacagtttcccattgatagtataatataatgaggggcccagtctgctcttgtgaaaattggctgagcggcagcagcccatcccagctgtgtgtgagtagccccgctgttaaaagtacacctgctgggaattgttggcacatgctcatagcatatgctctgtgggggaggtgcttttaattccaagaggagcttttctcccacatctgcggatgcagaacaaagatgcagcaggactttagaaaacaggagtgtttctactgacattttattcattgctttgttagtcccgcaaatggagcaacttctggttgtttgtaagcagaaaaacaaaacattcaaaaccaaaaacctaattagtacttttgtcctttatatccctaggatgctctagggagtagaggtggcaggcatctttatcttcacccactggcacattagcagcttatgcaacttaggaagtcactgggagatgagtcctaaaagcctgaatttcaggatggggaggagataagaagcagagaactttgggagaccatggggcatttagtcctggcatagacacagaatggatattcacaggaagattcctgaggccagatatgcaggagagcacacattgtcacaaggggtgtggtgggaagagaggtgctggatgcctaagacagacttctgtgcttggcagattgactgagtgttgactctgaatactttgtggtccagtccataataggccagtcactcctgcctgatgcatccctgttgcactgttcataaaacctgtatcatatggggaagcttcaaggctggcaggcttttcatcaagtaatcatcattccatgttcctacgtatccttgaaatcaaaaccaggcaatatgtgtgtttttggttttgttttacaaaaaggcatacaatgagacgaattcttaagataatgcacatacagaatcatcaataaagtttcaaagagtttatgaagaaaaggtattttcctttcttgtaaaaaatgttatatatatataatattctgatctgcattcaccttagggcttagcctcttattttatgaattttcaggctgtgatttgtgttggatggctaagctctaaaataatgcaaatagccccaatctttaaatatagcggtgctaagttgaacaagtaacacaatacagaaaatgctgatatgaatacttagtaataatacaaaagttcctgctaaattatatatgtgtatcactgcctgactagaaaccccacttttcttttctaatccagcacaaaatcaaactctgattctacaaccagtctttttaaagggcaaaaatgactcaacacctttgttttgtatggaaaacttttttttttacactaactgcaaaactgctttaaaaaaaggcttattcaggatagataagcatgtactccttttttaacttgctggaagacttgcccctccaaactagcacccccaaaagacaacttctttcagaaacggggtgttttacctaaacatagtagcttacatgttagccagcagtaggtcggcactagtgttttccacggttatcacctttgacaggtgatgtgcatctatagatagtggaagccaccccatgaggaggtgttaatagcagcatggtttcacttttggtaatcaggtaatcatgtgtatatacttagattcgcattattttaacatttctctgctactctgcacttcaggttcgttaagctattttaataattactggggttatggcaaacaccaatggaaatgtatatggcaactgctttcctgagcaagtgtgatttgttttatggctgttcaagttataaaattgttcttacattgtaggtaaacaaaatcttgatgtttttaaaggtcactgtaacttaaggttcaaatttctggcacagttttattagtattcacttcggaagctaataagataccatggttttctatgttactcccattgtaacattagtaaagtgactttcaataaaagatttatgttattttga

SEQ ID NO: 5399 - protein, 870 aa, Homo sapiens; identical to SEQ ID NO: 494

SEQ ID NO: 5400 - DNA, 9424 bp, Homo sapiens
caccgggcgctcgctccctgccgagctcttgtcgcccgcccgagcctttgccaggggatgaggtgggaggcgctagaaaccacttagctacagccaaccgcccaatgcagcactcgctcgctccccccgccagcggaagcgtccgcgaagcacaatgcagcactgagccgcggtggaggttgcagcgccacggccgccgcagcaccggccggggctgggtggaggtggccgcggggaccccgggggcgcggagcgagggaaacggactcggcggcgccggcatgaggagctgagcgtctcgggcgaggcgggctgacggcagcaccatgcaggcggcagtggctgtgtccgtgcccttcttgctgctctgtgtcctggggacctgccctccggcgcgctgcggccaggcaggagacgcctcattgatggagctagagaagaggaaggaaaaccgcttcgtggagcgccagagcatcgtgccactgcgcctcatctaccgctcgggcggcgaagacgaaagtcggcacgacgcgctcgacacgcgggtgcggggcgacctcggtggcccgcagttgactcatgttgaccaagcaagcttccaggttgatgcctttggaacgtcattcattctcgatgtcgtgctaaatcatgatttgctgtcctctgaatacatagagagacacattgaacatggaggcaagactgtggaagttaaaggaggagagcactgttactaccagggccatatccgaggaaaccctgactcatttgttgcattgtcaacatgccacggacttcatgggatgttctatgacgggaaccacacatatctcattgagccagaagaaaatgacactactcaagaggatttccattttcattcagtttacaaatccagactgtttgaattttccttggatgatcttccatctgaatttcagcaagtaaacattactccatcaaaatttattttgaagccaagaccaaaaaggagtaaacggcagcttcgtcgatatcctcgtaatgtagaagaagaaaccaaatacattgaactgatgattgtgaatgatcaccttatgtttaaaaaacatcggctttccgttgtacataccaatacctatgcgaaatctgtggtgaacatggcagatttaatatataaagaccaacttaagaccaggatagtattggttgctatggaaacctgggcgactgacaacaagtttgccatatctgaaaatccattgatcaccctacgtgagtttatgaaatacaggagggattttatcaaagagaaaagtgatgcagttcaccttttttcgggaagtcaatttgagagtagccggagcggggcagcttatattggtgggatttgctcgttgctgaaaggaggaggcgtgaatgaatttgggaaaactgatttaatggctgttacacttgcccagtcattagcccataatattggtattatctcagacaaaagaaagttagcaagtggtgaatgtaaatgcgaggacacgtggtccgggtgcataatgggagacactggctattatcttcctaaaaagttcacccagtgtaatattgaagagtatcatgacttcctgaatagtggaggtggtgcctgccttttcaacaaaccttctaagcttcttgatcctcctgagtgtggcaatggcttcattgaaactggagaggagtgtgattgtggaaccccggccgaatgtgtccttgaaggagcagagtgttgtaagaaatgcaccttgactcaagactctcaatgcagtgacggtctttgctgtaaaaagtgcaagtttcagcctatgggcactgtgtgccgagaagcagtaaatgattgtgatattcgtgaaacgtgctcaggaaattcaagccagtgtgcccctaatattcataaaatggatggatattcatgtgatggtgttcagggaatttgctttggaggaagatgcaaaaccagagatagacaatgcaaatacatttgggggcaaaaggtgacagcatcagacaaatattgctatgagaaactgaatattgaagggacggagaagggtaactgtgggaaagacaaagacacatggatacagtgcaacaaacgggatgtgctttgtggttaccttttgtgtaccaatattggcaatatcccaaggcttggagaactcgatggtgaaatcacatctactttagttgtgcagcaaggaagaacattaaactgcagtggtgggcatgttaagcttgaagaagatgtagatcttggctatgtggaagatgggacaccttgtggtccccaaatgatgtgcttagaacacaggtgtcttcctgtggcttctttcaactttagtacttgcttgagcagtaaagaaggcactatttgctcaggaaatggagtttgcagtaatgagctgaagtgtgtgtgtaacagacactggataggttctgattgcaacacttacttccctcacaatgatgatgcaaagactggtatcactctgtctggcaatggtgttgctggcaccaatatcataataggcataattgctggcaccattttagtgctggccctcatattaggaataactgcgtggggttataaaaactatcgagaacagaggtcaaatgggctctctcattcttggagtgaaaggattccagacacaaaacatatttcagacatctgtgaaaatgggcgacctcgaagtaactcttggcaaggtaacctgggaggcaacaaaaagaaaatcagaggcaaaagatttagacctcggtctaattcaactgagtatttaaacccatggttcaaaagagactataatgtagctaagtgggtagaagatgtgaataaaaacactgaaggaccatactttaggactttatctcctgccaagtctccttcttcatcaactgggtctattgcctccagcagaaaatacccttacccaatgcctccacttcctgatgaggacaagaaagtgaaccgacaaagtgccaggctatgggagacatccatttaagatcaactgtttacatgtgatacatcgaaaactgtttacttcaacttttatagaaacccaggctcatggaatcactgcaaatctatctgctcttcagacaatacgaagaccctctgagatgctacagaggagaggaagcggagtttcacatctggttaccattttctttttgtcattggcttaggatttaactaaccatgaaaagaactactgaaatattacactataacatggaacaataaaggtactggtatgttaatggataatccgcatgacagataatatgtagaaatattcataaagttaactcacatgacccaaatgtagcaagtttcctaaggtacaatagtggattcagaacttgacgttctgaggcacatcctcactgtaaacagtaatgctatatgcatgaagcttctgtttattgttttccatatttaaggaaacaacatcccataatagaaatgagcatgcagggctaaggcatataggatttttctgcaggactttaaagctttgaaaggccaatatcccataggctaactttaaacatgtatttttatttttgttttgttttttacttttcatatttatattagcatacaaggacaattgtatatatgtaacatttttaaaattttaaaaaaatgcagctgttacacacaagtgtattttgccaaatgcctaaaaattccgtcacaatcacatcatcgtcatccatccagtgatcttcaaagactataagcaggtaatgtaaatatagtggtcaatgctgtaaatgtgtctctccataattcgtatttgtccaaaacatgtgatatccctttaacctgtgcacagtctggaggcagttttattgagtgagtagttgagtgagagaacaaaatgcccagcaaaacttctggcctccacagtttgctgatgcaggagcccactctgctgccgatgggctgctccctggaaatcatctatcccatccgtccatcccatctcatcccagtgagccagcccctcagcagtgtgtgctgctgagattaagcaagtgcaccaaagacacatgagacaacgtactgccagtgagctggtagcttctggtttgccaatactctaaccctttgtggcctgaagttttgttccttggcaaaactttgtagtcacccttatctgtgaaatgaatgacttgttttaacaaaaacaactttgacactgttgattaagaatatttgtcatcactgggatgtgaatcccaacaagtcattctgcactgactctgaagcaagatgacggaagattctactgtttgagttgagcagcttcaaccattcataaagggttaagttagatctaaaccacagagatgcagcatctgcgaagttacactaacagctggtgggggaaagaatctgatgctttgaaacatatatttttaatccataggaaaataagattctattttaaaagacccttctttaaaaccaaagtttgatagctgttataatggcagatctgtcattccaaaagaaagctagctaccctagtgaggctggagattgatgggctcaatcacatggtctgctctgaagtatacttctgatttcctcatttgctgtgtgttcttaagaggaatggaatctgcagacaggttttcagatatactctcttaaatttgatcctctcccatagtatccatggacaaaatccatatcatcttcatatgtaatcaatttgattacatatcatgcccaaactgaagggccgagttagaaggcagcattttatactgtgtgtttatgtcttctgtaatggacctctcttttgaaagtctttgaaatgtttggaaagcaatttaatgatccaaaattacataatgtaaaacagcatttttcatgacaggaagggatgtgattgttgatatgaccataaagcgatccatcaggccaaggtttgggtgagtgttgggcagtgttgccacatagctcaagccaagaacagaagggcagacagattgaaagatgtagcaaataaagtgactttttaccaagatcactgtaacgtgcactgaatgtttcctggtactgagtgtacaaaaggctaatgctataaggtttattttgactataaaagagtttatagatttgaatataaggtgcctcatgtaaatatgcttcctagttacaggtacacaaactctaatttgaaagaatccacaaatggctagctgagaagttaacagatctctatcattcgtctgtgtgtctttcttccctcacctatttttacatgaaattattatttcaaatgaaaatcatgatcatgtgccttttgggagacatggtttctctagaggtatatagtttgtaattacccgccttggtaataaccttcctgtggaactgactaaaaatttttgttttatttgtagagattatgatttgaggtatacagtaactttaatgttctattcttggaatctactctatctcccatgtttaaacattcttagagccatttgtgggattcattgacaaatttatagtctcaagggagagtttcaagaagtatctatatgtatactcatggttggggttctagaggcattacatctaaatatttatgacttttcatccaccgaggtaggtagcattaaatatacaagcacagcattatttctctttaaatatctattttggagagaaactttgaggccgtatcacagtttatatcatgcaactaatatttatatttcccaatccactacaaaatcattgctaagcagaagagagcagttatttggcctttatgttccattgtatgcctttttcccctcttccagttttatgcattgataagactacagattggcaccctgctgcctgagaagttccatttatccatagtcattgcagtgcagtaaaccctgatttaaaggaacatttaagtctctccagtaagtgtgaacaggaaggcatgggatagaagagagtccttatggagtggactggccacatgaactgtcctccagccactctttatttagatgggaagtggcatggtcctctgaacgctgcaggctggaaatgatccccagggcacatgcaatctgtggaaaggaatacatcggacagtgcaacatggtgagggctttcaatttgctgtggttgctgtatttttaacaagacacccggagcttcgattaggaataacctatcattagagttgttcctttaaaaaatgttgatgaataaagcaaatgtgggtttaaaatgccaacttatttttcactttgatattggtgctttattaagtgataccatagtttctctctcttttccctgttactttaaaaagaattttaaaattgtgtttgtatataaggtcagtctggcatagaatttctgaaagtaacattaataggatttctaaagaagttgtcagaaagacaaaattggatattctctgcactttcagagaaggactatttatgtttgaatttcataacaggcttacatttcttttctattgattcccttgcatatctacataatttaatcctgtctattgtcccagatctcttgtggctactttacctgttaccttttttgggattttgttctttatgttttacagttaccttcggaccagaagatatatggtatttttattcacttttttcagtgttttaaaataaggtttgttcatttattcattttatccattcatttcctattgtcgtatagttctaaccatatatatagtactttaaatattttcttatgttattatttaacacaataataaattcttatctaaagaaaagattattttactttattttacttaaaggaaagagaatttattggcaggatattgagtagcttgtagagtatatggaaggggagagccaagttaggaactggcaggagcgaggagggacaagacagctgcctgcacagtctgataggacacatctggctgctgccactggatgcccacatgggcagcgtgttgtaaatatcaccctaccagttggtaagttggcatgaattttccatgaaacacttgactgccatttgcagcatcatatctactttttatgcacctaattatatttttcctttcacttttatgtttttttctaaaactgccacctaaatacctttccactccgttaaatgtatggagtcaagataaatttctcattcttgctctacagtttaagatgtataagaagtaaacacttccgtggaatagggcttaatttggggctcaaatgttttgttttcctcctgagatgtttttgaatggataagactactctggttttggatgcagcaacttttctcctggcatggaagaactaaggactttgataaacagtttcccattgatagtataatataatgaggggcccagtctgctcttgtgaaaattggctgagcggcagcagcccatcccagctgtgtgtgagtagccccgctgttaaaagtacacctgctgggaattgttggcacatgctcatagcatatgctctgtgggggaggtgcttttaattccaagaggagcttttctcccacatctgcggatgcagaacaaagatgcagcaggactttagaaaacaggagtgtttctactgacattttattcattgctttgttagtcccgcaaatggagcaacttctggttgtttgtaagcagaaaaacaaaacattcaaaaccaaaaacctaattagtacttttgtcctttatatccctaggatgctctagggagtagaggtggcaggcatctttatcttcacccactggcacattagcagcttatgcaacttaggaagtcactgggagatgagtcctaaaagcctgaatttcaggatggggaggagataagaagcagagaactttgggagaccatggggcatttagtcctggcatagacacagaatggatattcacaggaagattcctgaggccagatatgcaggagagcacacattgtcacaaggggtgtggtgggaagagaggtgctggatgcctaagacagacttctgtgcttggcagattgactgagtgttgactctgaatactttgtggtccagtccataataggccagtcactcctgcctgatgcatccctgttgcactgttcataaaacctgtatcatatggggaagcttcaaggctggcaggcttttcatcaagtaatcatcattccatgttcctacgtatccttgaaatcaaaaccaggcaatatgtgtgtttttggttttgttttacaaaaaggcatacaatgagacgaattcttaagataatgcacatacagaatcatcaataaagtttcaaagagtttatgaagaaaaggtattttcctttcttgtaaaaaatgttatatatatataatattctgatctgcattcaccttagggcttagcctcttattttatgaattttcaggctgtgatttgtgttggatggctaagctctaaaataatgcaaatagccccaatctttaaatatagcggtgctaagttgaacaagtaacacaatacagaaaatgctgatatgaatacttagtaataatacaaaagttcctgctaaattatatatgtgtatcactgcctgactagaaaccccacttttcttttctaatccagcacaaaatcaaactctgattctacaaccagtctttttaaagggcaaaaatgactcaacacctttgttttgtatggaaaacttttttttttacactaactgcaaaactgctttaaaaaaaggcttattcaggatagataagcatgtactccttttttaacttgctggaagacttgcccctccaaactagcacccccaaaagacaacttctttcagaaacggggtgttttacctaaacatagtagcttacatgttagccagcagtaggtcggcactagtgttttccacggttatcacctttgacaggtgatgtgcatctatagatagtggaagccaccccatgaggaggtgttaatagcagcatggtttcacttttggtaatcaggtaatcatgtgtatatacttagattcgcattattttaacatttctctgctactctgcacttcaggttcgttaagctattttaataattactggggttatggcaaacaccaatggaaatgtatatggcaactgctttcctgagcaagtgtgatttgttttatggctgttcaagttataaaattgttcttacattgtaggtaaacaaaatcttgatgtttttaaaggtcactgtaacttaaggttcaaatttctggcacagttttattagtattcacttcggaagctaataagataccatggttttctatgttactcccattgtaacattagtaaagtgactttcaataaaagatttatgttattttga

SEQ ID NO: 5401 - protein, 899 aa, Homo sapiens; identical to SEQ ID NO: 498

SEQ ID NO: 5402 - DNA, 9445 bp, Homo sapiens
caccgggcgctcgctccctgccgagctcttgtcgcccgcccgagcctttgccaggggatgaggtgggaggcgctagaaaccacttagctacagccaaccgcccaatgcagcactcgctcgctccccccgccagcggaagcgtccgcgaagcacaatgcagcactgagccgcggtggaggttgcagcgccacggccgccgcagcaccggccggggctgggtggaggtggccgcggggaccccgggggcgcggagcgagggaaacggactcggcggcgccggcatgaggagctgagcgtctcgggcgaggcgggctgacggcagcaccatgcaggcggcagtggctgtgtccgtgcccttcttgctgctctgtgtcctggggacctgccctccggcgcgctgcggccaggcaggagacgcctcattgatggagctagagaagaggaaggaaaaccgcttcgtggagcgccagagcatcgtgccactgcgcctcatctaccgctcgggcggcgaagacgaaagtcggcacgacgcgctcgacacgcgggtgcggggcgacctcggtggcccgcagttgactcatgttgaccaagcaagcttccaggttgatgcctttggaacgtcattcattctcgatgtcgtgctaaatcatgatttgctgtcctctgaatacatagagagacacattgaacatggaggcaagactgtggaagttaaaggaggagagcactgttactaccagggccatatccgaggaaaccctgactcatttgttgcattgtcaacatgccacggacttcatgggatgttctatgacgggaaccacacatatctcattgagccagaagaaaatgacactactcaagaggatttccattttcattcagtttacaaatccagactgtttgaattttccttggatgatcttccatctgaatttcagcaagtaaacattactccatcaaaatttattttgaagccaagaccaaaaaggagtaaacggcagcttcgtcgatatcctcgtaatgtagaagaagaaaccaaatacattgaactgatgattgtgaatgatcaccttatgtttaaaaaacatcggctttccgttgtacataccaatacctatgcgaaatctgtggtgaacatggcagatttaatatataaagaccaacttaagaccaggatagtattggttgctatggaaacctgggcgactgacaacaagtttgccatatctgaaaatccattgatcaccctacgtgagtttatgaaatacaggagggattttatcaaagagaaaagtgatgcagttcaccttttttcgggaagtcaatttgagagtagccggagcggggcagcttatattggtgggatttgctcgttgctgaaaggaggaggcgtgaatgaatttgggaaaactgatttaatggctgttacacttgcccagtcattagcccataatattggtattatctcagacaaaagaaagttagcaagtggtgaatgtaaatgcgaggacacgtggtccgggtgcataatgggagacactggctattatcttcctaaaaagttcacccagtgtaatattgaagagtatcatgacttcctgaatagtggaggtggtgcctgccttttcaacaaaccttctaagcttcttgatcctcctgagtgtggcaatggcttcattgaaactggagaggagtgtgattgtggaaccccggccgaatgtgtccttgaaggagcagagtgttgtaagaaatgcaccttgactcaagactctcaatgcagtgacggtctttgctgtaaaaagtgcaagtttcagcctatgggcactgtgtgccgagaagcagtaaatgattgtgatattcgtgaaacgtgctcaggaaattcaagccagtgtgcccctaatattcataaaatggatggatattcatgtgatggtgttcagggaatttgctttggaggaagatgcaaaaccagagatagacaatgcaaatacatttgggggcaaaaggtgacagcatcagacaaatattgctatgagaaactgaatattgaagggacggagaagggtaactgtgggaaagacaaagacacatggatacagtgcaacaaacgggatgtgctttgtggttaccttttgtgtaccaatattggcaatatcccaaggcttggagaactcgatggtgaaatcacatctactttagttgtgcagcaaggaagaacattaaactgcagtggtgggcatgttaagcttgaagaagatgtagatcttggctatgtggaagatgggacaccttgtggtccccaaatgatgtgcttagaacacaggtgtcttcctgtggcttctttcaactttagtacttgcttgagcagtaaagaaggcactatttgctcaggaaatggagtttgcagtaatgagctgaagtgtgtgtgtaacagacactggataggttctgattgcaacacttacttccctcacaatgatgatgcaaagactggtatcactctgtctggcaatggtgttgctggcaccaatatcataataggcataattgctggcaccattttagtgctggccctcatattaggaataactgcgtggggttataaaaactatcgagaacagagacagttaccccagggagattatgtaaaaaagcctggagatggtgactctttttatagcgacattcctcccggagtcagcacaaactcagcatctagttctaagaagaggtcaaatgggctctctcattcttggagtgaaaggattccagacacaaaacatatttcagacatctgtgaaaatgggcgacctcgaagtaactcttggcaaggtaacctgggaggcaacaaaaagaaaatcagaggcaaaagatttagacctcggtctaattcaactgagactttatctcctgccaagtctccttcttcatcaactgggtctattgcctccagcagaaaatacccttacccaatgcctccacttcctgatgaggacaagaaagtgaaccgacaaagtgccaggctatgggagacatccatttaagatcaactgtttacatgtgatacatcgaaaactgtttacttcaacttttatagaaacccaggctcatggaatcactgcaaatctatctgctcttcagacaatacgaagaccctctgagatgctacagaggagaggaagcggagtttcacatctggttaccattttctttttgtcattggcttaggatttaactaaccatgaaaagaactactgaaatattacactataacatggaacaataaaggtactggtatgttaatggataatccgcatgacagataatatgtagaaatattcataaagttaactcacatgacccaaatgtagcaagtttcctaaggtacaatagtggattcagaacttgacgttctgaggcacatcctcactgtaaacagtaatgctatatgcatgaagcttctgtttattgttttccatatttaaggaaacaacatcccataatagaaatgagcatgcagggctaaggcatataggatttttctgcaggactttaaagctttgaaaggccaatatcccataggctaactttaaacatgtatttttatttttgttttgttttttacttttcatatttatattagcatacaaggacaattgtatatatgtaacatttttaaaattttaaaaaaatgcagctgttacacacaagtgtattttgccaaatgcctaaaaattccgtcacaatcacatcatcgtcatccatccagtgatcttcaaagactataagcaggtaatgtaaatatagtggtcaatgctgtaaatgtgtctctccataattcgtatttgtccaaaacatgtgatatccctttaacctgtgcacagtctggaggcagttttattgagtgagtagttgagtgagagaacaaaatgcccagcaaaacttctggcctccacagtttgctgatgcaggagcccactctgctgccgatgggctgctccctggaaatcatctatcccatccgtccatcccatctcatcccagtgagccagcccctcagcagtgtgtgctgctgagattaagcaagtgcaccaaagacacatgagacaacgtactgccagtgagctggtagcttctggtttgccaatactctaaccctttgtggcctgaagttttgttccttggcaaaactttgtagtcacccttatctgtgaaatgaatgacttgttttaacaaaaacaactttgacactgttgattaagaatatttgtcatcactgggatgtgaatcccaacaagtcattctgcactgactctgaagcaagatgacggaagattctactgtttgagttgagcagcttcaaccattcataaagggttaagttagatctaaaccacagagatgcagcatctgcgaagttacactaacagctggtgggggaaagaatctgatgctttgaaacatatatttttaatccataggaaaataagattctattttaaaagacccttctttaaaaccaaagtttgatagctgttataatggcagatctgtcattccaaaagaaagctagctaccctagtgaggctggagattgatgggctcaatcacatggtctgctctgaagtatacttctgatttcctcatttgctgtgtgttcttaagaggaatggaatctgcagacaggttttcagatatactctcttaaatttgatcctctcccatagtatccatggacaaaatccatatcatcttcatatgtaatcaatttgattacatatcatgcccaaactgaagggccgagttagaaggcagcattttatactgtgtgtttatgtcttctgtaatggacctctcttttgaaagtctttgaaatgtttggaaagcaatttaatgatccaaaattacataatgtaaaacagcatttttcatgacaggaagggatgtgattgttgatatgaccataaagcgatccatcaggccaaggtttgggtgagtgttgggcagtgttgccacatagctcaagccaagaacagaagggcagacagattgaaagatgtagcaaataaagtgactttttaccaagatcactgtaacgtgcactgaatgtttcctggtactgagtgtacaaaaggctaatgctataaggtttattttgactataaaagagtttatagatttgaatataaggtgcctcatgtaaatatgcttcctagttacaggtacacaaactctaatttgaaagaatccacaaatggctagctgagaagttaacagatctctatcattcgtctgtgtgtctttcttccctcacctatttttacatgaaattattatttcaaatgaaaatcatgatcatgtgccttttgggagacatggtttctctagaggtatatagtttgtaattacccgccttggtaataaccttcctgtggaactgactaaaaatttttgttttatttgtagagattatgatttgaggtatacagtaactttaatgttctattcttggaatctactctatctcccatgtttaaacattcttagagccatttgtgggattcattgacaaatttatagtctcaagggagagtttcaagaagtatctatatgtatactcatggttggggttctagaggcattacatctaaatatttatgacttttcatccaccgaggtaggtagcattaaatatacaagcacagcattatttctctttaaatatctattttggagagaaactttgaggccgtatcacagtttatatcatgcaactaatatttatatttcccaatccactacaaaatcattgctaagcagaagagagcagttatttggcctttatgttccattgtatgcctttttcccctcttccagttttatgcattgataagactacagattggcaccctgctgcctgagaagttccatttatccatagtcattgcagtgcagtaaaccctgatttaaaggaacatttaagtctctccagtaagtgtgaacaggaaggcatgggatagaagagagtccttatggagtggactggccacatgaactgtcctccagccactctttatttagatgggaagtggcatggtcctctgaacgctgcaggctggaaatgatccccagggcacatgcaatctgtggaaaggaatacatcggacagtgcaacatggtgagggctttcaatttgctgtggttgctgtatttttaacaagacacccggagcttcgattaggaataacctatcattagagttgttcctttaaaaaatgttgatgaataaagcaaatgtgggtttaaaatgccaacttatttttcactttgatattggtgctttattaagtgataccatagtttctctctcttttccctgttactttaaaaagaattttaaaattgtgtttgtatataaggtcagtctggcatagaatttctgaaagtaacattaataggatttctaaagaagttgtcagaaagacaaaattggatattctctgcactttcagagaaggactatttatgtttgaatttcataacaggcttacatttcttttctattgattcccttgcatatctacataatttaatcctgtctattgtcccagatctcttgtggctactttacctgttaccttttttgggattttgttctttatgttttacagttaccttcggaccagaagatatatggtatttttattcacttttttcagtgttttaaaataaggtttgttcatttattcattttatccattcatttcctattgtcgtatagttctaaccatatatatagtactttaaatattttcttatgttattatttaacacaataataaattcttatctaaagaaaagattattttactttattttacttaaaggaaagagaatttattggcaggatattgagtagcttgtagagtatatggaaggggagagccaagttaggaactggcaggagcgaggagggacaagacagctgcctgcacagtctgataggacacatctggctgctgccactggatgcccacatgggcagcgtgttgtaaatatcaccctaccagttggtaagttggcatgaattttccatgaaacacttgactgccatttgcagcatcatatctactttttatgcacctaattatatttttcctttcacttttatgtttttttctaaaactgccacctaaatacctttccactccgttaaatgtatggagtcaagataaatttctcattcttgctctacagtttaagatgtataagaagtaaacacttccgtggaatagggcttaatttggggctcaaatgttttgttttcctcctgagatgtttttgaatggataagactactctggttttggatgcagcaacttttctcctggcatggaagaactaaggactttgataaacagtttcccattgatagtataatataatgaggggcccagtctgctcttgtgaaaattggctgagcggcagcagcccatcccagctgtgtgtgagtagccccgctgttaaaagtacacctgctgggaattgttggcacatgctcatagcatatgctctgtgggggaggtgcttttaattccaagaggagcttttctcccacatctgcggatgcagaacaaagatgcagcaggactttagaaaacaggagtgtttctactgacattttattcattgctttgttagtcccgcaaatggagcaacttctggttgtttgtaagcagaaaaacaaaacattcaaaaccaaaaacctaattagtacttttgtcctttatatccctaggatgctctagggagtagaggtggcaggcatctttatcttcacccactggcacattagcagcttatgcaacttaggaagtcactgggagatgagtcctaaaagcctgaatttcaggatggggaggagataagaagcagagaactttgggagaccatggggcatttagtcctggcatagacacagaatggatattcacaggaagattcctgaggccagatatgcaggagagcacacattgtcacaaggggtgtggtgggaagagaggtgctggatgcctaagacagacttctgtgcttggcagattgactgagtgttgactctgaatactttgtggtccagtccataataggccagtcactcctgcctgatgcatccctgttgcactgttcataaaacctgtatcatatggggaagcttcaaggctggcaggcttttcatcaagtaatcatcattccatgttcctacgtatccttgaaatcaaaaccaggcaatatgtgtgtttttggttttgttttacaaaaaggcatacaatgagacgaattcttaagataatgcacatacagaatcatcaataaagtttcaaagagtttatgaagaaaaggtattttcctttcttgtaaaaaatgttatatatatataatattctgatctgcattcaccttagggcttagcctcttattttatgaattttcaggctgtgatttgtgttggatggctaagctctaaaataatgcaaatagccccaatctttaaatatagcggtgctaagttgaacaagtaacacaatacagaaaatgctgatatgaatacttagtaataatacaaaagttcctgctaaattatatatgtgtatcactgcctgactagaaaccccacttttcttttctaatccagcacaaaatcaaactctgattctacaaccagtctttttaaagggcaaaaatgactcaacacctttgttttgtatggaaaacttttttttttacactaactgcaaaactgctttaaaaaaaggcttattcaggatagataagcatgtactccttttttaacttgctggaagacttgcccctccaaactagcacccccaaaagacaacttctttcagaaacggggtgttttacctaaacatagtagcttacatgttagccagcagtaggtcggcactagtgttttccacggttatcacctttgacaggtgatgtgcatctatagatagtggaagccaccccatgaggaggtgttaatagcagcatggtttcacttttggtaatcaggtaatcatgtgtatatacttagattcgcattattttaacatttctctgctactctgcacttcaggttcgttaagctattttaataattactggggttatggcaaacaccaatggaaatgtatatggcaactgctttcctgagcaagtgtgatttgttttatggctgttcaagttataaaattgttcttacattgtaggtaaacaaaatcttgatgtttttaaaggtcactgtaacttaaggttcaaatttctggcacagttttattagtattcacttcggaagctaataagataccatggttttctatgttactcccattgtaacattagtaaagtgactttcaataaaagatttatgttattttga

SEQ ID NO: 5403 - protein, 906 aa, Homo sapiens; identical to SEQ ID NO: 500

SEQ ID NO: 5404 - DNA, 434 bp, Homo sapiens
cagaaaacatatgttgatcccaaacatgcaatgacatccatataaaccttgcaaaatgatggctgtgatgacacccagtgatggtctttctcaactctctgtacctcatctcactcatcagagactttggagcctcagttgccttgcaatgctgtttcaggctgtactcattctttctgcaccacaaatgtcatgccttctcaagtgtttttatgccctggacccattgcatccagtgatgtcagaggaattctcagctcaatatcgtcacatgatggatcagagatacagaactagaattcatgagggatacatatctcaagtgaaaggtgcatatctacggattgtccacaagaaaccaatcagttatgcaaaatcttttccaaaggaaatgggaaattaaggaaaaaagtgaataaaactttacaaaaatg

SEQ ID NO: 5405 - protein, 115 aa, Homo sapiens; identical to SEQ ID NO: 502

SEQ ID NO: 5406 - DNA, 538 bp, Homo sapiens
agccactatttttaatgaaaaaaattgaatcaatcattgggaagaagagatttttttaattccacaaatgaagaggcccactagtagccttcaattttctgaaaagattaatttcagaagacataggaagttgattgagacagagacaactcagaaagttttgatatatctttcaacttggagtgaaactgctgataaagtagattttaaagagttgaacatttagaaaagaaagggcagaagattgagagatatacatgtgatttataaatggagacaaaaggggtccttatgagaagaagagaagagacacagaagcaaaggcacacaggaagatgtgatgatggaggtagagattggaatgatgtgtctagaggtcaaggaatgccaaagattgccagcaaacaccagaagctgggagaatcaaggaaggattctccactgcaggtttcagagggagcatggccctgccaacatcttgaagtcagactcctaggctccagaactgtgagacaataaatttccattgttttaagcc

SEQ ID NO: 5407 - protein, 82 aa, Homo sapiens
METKGVLMRRREETQKQRHTGRCDDGGRDWNDVSRGQGMPKIASKHQKLGESRKDSPLQVSEGAWPCQHLEVRLLGSRTVRQ

SEQ ID NO: 5408 - DNA, 3384 bp, Homo sapiens
ctattgaagccacctgctcaggacaatgaaattcttcagttacattctggtttatcgccgatttctcttcgtggttttcactgtgttggttttactacctctgcccatcgtcctccacaccaagcttattctgacttttccaagatgaagatgaagagcaggccagtggcatgggccagatgcagtcagatgactgactgaccaggagggcctccgtccagtgaccagtctcagaatttaaaggacccttcccccttacttatgcttgtactcagcccaggaagcagaatgtgcctacacactctttgtggtcgccacattttggctcacagaagcattgcctctgtcggtaacagctttgctacctagtttaatgttacccatgtttgggatcatgccttctaagaaggtggcatctgcttatttcaaggattttcacttactgctaattggagttatctgtttagcaacatccatagaaaaatggaatttgcacaagagaattgctctgaaaatggtgatgatggttggtgtaaatcctgcatggctgacgctggggttcatgagcagcactgcctttttgtctatgtggctcagcaacacctcgacggctgccatggtgatgcccattgcggaggctgtagtgcagcagatcatcaatgcagaagcagaggtcgaggccactcagatgacttacttcaacggatcaaccaaccacggactagaaattgatgaaagtgttaatggacatgaaataaatgagaggaaagagaaaacaaaaccagttccaggatacaataatgatacagggaaaatttcaagcaaggtggagttggaaaagtacttgcaagtgaggtgaccaaaaaacagctttagactcttaaacttagtgtttaaaatgagaaggctgagagacagtctgcttatggagaaagttggagtatttccccagtgccccaaccccctgccacttgtaccatcacagtcgaaagaagggaagagtctcctacttaacaaggaagaggaagaatcaaaccaacaaagggtgtttacagggtcatgggtgagaaaaagaatgaagttgcttttggcttacaccctagaaagtcatctcttaaataaaacacttacatttggactagtgattccccaagtgaaaccatttcaggatgtgccattgtccaagaactcaggcatgagaaccaaatatcgaacaaagaagggccacgtgacacgtaaacttacgtgtttgtgcattgcctactcttctaccattggtggactgacaacaatcactggtacctccaccaacttgatctttgcagagtatttcaatacacgctatcctgactgtcgttgcctcaactttggatcatggtttacgttttccttcccagctgcccttatcattctactcttatcctggatctggcttcagtggcttttcctaggattcaattttaaggagatgttcaaatgtggcaaaaccaaaacagtccaacaaaaagcttgtgctgaggtgattaagcaagaataccaaaagcttgggccaataaggtatcaagaaattgtgaccttggtcctcttcattataatggctctgctatggtttagtcgagaccccggatttgttcctggttggtctgcacttttttcagagtaccctggttttgctacagattcaactgttgctttacttatagggctgctattctttcttatcccagctaagacactgactaaaactacacctacaggagaaattgttgcttttgattactctccactgattacttggaaagaattccagtcattcatgccctgggatatagccattcttgttggtggagggtttgccctggcagatggttgtgaggagtctggattatctaagtggataggaaataaattatctcctctgggttcattaccagcatggctaataattctgatatcttctttgatggtgacatctttaactgaggtagccagcaatccagctaccattacactctttctcccaatattatctccattggccgaagccattcatgtgaaccctctttatattctgataccttctactctgtgtacttcatttgcattcctcctaccagtagcaaatccacccaatgctattgtcttttcatatggtcatctgaaagtcattgacatggttaaagctggacttggtgtcaacattgttggtgttgctgtggttatgcttggcatatgtacttggattgtacccatgtttgacctctacacttacccttcgtgggctcctgctatgagtaatgagaccatgccataataagcacaaaatttctgactatcttgcggtaatttctggaagacattaatgattgactgtaaaatgtggctctaaataactaatgacacacatttaaatcagttatggtgtagctgctgcaattcctgtgaatacccgaaacctgctgttataactcagagtccatatttgttattgcagtgcaactaaagagcatctatgtgccttcatcaagaagcccatgttttgagattttgctcatgaaccatctgcaacttgcttcatcataagaataatttataacttgaccttcaaagagattagagcatttgtttcatcttacagttggagttcaatgtaacattttaaatgcaatttattatttcagaaatttcccatgaaactaaaaatagaaaataagatatacaagttaattcggtacttggataaatcatttctgcattgttgttccagagaatttgctgagaaatcaaagccatggtcatctggtgatgaagagaaaagtttaatctaaatgatatgtgcatttcctcatttaaaaaatccaattggattattcttaatatatacatgtaatatgaaaattgagattgaagcactaattccaaaattatggctgaatatactaaataacagaaaagttacagataagaatttatttctactgaactctatagttagtgtaatataattcatatttttatgatattggcacactgagaaattcattttgtagagctatggataaggcttgctatgatttgcactattagtacagtatagttagaaaggaaagctgaacactataaaactattaacatattttcgtatatgagtaacaactttgcttaagtgtttatcttagttcagaaatacataatgtcatatgttaaaaataaagagatgtagaaatctaaatgaattatcactgtgtatacagacagaaaaatcacataactctggtgtgttaacattgcaatgaaaaaatgaaaaaaagaaggaaaaaagaataagaatgaaaactgctgacgtattacaaaacagaaaaataaatgatttaaaatcaaatc

SEQ ID NO: 5409 - protein, 471 aa, Homo sapiens
MRRLRDSLLMEKVGVFPQCPNPLPLVPSQSKEGKSLLLNKEEEESNQQRVFTGSWVRKRMKLLLAYTLESHLLNKTLTFGLVIPQVKPFQDVPLSKNSGMRTKYRTKKGHVTRKLTCLCIAYSSTIGGLTTITGTSTNLIFAEYFNTRYPDCRCLNFGSWFTFSFPAALIILLLSWIWLQWLFLGFNFKEMFKCGKTKTVQQKACAEVIKQEYQKLGPIRYQEIVTLVLFIIMALLWFSRDPGFVPGWSALFSEYPGFATDSTVALLIGLLFFLIPAKTLTKTTPTGEIVAFDYSPLITWKEFQSFMPWDIAILVGGGFALADGCEESGLSKWIGNKLSPLGSLPAWLIILISSLMVTSLTEVASNPATITLFLPILSPLAEAIHVNPLYILIPSTLCTSFAFLLPVANPPNAIVFSYGHLKVIDMVKAGLGVNIVGVAVVMLGICTWIVPMFDLYTYPSWAPAMSNETMP

SEQ ID NO: 5410 - DNA, 2895 bp, Homo sapiens
atttggaggacactattgaagccacctgctcaggacaatgaaattcttcagttacattctggtttatcgccgatttctcttcgtggttttcactgtgttggttttactacctctgcccatcgtcctccacaccaaggaagcagaatgtgcctacacactctttgtggtcgccacattttggctcacagaagcattgcctctgtcggtaacagctttgctacctagtttaatgttacccatgtttgggatcatgccttctaagaaggtggcatctgcttatttcaaggattttcacttactgctaattggagttatctgtttagcaacatccatagaaaaatggaatttgcacaagagaattgctctgaaaatggtgatgatggttggtgtaaatcctgcatggctgacgctggggttcatgagcagcactgcctttttgtctatgtggctcagcaacacctcgacggctgccatggtgatgcccattgcggaggctgtagtgcagcagatcatcaatgcagaagcagaggtcgaggccactcagatgacttacttcaacggatcaaccaaccacggactagaaattgatgaaagtgttaatggacatgaaataaatgagaggaaagagaaaacaaaaccagttccaggatacaataatgatacagggaaaatttcaagcaaggtggagttggaaaagaactcaggcatgagaaccaaatatcgaacaaagaagggccacgtgacacgtaaacttacgtgtttgtgcattgcctactcttctaccattggtggactgacaacaatcactggtacctccaccaacttgatctttgcagagtatttcaatacacgctatcctgactgtcgttgcctcaactttggatcatggtttacgttttccttcccagctgcccttatcattctactcttatcctggatctggcttcagtggcttttcctaggattcaattttaaggagatgttcaaatgtggcaaaaccaaaacagtccaacaaaaagcttgtgctgaggtgattaagcaagaataccaaaagcttgggccaataaggtatcaagaaattgtgaccttggtcctcttcattataatggctctgctatggtttagtcgagaccccggatttgttcctggttggtctgcacttttttcagagtaccctggttttgctacagattcaactgttgctttacttatagggctgctattctttcttatcccagctaagacactgactaaaactacacctacaggagaaattgttgcttttgattactctccactgattacttggaaagaattccagtcattcatgccctgggatatagccattcttgttggtggagggtttgccctggcagatggttgtgaggagtctggattatctaagtggataggaaataaattatctcctctgggttcattaccagcatggctaataattctgatatcttctttgatggtgacatctttaactgaggtagccagcaatccagctaccattacactctttctcccaatattatctccattggccgaagccattcatgtgaaccctctttatattctgataccttctactctgtgtacttcatttgcattcctcctaccagtagcaaatccacccaatgctattgtcttttcatatggtcatctgaaagtcattgacatggttaaagctggacttggtgtcaacattgttggtgttgctgtggttatgcttggcatatgtacttggattgtacccatgtttgacctctacacttacccttcgtgggctcctgctatgagtaatgagaccatgccataataagcacaaaatttctgactatcttgcggtaatttctggaagacattaatgattgactgtaaaatgtggctctaaataactaatgacacacatttaaatcagttatggtgtagctgctgcaattcctgtgaatacccgaaacctgctgttataactcagagtccatatttgttattgcagtgcaactaaagagcatctatgtgccttcatcaagaagcccatgttttgagattttgctcatgaaccatctgcaacttgcttcatcataagaataatttataacttgaccttcaaagagattagagcatttgtttcatcttacagttggagttcaatgtaacattttaaatgcaatttattatttcagaaatttcccatgaaactaaaaatagaaaataagatatacaagttaattcggtacttggataaatcatttctgcattgttgttccagagaatttgctgagaaatcaaagccatggtcatctggtgatgaagagaaaagtttaatctaaatgatatgtgcatttcctcatttaaaaaatccaattggattattcttaatatatacatgtaatatgaaaattgagattgaagcactaattccaaaattatggctgaatatactaaataacagaaaagttacagataagaatttatttctactgaactctatagttagtgtaatataattcatatttttatgatattggcacactgagaaattcattttgtagagctatggataaggcttgctatgatttgcactattagtacagtatagttagaaaggaaagctgaacactataaaactattaacatattttcgtatatgagtaacaactttgcttaagtgtttatcttagttcagaaatacataatgtcatatgttaaaaataaagagatgtagaaatctaaatgaattatcactgtgtatacagacagaaaaatcacataactctggtgtgttaacattgcaatgaaaaaatgaaaaaaagaaggaaaaaagaataagaatgaaaactgctgacgtattacaaaacagaaaaataaatgatttaaaatcaaatc

SEQ ID NO: 5411 - protein, 595 aa, Homo sapiens; identical to SEQ ID NO: 504

SEQ ID NO: 5412 - DNA, 739 bp, Homo sapiens
gctaattgggcggagggcggtggcgctctggcacgcttgcgcggcgagtagaacgtgtggcggcggcggagatcgcgtctctttcgctccgtgtcccgctgctgctcctgtgagcgcccggcgagtccgtcccgtccaccgtccgcagctggtagccagcctgcccctcgcctcgactccctttcaccaacaccgacacccacattgacacctccagtccggccagccgctccactcgttgcctttgcatctccacacatggcgtcctccgcgcagagcggcggctcctccgggggacccgcggtccccaccgtgcagcggggcatcatcaagatggtcctctcagggtgcgccatcattgtccgaggtcagcctcgtggtgggcctcctcctgagcggcagatcaacctcagcaacattcgtgctggaaatcttgctcgccgggcagccgccacacaacctgatgcaaaggatacccctgatgagccctgggcatttccagctcgagagttccttcgaaagaagctgattgggaaggaagtctgtttcacgatagaaaacaagactccccagggccttgctggtgtgacataggcttcagcttcctatctgtttcccctggggaatcaatgaaaacaaggttcatcattcctctaatagattaaaatttttttcttgattaacttcactgtggagttggcaagagttgttatctgttaatcaaaactgtttaaataaa

SEQ ID NO: 5413 - protein, 111 aa, Homo sapiens
MASSAQSGGSSGGPAVPTVQRGIIKMVLSGCAIIVRGQPRGGPPPERQINLSNIRAGNLARRAAATQPDAKDTPDEPWAFPAREFLRKKLIGKEVCFTIENKTPQGLAGVT

SEQ ID NO: 5414 - DNA, 3538 bp, Homo sapiens
aattgggcggagggcggtggcgctctggcacgcttgcgcggcgagtagaacgtgtggcggcggcggagatcgcgtctctttcgctccgtgtcccgctgctgctcctgtgagcgcccggcgagtccgtcccgtccaccgtccgcagctggtagccagcctgcccctcgcctcgactccctttcaccaacaccgacacccacattgacacctccagtccggccagccgctccactcgttgcctttgcatctccacacatggcgtcctccgcgcagagcggcggctcctccgggggacccgcggtccccaccgtgcagcggggcatcatcaagatggtcctctcagggtgcgccatcattgtccgaggtcagcctcgtggtgggcctcctcctgagcggcagatcaacctcagcaacattcgtgctggaaatcttgctcgccgggcagccgccacacaacctgatgcaaaggatacccctgatgagccctgggcatttccagctcgagagttccttcgaaagaagctgattgggaaggaagtctgtttcacgatagaaaacaagactccccaggggcgagagtatggcatgatctaccttggaaaagataccaatggggaaaacattgcagaatcactggttgcagagggcttagccacccggagagaaggcatgagagctaataatcctgagcagaaccggctttcagaatgtgaagaacaagcaaaggcagccaagaaagggatgtggagtgaggggaacggttcacatactatccgggatctcaagtataccattgaaaacccaaggcactttgtggactcacaccaccagaagcctgttaatgctatcatcgagcatgtgcgggacggcagtgtggtcagggccctgctcctcccagattactacctggttacagtcatgctgtcaggcatcaagtgcccaacttttcgacgggaagcagatggcagtgaaactccagagccttttgctgcagaagccaaatttttcactgagtcgcgactgcttcagagagatgttcagatcattctggagagctgccacaaccagaacattctgggtaccatccttcatccaaatggcaacatcacagagctcctcctgaaggaaggtttcgcacgctgtgtggactggtcgattgcagtttacacccggggcgcagaaaagctgagggcggcagagaggtttgccaaagagcgcaggctgagaatatggagagactatgtggctcccacagctaatttggaccaaaaggacaagcagtttgttgccaaggtgatgcaggttctgaatgctgatgccattgttgtgaagctgaactcaggcgattacaagacgattcacctgtccagcatccgaccaccgaggctggagggggagaacacccaggataagaacaagaaactgcgtcccctgtatgacattccttacatgtttgaggcccgggaatttcttcgaaaaaagcttattgggaagaaggtcaatgtgacggtggactacattagaccagccagcccagccacagagacagtgcctgccttttcagagcgtacctgtgccactgtcaccattggaggaataaacattgctgaggctcttgtcagcaaaggtctagccacagtgatcagataccggcaggatgatgaccagagatcatcacactacgatgaactgcttgctgcagaggccagagctattaagaatggcaaaggattgcatagcaagaaggaagtgcctatccaccgtgttgcagatatatctggggatacccaaaaagcaaagcagttcctgccttttcttcagcgggcaggtcgttctgaagctgtggtggaatacgtcttcagtggttctcgtctcaaactctatttgccaaaggaaacttgccttatcaccttcttgcttgcaggcattgaatgccccagaggagcccgaaacctcccaggcttggtgcaggaaggagagcccttcagcgaggaagctacacttttcaccaaggaactggtgctgcagcgagaggtggaggtggaggtggagagcatggacaaggccggcaactttatcggctggctgcacatcgacggtgccaacctgtccgtcctgctggtggagcacgcgctctccaaggtccacttcaccgccgaacgcagctcctactacaagtccctgctgtctgccgaggaggccgcaaagcagaagaaagagaaggtctgggcccactatgaggagcagcccgtggaggaggtgatgccagtgctggaggagaaggagcgatctgctagctacaagcccgtgtttgtgactgagatcactgatgacctgcacttctacgtgcaggatgtggagaccggcacccagttggagaagctgatggagaacatgcgcaatgacattgccagtcacccccctgtagagggctcctatgccccccgcaggggagagttctgcattgccaaatttgtagatggagaatggtaccgtgcccgagtagagaaagtcgagtctcctgccaaaatacatgtcttctacattgactacggcaacagagaggtcctgccatccacccgcctgggtaccctatcacctgccttcagcactcgggtgctgccagctcaagccacggagtatgccttcgccttcatccaggtgccccaagatgatgatgcccgcacggacgccgtggacagcgtagttcgggatatccagaacactcagtgcctgctcaacgtggaacacctgagtgccggctgcccccatgtcaccctgcagtttgcagattccaagggcgatgtggggctgggcttggtgaaggaagggctggtcatggtggaggtgcgcaaggagaaacagttccagaaagtgatcacagaatacctgaatgcccaagagtcagccaagagcgccaggctgaacctgtggcgctatggagactttcgagctgatgatgcagacgaatttggctacagccgctaaggaggggatcgggtttggcccccagccccgctcacgccagtccctcttcctctgccgggagggtgttttcaactccaaaccccagagaggggttgtagattgggtccagctttgcttcagtgtgtggaaatgtctcgtggggtggcatcggggctgcggggtggggaccccaaggctttctggggcagacccttgtcctctgggatgatgggcactgctatccacagtctctgccagttggttttatttggaggtttgtgggctttttttaaaaaaaaaaagtcctcaaatcaggaagaaacatcaaagactatgtcctagtggagggagtaatcctaacacccaggctggccgccagctggcacctgcctctatcccagactgccctcgtcccagctctctgtccaactgttgattatgtgatttttctgatacgtccattctcaaatgccagtgtgttcacatcttcgctctggccagcccattctgtatttaaagcttttgaggcccaataaaatagtacgtgctgtctgcagcccttattgatcac

SEQ ID NO: 5415 - protein, 910 aa, Homo sapiens; identical to SEQ ID NO: 506

SEQ ID NO: 5416 - DNA, 3704 bp, Homo sapiens
aattgggcggagggcggtggcgctctggcacgcttgcgcggcgagtagaacgtgtggcggcggcggagatcgcgtctctttcgctccgtgtcccgctgctgctcctgtgagcgcccggcgagtccgtcccgtccaccgtccgcagctggtagccagcctgcccctcgcctcgactccctttcaccaacaccgacacccacattgacacctccagtccggccagccgctccactcgttgcctttgcatctccacacatggcgtcctccgcgcagagcggcggctcctccgggggacccgcggtccccaccgtgcagcggggcatcatcaagatggtcctctcagggtgcgccatcattgtccgaggtcagcctcgtggtgggcctcctcctgagcggcagatcaacctcagcaacattcgtgctggaaatcttgctcgccgggcagccgccacacaacctgatgcaaaggatacccctgatgagccctgggcatttccagctcgagagttccttcgaaagaagctgattgggaaggaagtctgtttcacgatagaaaacaagactccccaggggcgagagtatggcatgatctaccttggaaaagataccaatggggaaaacattgcagaatcactggttgcagagggcttagccacccggagagaaggcatgagagctaataatcctgagcagaaccggctttcagaatgtgaagaacaagcaaaggcagccaagaaagggatgtggagtgaggggaacggttcacatactatccgggatctcaagtataccattgaaaacccaaggcactttgtggactcacaccaccagaagcctgttaatgctatcatcgagcatgtgcgggacggcagtgtggtcagggccctgctcctcccagattactacctggttacagtcatgctgtcaggcatcaagtgcccaacttttcgacgggaagcagatggcagtgaaactccagagccttttgctgcagaagccaaatttttcactgagtcgcgactgcttcagagagatgttcagatcattctggagagctgccacaaccagaacattctgggtaccatccttcatccaaatggcaacatcacagagctcctcctgaaggaaggtttcgcacgctgtgtggactggtcgattgcagtttacacccggggcgcagaaaagctgagggcggcagagaggtttgccaaagagcgcaggctgagaatatggagagactatgtggctcccacagctaatttggaccaaaaggacaagcagtttgttgccaaggtgatgcaggttctgaatgctgatgccattgttgtgaagctgaactcaggcgattacaagacgattcacctgtccagcatccgaccaccgaggctggagggggagaacacccaggataagaacaagaaactgcgtcccctgtatgacattccttacatgtttgaggcccgggaatttcttcgaaaaaagcttattgggaagaaggtcaatgtgacggtggactacattagaccagccagcccagccacagagacagtgcctgccttttcagagcgtacctgtgccactgtcaccattggaggaataaacattgctgaggctcttgtcagcaaaggtctagccacagtgatcagataccggcaggatgatgaccagagatcatcacactacgatgaactgcttgctgcagaggccagagctattaagaatggcaaaggattgcatagcaagaaggaagtgcctatccaccgtgttgcagatatatctggggatacccaaaaagcaaagcagttcctgccttttcttcagcgggcaggtcgttctgaagctgtggtggaatacgtcttcagtggttctcgtctcaaactctatttgccaaaggaaacttgccttatcaccttcttgcttgcaggcattgaatgccccagaggagcccgaaacctcccaggcttggtgcaggaaggagagcccttcagcgaggaagctacacttttcaccaaggaactggtgctgcagcgagaggtggaggtggaggtggagagcatggacaaggccggcaactttatcggctggctgcacatcgacggtgccaacctgtccgtcctgctggtggagcacgcgctctccaaggtccacttcaccgccgaacgcagctcctactacaagtccctgctgtctgccgaggaggccgcaaagcagaagaaagagaaggtctgggcccactatgaggagcagcccgtggaggaggtgatgccagtgctggaggagaaggagcgatctgctagctacaagcccgtgtttgtgactgagatcactgatgacctgcacttctacgtgcaggatgtggagaccggcacccagttggagaagctgatggagaacatgcgcaatgacattgccagtcacccccctgtagagggctcctatgccccccgcaggggagagttctgcattgccaaatttgtagatggagaatggtaccgtgcccgagtagagaaagtcgagtctcctgccaaaatacatgtcttctacattgactacggcaacagagaggtcctgccatccacccgcctgggtaccctatcacctgccttcagcactcgggtgctgccagctcaagccacggagtatgccttcgccttcatccaggtgccccaagatgatgatgcccgcacggacgccgtggacagcgtagttcgggatatccagaacactcagtgcctgctcaacgtggaacacctgagtgccggctgcccccatgtcaccctgcagtttgcagattccaagggcgatgtggggctgggcttggtgaaggaagggctggtcatggtggaggtgcgcaaggagaaacagttccagaaagtgatcacagaatacctgaatgcccaagagtcagccaagagcgccaggctgaacctgtggcgctatggagactttcgagctgatgatgcagacgaatttggctacagccgctaaggaggggatcgggtttggcccccagccccgctcacgccagtccctcttcctctgccgggagggtgttttcaactccaaaccccagagaggggttgtagattgggtccagctttgcttcagtgtgtggaaatgtctcgtggggtggcatcggggctgcggggtggggaccccaaggctttctggggcagacccttgtcctctgggatgatgggcactgctatccacagtctctgccagttggttttatttggaggtttgtgggctttttttaaaaaaaaaaagtcctcaaatcaggaagaaacatcaaagactatgtcctagtggagggagtaatcctaacacccaggctggccgccagctggcacctgcctctatcccagactgccctcgtcccagctctctgtccaactgttgattatgtgatttttctgatacgtccattctcaaatgccagtgtgttcacatcttcgctctggccagcccattctgtatttaaagcttttgaggcccaataaaatagtacgtgctgtctgcagcccttattgatcacagtgtggtccagagcatggagtcttggcagcttcacccaggaggagacctggacacttgaatgacccccaagatagtcatccaaatgcctggacattctccctagaaatagagccagctggggaaagcaaggcagatcttcagagtctgagcaagcaactcctgga

SEQ ID NO: 5417 - protein, 910 aa, Homo sapiens; identical to SEQ ID NO: 506

SEQ ID NO: 5418 - DNA, 451 bp, Homo sapiens
attgcagaatcactggttgcagagggcttagccacccggagagaaggcatgagagctaataagtaagtacccaaggctttctggggcagacccttgtcctctgggatgatgggcactgctatccacagtctctgccagttggttttatttggaggtttgtgggctttttttaaaaaaaaaaagtcctcaaatcaggaagaaacatcaaagactatgtcctagtggagggagtaatcctaacacccaggctggccgccagctggcacctgcctctatcccagactgccctcgtcccagctctctgtccaactgttgattatgtgatttttctgatacgtccattctcaaatgccagtgtgttcacatcttcgctctggccagcccattctgtatttaaagcttttgaggcccaataaaatagtacgtgctgtctgcagcccttattgatcac

SEQ ID NO: 5419 - protein, 38 aa, Homo sapiens
MMGTAIHSLCQLVLFGGLWAFFKKKKSSNQEETSKTMS

SEQ ID NO: 5420 - DNA, 617 bp, Homo sapiens
attgcagaatcactggttgcagagggcttagccacccggagagaaggcatgagagctaataagtaagtacccaaggctttctggggcagacccttgtcctctgggatgatgggcactgctatccacagtctctgccagttggttttatttggaggtttgtgggctttttttaaaaaaaaaaagtcctcaaatcaggaagaaacatcaaagactatgtcctagtggagggagtaatcctaacacccaggctggccgccagctggcacctgcctctatcccagactgccctcgtcccagctctctgtccaactgttgattatgtgatttttctgatacgtccattctcaaatgccagtgtgttcacatcttcgctctggccagcccattctgtatttaaagcttttgaggcccaataaaatagtacgtgctgtctgcagcccttattgatcacagtgtggtccagagcatggagtcttggcagcttcacccaggaggagacctggacacttgaatgacccccaagatagtcatccaaatgcctggacattctccctagaaatagagccagctggggaaagcaaggcagatcttcagagtctgagcaagcaactcctgga

SEQ ID NO: 5421 - protein, 38 aa, Homo sapiens; identical to SEQ ID NO: 5419

SEQ ID NO: 5422 - DNA, 502 bp, Homo sapiens
aaacattgctgaggctcttgtcagcaaaggtctagccacagtgatcagataccggcaggatgatgaccagagatcatcacactacgatgaactgcttgctgcagaggccagagctattaagaatggcaaaggattgcatagcaagaaggaagtgcctatccaccgtgttgcagatatatctggggtgagtcgagtccctgaatcaagctgtgtggctcagaggctcaagagcgtgtctgcatatttgctgaaggacttcagcttatgtattttctctagctcgctccttttcaggcactgactgtgacttttccccaccccggggcatctacttaggtatctatagggagcctgttttattatctggaaaagcagaattaacttcattctttttctttacctgaactgtttctatgttgctttttcatttttaattactgtattttgagtttggaaggtagttcttcttggttgtattaaaataaaattgcctctttttaaa

SEQ ID NO: 5423 - protein, 42 aa, Homo sapiens
MMTRDHHTTMNCLLQRPELLRMAKDCIARRKCLSTVLQIYLG

SEQ ID NO: 5424 - DNA, 1126 bp, Homo sapiens
tgttatgttgtgagccgtggtattaatcagccacccctcactaggtgttggggttccaccacgcttcctccaccccccgtcaccacagcagcgggtagtatttaggttgaatattccaaatagtcaattatgacagttaatttcaaatgagatgacttcgaagtacacgtgaaaacaatactattttatatcacgactcatgccatccgtatgtgtaatcaaagccttctaagtcttgatatgtccttacaaagacgaaggatagagtgaatgtcaaaatttgccaaacaggagttactgaaagtctgaaggggaaagcctagttaggttttatcttagaagtgatttttaaaacgaaacacgcagataagctcgagctttctggagccgattcctaaggccttgcaggtggtaagggggtcgagaattggctgaggttcctcggaagtccgcgccgattcggagggccacctctgactttctgatctggggtgcaacccccagtccctgtcccggtcgacaaaggtttgcctgcaatgagatttcattctctacatttaaaggacatcctttctgagctgctgtgaataaatttggaatggtactgtatattttcatctaatggagaactagctgtactttgaataaggattgctgcactggacgactttagaacatccctcacaatgtcgtcaacccggagccagaacccccacggcctgaagcagattggcctggaccagatctgggacgacctcagagccggcatccagcaggtgtacacacggcagagcatggccaagtccagatatatggagctctacacgtatcctcctgcctagcgcaggttgattgcttagagttttgattatttactagtatgacttatgaattattagaattttatattgttttctcctcccagttcatcatgtaaaataatcgcagggttcatttttagccttaagtttttgaacagagtagaactggttcatttttagtcaaatgcagcactgggcagtacagtcaccactgggcacatgtggctgtttacatttgaaatattttaaagttccttaggcacactagctgtgtgattaataaataaaacatttctgtcatgtag

SEQ ID NO: 5425 - protein, 51 aa, Homo sapiens
MSSTRSQNPHGLKQIGLDQIWDDLRAGIQQVYTRQSMAKSRYMELYTYPPA

SEQ ID NO: 5426 - DNA, 696 bp, Homo sapiens
gcgacgacggtttcccggctcccccgccccggacgccgatggcggtgcgttccggccctcccccaacagcttctcccccgcggtcgccggagccggtttgcctgcaatgagatttcattctctacatttaaaggacatcctttctgagctgctgtgaataaatttggaatggtactgtatattttcatctaatggagaactagctgtactttgaataaggattgctgcactggacgactttagaacatccctcacaatgtcgtcaacccggagccagaacccccacggcctgaagcagattggcctggaccagatctgggacgacctcagagccggcatccagcaggtgtacacacggcagagcatggccaagtccagatatatggagctctacacgtatcctcctgcctagcgcaggttgattgcttagagttttgattatttactagtatgacttatgaattattagaattttatattgttttctcctcccagttcatcatgtaaaataatcgcagggttcatttttagccttaagtttttgaacagagtagaactggttcatttttagtcaaatgcagcactgggcagtacagtcaccactgggcacatgtggctgtttacatttgaaatattttaaagttccttaggcacactagctgtgtgattaataaataaaacatttctgtcatgtag

SEQ ID NO: 5427 - protein, 51 aa, Homo sapiens; identical to SEQ ID NO: 5425

SEQ ID NO: 5428 - DNA, 3155 bp, Homo sapiens
ggcggcggcggcgggaggaggagggccgggcgggcaggggaggaggaggaggcgggcgccgtgtcgcacgcagctccaggcggggcagccccggtagctgagggacgcagctagaccttggcgggacggggctttcgccggggcccaggcccagggaccaggcggaggcgtcgcgggagcctttggggcaccacagagatgcgggtttgcctgcaatgagatttcattctctacatttaaaggacatcctttctgagctgctgtgaataaatttggaatggtactgtatattttcatctaatggagaactagctgtactttgaataaggattgctgcactggacgactttagaacatccctcacaatgtcgtcaacccggagccagaacccccacggcctgaagcagattggcctggaccagatctgggacgacctcagagccggcatccagcaggtgtacacacggcagagcatggccaagtccagatatatggagctctacactcatgtttataactactgtactagtgttcaccagtcaaaccaagcacgaggagctggagttcctccttctaagtcgaaaaaggggcagacacctggaggagctcagtttgttggcctggaattatataaacgacttaaggaatttttgaagaattacttgacaaatcttcttaaggatggagaagatttgatggatgagagtgtactgaaattctacactcaacaatgggaagattatcgattttcaagcaaagtgctgaatggaatttgtgcctacctcaatagacattgggttcgccgtgaatgtgacgaaggacgaaaaggaatatatgaaatctattcgcttgcattggtgacttggagagactgtctgttcaggccactgaataaacaggtaacaaatgctgttttaaagctgattgaaaaggaaaggaatggtgaaaccatcaatacaagattgattagtggagttgtacagtcttacgtggaattggggctgaatgaagatgatgcatttgcaaagggccctacgttaacagtgtataaagaatcctttgaatctcaatttttggctgacacagagagattttataccagagagagtactgaattcttgcagcagaacccagttactgaatatatgaaaaaggcagaggctcgtctgcttgaggaacaacgaagagttcaggtttaccttcatgaaagcacacaagatgaattagcaaggaaatgtgaacaagtcctcattgaaaaacacttggaaattttccacacagaatttcagaatttattggatgctgacaaaaatgaagatttgggacgcatgtataatcttgtatctagaatccaggatggcctaggagaattgaaaaaactgttggagacacacattcataatcagggtcttgcagccattgaaaagtgtggagaagctgctttaaatgaccccaaaatgtatgtacagacagtgcttgatgttcataaaaaatacaatgccctggtaatgtctgcattcaacaatgacgctggctttgtggctgctcttgataaggcttgtggtcgcttcataaacaacaacgcggttaccaagatggcccaatcatccagtaaatcccctgagttgctggctcgatactgtgactccttgttgaagaaaagttccaagaacccagaggaggcagaactagaagacacactcaatcaagtgatggttgtcttcaagtacatagaagacaaagacgtatttcagaagttctatgcgaagatgctcgccaagaggctcgtccaccagaacagtgcaagtgacgatgccgaagccagcatgatctccaagttaaagcaagcttgcgggttcgagtacacctctaaacttcagcgcatgtttcaagacattggcgtgagcaaagatctgaacgagcaattcaaaaagcacttgacaaactcagaacccctagacttggatttcagcattcaagtgctgagctccgggtcctggcccttccagcagtcttgtacatttgccttgccgtcagagttggaacgtagttatcagcgattcacagctttctacgccagccgccacagtggccgaaaattgacgtggttatatcagttgtctaaaggagaattggtaactaactgcttcaaaaacagatatactttgcaggcgtcgacattccagatggctatcctgcttcagtacaacacggaagatgcctacactgtgcagcagctgaccgacagcactcaaattaaaatggacattttggcgcaagttttacagattttattaaagtcgaagctattggtcttggaagatgaaaatgcaaatgttgatgaggtggaattgaagccagataccttaataaaattatatcttggttataaaaataagaaattaagggttaacatcaatgtgccaatgaaaaccgaacagaagcaggaacaagaaaccacacacaaaaacatcgaggaagaccgcaaactactgattcaggcggccatcgtgagaatcatgaagatgaggaaggttctgaaacaccagcagttacttggcgaggtcctcactcagctgtcctccaggttcaaacctcgagtccctgtgatcaagaaatgcattgacattctaattgagaaagaatatttggagcgagtggatggtgaaaaggacacctacagttacttggcttaacccttctggaagggtctgactgtgtgacccgcagcaaatagttcatgttggaaagaatgaaaacaactcaagttcatagcagccagcctgccgccattggacctcccttttaaaaactgagaccaagactcccatcagctggtctcggatttacatcggaactgctcaggattgatacatttcaagtctgtaaatacggacaccaacgccatttaccctaatttaagaacagcggggactgaccctccgtgccgagggctgcatgctaccgcactaagtcaatacatgggctccccgattcgcagctgtcgtcttggcagcacttgtcacgttggcagcactttgagagcaagtctgagtggacccacatgtaacctgctatgaaaaccatttgtatagtgtgtttcattttttaatgtgtgaaaataaagaaaattaaaggatttctgtacaagtcgc

SEQ ID NO: 5429 - protein, 776 aa, Homo sapiens; identical to SEQ ID NO: 508

SEQ ID NO: 5430 - DNA, 3226 bp, Homo sapiens
ggcggcggcggcgggaggaggagggccgggcgggcaggggaggaggaggaggcgggcgccgtgtcgcacgcagctccaggcggggcagccccggtagctgagggacgcagctagaccttggcgggacggggctttcgccggggcccaggcccagggaccaggcggaggcgtcgcgggagcctttggggcaccacagagatgcgggtttgcctgcaatgagatttcattctctacatttaaaggacatcctttctgagctgctgtgaataaatttggaatggtactgtatattttcatctaatggagaactagctgtactttgaataaggattgctgcactggacgactttagaacatccctcacaatgtcgtcaacccggagccagaacccccacggcctgaagcagattggcctggaccagatctgggacgacctcagagccggcatccagcaggtgtacacacggcagagcatggccaagtccagatatatggagctctacactcatgtttataactactgtactagtgttcaccagtcaaaccaagcacgaggagctggagttcctccttctaagtcgaaaaaggggcagacacctggaggagctcagtttgttggcctggaattatataaacgacttaaggaatttttgaagaattacttgacaaatcttcttaaggatggagaagatttgatggatgagagtgtactgaaattctacactcaacaatgggaagattatcgattttcaagcaaagtgctgaatggaatttgtgcctacctcaatagacattgggttcgccgtgaatgtgacgaaggacgaaaaggaatatatgaaatctattcgcttgcattggtgacttggagagactgtctgttcaggccactgaataaacaggtaacaaatgctgttttaaagctgattgaaaaggaaaggaatggtgaaaccatcaatacaagattgattagtggagttgtacagtcttacgtggaattggggctgaatgaagatgatgcatttgcaaagggccctacgttaacagtgtataaagaatcctttgaatctcaatttttggctgacacagagagattttataccagagagagtactgaattcttgcagcagaacccagttactgaatatatgaaaaaggcagaggctcgtctgcttgaggaacaacgaagagttcaggtttaccttcatgaaagcacacaagatgaattagcaaggaaatgtgaacaagtcctcattgaaaaacacttggaaattttccacacagaatttcagaatttattggatgctgacaaaaatgaagatttgggacgcatgtataatcttgtatctagaatccaggatggcctaggagaattgaaaaaactgttggagacacacattcataatcagggtcttgcagccattgaaaagtgtggagaagctgctttaaatgaccccaaaatgtatgtacagacagtgcttgatgttcataaaaaatacaatgccctggtaatgtctgcattcaacaatgacgctggctttgtggctgctcttgataaggcttgtggtcgcttcataaacaacaacgcggttaccaagatggcccaatcatccagtaaatcccctgagttgctggctcgatactgtgactccttgttgaagaaaagttccaagaacccagaggaggcagaactagaagacacactcaatcaagtgatggttgtcttcaagtacatagaagacaaagacgtatttcagaagttctatgcgaagatgctcgccaagaggctcgtccaccagaacagtgcaagtgacgatgccgaagccagcatgatctccaagttaaagcaagcttgcgggttcgagtacacctctaaacttcagcgcatgtttcaagacattggcgtgagcaaagatctgaacgagcaattcaaaaagcacttgacaaactcagaacccctagacttggatttcagcattcaagtgctgagctccgggtcctggcccttccagcagtcttgtacatttgccttgccgtcagagttggaacgtagttatcagcgattcacagctttctacgccagccgccacagtggccgaaaattgacgtggttatatcagttgtctaaaggagaattggtaactaactgcttcaaaaacagatatactttgcaggcgtcgacattccagatggctatcctgcttcagtacaacacggaagatgcctacactgtgcagcagctgaccgacagcactcaaattaaaatggacattttggcgcaagttttacagattttattaaagtcgaagctattggtcttggaagatgaaaatgcaaatgttgatgaggtggaattgaagccagataccttaataaaattatatcttggttataaaaataagaaattaagggttaacatcaatgtgccaatgaaaaccgaacagaagcaggaacaagaaaccacacacaaaaacatcgaggaagaccgcaaactactgattcaggcggccatcgtgagaatcatgaagatgaggaaggttctgaaacaccagcagttacttggcgaggtcctcactcagctgtcctccaggttcaaacctcgagtccctgtgatcaagaaatgcattgacattctaattgagaaagaatatttggagcgagtggatggtgaaaaggacacctacagttacttggcttaacccttctggaagggtctgactgtgtgacccgcagcaaatagttcatgttggaaagaatgaaaacaactcaagttcatagcagccagcctgccgccattggacctcccttttaaaaactgagaccaagactcccatcagctggtctcggatttacatcggaactgctcaggattgatacatttcaagtctgtaaatacggacaccaacgccatttaccctaatttaagaacagcggggactgaccctccgtgccgagggctgcatgctaccgcactaagtcaatacatgggctccccgattcgcagctgtcgtcttggcagcacttgtcacgttggcagcactttgagagcaagtctgagtggacccacatgtaacctgctatgaaaaccatttgtatagtgtgtttcattttttaatgtgtgaaaataaagaaaattaaaggatttctgtacaagtcgcattgggttttgttttaagttttactaatttctatatgtaaataaaagatataatgattgtgcaaatttata

SEQ ID NO: 5431 - protein, 776 aa, Homo sapiens; identical to SEQ ID NO: 508

SEQ ID NO: 5432 - DNA, 2956 bp, Homo sapiens
gggaggaggaggaggcgggcgccgtgtcgcacgcagctccaggcggggcagccccggtagctgagggacgcagctagaccttggcgggacggggctttcgccggggcccaggcccagggaccaggcggaggcgtcgcgggagcctttggggcaccacagagatgcgggtttgcctgcaatgagatttcattctctacatttaaaggacatcctttctgagctgctgtgaataaatttggaatggtactgtatattttcatctaatggagaactagctgtactttgaataaggattgctgcactggacgactttagaacatccctcacaatgtcgtcaacccggagccagaacccccacggcctgaatccagatatatggagctctacactcatgtttataactactgtactagtgttcaccagtcaaaccaagcacgaggagctggagttcctccttctaagtcgaaaaaggggcagacacctggaggagctcagtttgttggcctggaattatataaacgacttaaggaatttttgaagaattacttgacaaatcttcttaaggatggagaagatttgatggatgagagtgtactgaaattctacactcaacaatgggaagattatcgattttcaagcaaagtgctgaatggaatttgtgcctacctcaatagacattgggttcgccgtgaatgtgacgaaggacgaaaaggaatatatgaaatctattcgcttgcattggtgacttggagagactgtctgttcaggccactgaataaacaggtaacaaatgctgttttaaagctgattgaaaaggaaaggaatggtgaaaccatcaatacaagattgattagtggagttgtacagtcttacgtggaattggggctgaatgaagatgatgcatttgcaaagggccctacgttaacagtgtataaagaatcctttgaatctcaatttttggctgacacagagagattttataccagagagagtactgaattcttgcagcagaacccagttactgaatatatgaaaaaggcagaggctcgtctgcttgaggaacaacgaagagttcaggtttaccttcatgaaagcacacaagatgaattagcaaggaaatgtgaacaagtcctcattgaaaaacacttggaaattttccacacagaatttcagaatttattggatgctgacaaaaatgaagatttgggacgcatgtataatcttgtatctagaatccaggatggcctaggagaattgaaaaaactgttggagacacacattcataatcagggtcttgcagccattgaaaagtgtggagaagctgctttaaatgaccccaaaatgtatgtacagacagtgcttgatgttcataaaaaatacaatgccctggtaatgtctgcattcaacaatgacgctggctttgtggctgctcttgataaggcttgtggtcgcttcataaacaacaacgcggttaccaagatggcccaatcatccagtaaatcccctgagttgctggctcgatactgtgactccttgttgaagaaaagttccaagaacccagaggaggcagaactagaagacacactcaatcaagtgatggttgtcttcaagtacatagaagacaaagacgtatttcagaagttctatgcgaagatgctcgccaagaggctcgtccaccagaacagtgcaagtgacgatgccgaagccagcatgatctccaagttaaagcaagcttgcgggttcgagtacacctctaaacttcagcgcatgtttcaagacattggcgtgagcaaagatctgaacgagcaattcaaaaagcacttgacaaactcagaacccctagacttggatttcagcattcaagtgctgagctccgggtcctggcccttccagcagtcttgtacatttgccttgccgtcagagttggaacgtagttatcagcgattcacagctttctacgccagccgccacagtggccgaaaattgacgtggttatatcagttgtctaaaggagaattggtaactaactgcttcaaaaacagatatactttgcaggcgtcgacattccagatggctatcctgcttcagtacaacacggaagatgcctacactgtgcagcagctgaccgacagcactcaaattaaaatggacattttggcgcaagttttacagattttattaaagtcgaagctattgtaagaaattaagggttaacatcaatgtgccaatgaaaaccgaacagaagcaggaacaagaaaccacacacaaaaacatcgaggaagaccgcaaactactgattcaggcggccatcgtgagaatcatgaagatgaggaaggttctgaaacaccagcagttacttggcgaggtcctcactcagctgtcctccaggttcaaacctcgagtccctgtgatcaagaaatgcattgacattctaattgagaaagaatatttggagcgagtggatggtgaaaaggacacctacagttacttggcttaacccttctggaagggtctgactgtgtgacccgcagcaaatagttcatgttggaaagaatgaaaacaactcaagttcatagcagccagcctgccgccattggacctcccttttaaaaactgagaccaagactcccatcagctggtctcggatttacatcggaactgctcaggattgatacatttcaagtctgtaaatacggacaccaacgccatttaccctaatttaagaacagcggggactgaccctccgtgccgagggctgcatgctaccgcactaagtcaatacatgggctccccgattcgcagctgtcgtcttggcagcacttgtcacgttggcagcactttgagagcaagtctgagtggacccacatgtaacctgctatgaaaaccatttgtatagtgtgtttcattttttaatgtgtgaaaataaagaaaattaaaggatttctgtacaagtcgc

SEQ ID NO: 5433 - protein, 607 aa, Homo sapiens
MELYTHVYNYCTSVHQSNQARGAGVPPSKSKKGQTPGGAQFVGLELYKRLKEFLKNYLTNLLKDGEDLMDESVLKFYTQQWEDYRFSSKVLNGICAYLNRHWVRRECDEGRKGIYEIYSLALVTWRDCLFRPLNKQVTNAVLKLIEKERNGETINTRLISGVVQSYVELGLNEDDAFAKGPTLTVYKESFESQFLADTERFYTRESTEFLQQNPVTEYMKKAEARLLEEQRRVQVYLHESTQDELARKCEQVLIEKHLEIFHTEFQNLLDADKNEDLGRMYNLVSRIQDGLGELKKLLETHIHNQGLAAIEKCGEAALNDPKMYVQTVLDVHKKYNALVMSAFNNDAGFVAALDKACGRFINNNAVTKMAQSSSKSPELLARYCDSLLKKSSKNPEEAELEDTLNQVMVVFKYIEDKDVFQKFYAKMLAKRLVHQNSASDDAEASMISKLKQACGFEYTSKLQRMFQDIGVSKDLNEQFKKHLTNSEPLDLDFSIQVLSSGSWPFQQSCTFALPSELERSYQRFTAFYASRHSGRKLTWLYQLSKGELVTNCFKNRYTLQASTFQMAILLQYNTEDAYTVQQLTDSTQIKMDILAQVLQILLKSKLL

SEQ ID NO: 5434 - DNA, 3027 bp, Homo sapiens
gggaggaggaggaggcgggcgccgtgtcgcacgcagctccaggcggggcagccccggtagctgagggacgcagctagaccttggcgggacggggctttcgccggggcccaggcccagggaccaggcggaggcgtcgcgggagcctttggggcaccacagagatgcgggtttgcctgcaatgagatttcattctctacatttaaaggacatcctttctgagctgctgtgaataaatttggaatggtactgtatattttcatctaatggagaactagctgtactttgaataaggattgctgcactggacgactttagaacatccctcacaatgtcgtcaacccggagccagaacccccacggcctgaatccagatatatggagctctacactcatgtttataactactgtactagtgttcaccagtcaaaccaagcacgaggagctggagttcctccttctaagtcgaaaaaggggcagacacctggaggagctcagtttgttggcctggaattatataaacgacttaaggaatttttgaagaattacttgacaaatcttcttaaggatggagaagatttgatggatgagagtgtactgaaattctacactcaacaatgggaagattatcgattttcaagcaaagtgctgaatggaatttgtgcctacctcaatagacattgggttcgccgtgaatgtgacgaaggacgaaaaggaatatatgaaatctattcgcttgcattggtgacttggagagactgtctgttcaggccactgaataaacaggtaacaaatgctgttttaaagctgattgaaaaggaaaggaatggtgaaaccatcaatacaagattgattagtggagttgtacagtcttacgtggaattggggctgaatgaagatgatgcatttgcaaagggccctacgttaacagtgtataaagaatcctttgaatctcaatttttggctgacacagagagattttataccagagagagtactgaattcttgcagcagaacccagttactgaatatatgaaaaaggcagaggctcgtctgcttgaggaacaacgaagagttcaggtttaccttcatgaaagcacacaagatgaattagcaaggaaatgtgaacaagtcctcattgaaaaacacttggaaattttccacacagaatttcagaatttattggatgctgacaaaaatgaagatttgggacgcatgtataatcttgtatctagaatccaggatggcctaggagaattgaaaaaactgttggagacacacattcataatcagggtcttgcagccattgaaaagtgtggagaagctgctttaaatgaccccaaaatgtatgtacagacagtgcttgatgttcataaaaaatacaatgccctggtaatgtctgcattcaacaatgacgctggctttgtggctgctcttgataaggcttgtggtcgcttcataaacaacaacgcggttaccaagatggcccaatcatccagtaaatcccctgagttgctggctcgatactgtgactccttgttgaagaaaagttccaagaacccagaggaggcagaactagaagacacactcaatcaagtgatggttgtcttcaagtacatagaagacaaagacgtatttcagaagttctatgcgaagatgctcgccaagaggctcgtccaccagaacagtgcaagtgacgatgccgaagccagcatgatctccaagttaaagcaagcttgcgggttcgagtacacctctaaacttcagcgcatgtttcaagacattggcgtgagcaaagatctgaacgagcaattcaaaaagcacttgacaaactcagaacccctagacttggatttcagcattcaagtgctgagctccgggtcctggcccttccagcagtcttgtacatttgccttgccgtcagagttggaacgtagttatcagcgattcacagctttctacgccagccgccacagtggccgaaaattgacgtggttatatcagttgtctaaaggagaattggtaactaactgcttcaaaaacagatatactttgcaggcgtcgacattccagatggctatcctgcttcagtacaacacggaagatgcctacactgtgcagcagctgaccgacagcactcaaattaaaatggacattttggcgcaagttttacagattttattaaagtcgaagctattgtaagaaattaagggttaacatcaatgtgccaatgaaaaccgaacagaagcaggaacaagaaaccacacacaaaaacatcgaggaagaccgcaaactactgattcaggcggccatcgtgagaatcatgaagatgaggaaggttctgaaacaccagcagttacttggcgaggtcctcactcagctgtcctccaggttcaaacctcgagtccctgtgatcaagaaatgcattgacattctaattgagaaagaatatttggagcgagtggatggtgaaaaggacacctacagttacttggcttaacccttctggaagggtctgactgtgtgacccgcagcaaatagttcatgttggaaagaatgaaaacaactcaagttcatagcagccagcctgccgccattggacctcccttttaaaaactgagaccaagactcccatcagctggtctcggatttacatcggaactgctcaggattgatacatttcaagtctgtaaatacggacaccaacgccatttaccctaatttaagaacagcggggactgaccctccgtgccgagggctgcatgctaccgcactaagtcaatacatgggctccccgattcgcagctgtcgtcttggcagcacttgtcacgttggcagcactttgagagcaagtctgagtggacccacatgtaacctgctatgaaaaccatttgtatagtgtgtttcattttttaatgtgtgaaaataaagaaaattaaaggatttctgtacaagtcgcattgggttttgttttaagttttactaatttctatatgtaaataaaagatataatgattgtgcaaatttata

SEQ ID NO: 5435 - protein, 607 aa, Homo sapiens; identical to SEQ ID NO: 5433

SEQ ID NO: 5436 - DNA, 1767 bp, Homo sapiens
aggaggcgggcgccgtgtcgcacgcagctccaggcggggcagccccggtagctgagggacgcagctagaccttggcgggacggggctttcgccggggcccaggcccagggaccaggcggaggcgtcgcgggagcctttggggcaccacagagatgcgggtttgcctgcaatgagatttcattctctacatttaaaggacatcctttctgagctgctgtgaataaatttggaatggtactgtatattttcatctaatggagaactagctgtactttgaataaggattgctgcactggacgactttagaacatccctcacaatgtcgtcaacccggagccagaacccccacggcctgaagcagattggcctggaccagatctgggacgacctcagagccggcatccagcaggtgtacacacggcagagcatggccaagtccagatatatggagctctacacgtatcctcctgcctagcgcaggttgattgcttagagttttgattatttactagtatgacttatgaattattagaattttatattgttttctcctcccagttcatcatgtaaaataatcgcagggttcatttttagccttaagtttttgaacagagtagaactggttcatttttagtcaaatgcagcactgggcagtacagtcaccactgggcacatgtggctgtttacatttgaaatattttaaagttccttaggcacactagctgtgtgattaataaataaaacatttctgtcatgtagaaggttccgttgggcaaagctggtctaaagcaaggtcctgaggttctcagcagatcatttgttttacgtccatttgtttatatattgtctatgactgccttgtgttatgggaacagagttaagtagttgtgtcagaaacagttttgtccatgaagcctaaaatatttactacctgcccttttacaggaaaagtttgtttacctgatcaaaagggataggacatcgagcaaaagttttcctgttatggccctatttttttgtgtttttgagacaaggtctcgctctgtcacccaggctggagtgcagtggtatgatcacagctcaccgcagcctcaactacctgcactcaagcaatcctcccatctcagcctcccaagtagctgggaccacagacacgtgccaccacacctggccaattttttttttattgtttatagagacagagtcttgctatgttgcccgggctgtggccctattttttaaagtacagtatttaaaaagaattttattcctttagtttttggtccacgatgtgcatgggggactgtgctgtgtgccacaaaggtgatgagggtggaaaagatgcggctcccactattcgtgtggttggagatgcaccagctaatttggaggctttcttgattccatacaaatatgacattgaaattagagttaagctcactcaggagagaggagattgccactgtttctaggactttaaagttgctgattcaacggagcttcaggtttaaagtcttcaggtttgatagactatatcagttctatcaaactagtttttgtgatattccagtatgttcttgcatgttaatattttagaatcctaaaaaaaatttaagtagatataaaactatgtcaatctctgaattagcataaaatgtgtgtttgcatatttatacatgtatatacacttacatatagaatacttttaaaataatagctttattgagatgtaattatgtaccataaaattcaaccttttaaaaagta

SEQ ID NO: 5437 - protein, 79 aa, Homo sapiens
MALFFCVFETRSRSVTQAGVQWYDHSSPQPQLPALKQSSHLSLPSSWDHRHVPPHLANFFFIVYRDRVLLCCPGCGPIF

SEQ ID NO: 5438 - DNA, 1236 bp, Homo sapiens
gcttcttcccggcgctgctttccggccgacgcgtgttcccctgtgagctctgggctcaagcgcaggagcagccgcggagccgggctctctcgctttccggttccctgcccgcggctctcgggttccccgcctgcattgttgcgaacgtgcagggcgctattattgggtaacagtcgcccttttgccccgttctcctgggagagcgggccggggcatgcgcgcagggatgctagcccggcggccgaaccggacagagccccccggcgcccgcctatcgctcgctagtcgggccgggccctgcgctgcggcctcggcgcgcccccggtcccaacgggagcgcgcgccctgaccctgagggtagccgtgcgcccgccaggccgctgggacttggggtccccagactcgggggtcgtcgcttttttttcccttaagatctgaaagacccccgtttctgccacccgtgcagtattgtgtagcgcagacataagataagaaagagaggaatgcttgtagacattccttgaaatgaatccccaaagttagggttttctccctggctggctttgccaaaaagaggattctcttttccgattgggtcactcttggttgcttctggttcgtagtaggggttagtggtttgcctgcaatgagatttcattctctacatttaaaggacatcctttctgagctgctgtgaataaatttggaatggtactgtatattttcatctaatggagaactagctgtactttgaataaggattgctgcactggacgactttagaacatccctcacaatgtcgtcaacccggagccagaacccccacggcctgaagcagattggcctggaccagatctgggacgacctcagagccggcatccagcaggtgtacacacggcagagcatggccaagtccagatatatggagctctacacgtatcctcctgcctagcgcaggttgattgcttagagttttgattatttactagtatgacttatgaattattagaattttatattgttttctcctcccagttcatcatgtaaaataatcgcagggttcatttttagccttaagtttttgaacagagtagaactggttcatttttagtcaaatgcagcactgggcagtacagtcaccactgggcacatgtggctgtttacatttgaaatattttaaagttccttaggcacactagctgtgtgattaataaataaaacatttctgtcatgtag

SEQ ID NO: 5439 - protein, 51 aa, Homo sapiens; identical to SEQ ID NO: 5425

SEQ ID NO: 5440 - DNA, 465 bp, Homo sapiens
ggtttgcctgcaatgagatttcattctctacatttaaaggacatcctttctgagctgctgtgaataaatttggaatggtactgtatattttcatctaatggagaactagctgtactttgaataaggattgctgcactggacgactttagaacatccctcacaatgtcgtcaacccggagccagaacccccacggcctgaagcagattggcctggaccagatctgggacgacctcagagccggcatccagcaggtgtacacacggcagagcatggccaagtccagatatatggagctctacacgtatcctcctgcctagcgcagaggaaaggccatgtgaggacacagtgagaaggtggccgtctgcaaccctggaagagagccctcaccagaaaccaaccctgacagtaccttgagctcggacctctagtctccagaactgtgagaaaataaattcctgttgttt

SEQ ID NO: 5441 - protein, 51 aa, Homo sapiens; identical to SEQ ID NO: 5425

SEQ ID NO: 5442 - DNA, 355 bp, Homo sapiens
tgatcaaaagggataggacatcgagcaaaagttttcctgttatggccctaattttttaaagtacagtatttaaaaagaattttattcctttagtttttggtccacgatgtgcatgggggactgtgctgtgtgccacaaaggtgatgagggtggaaaagatgcggctcccactattcgtgtggtctgtttctaggactttaaagttgctgattcaacggagcttcaggtttaaagtcttcaggtttgatagactatatcagttctatcaaactagtttttgtgatattccagtatgttcttgctaaaatgtgtgtttgcatatttatacatgtatatacacttacatatagaatac

SEQ ID NO: 5443 - protein, 53 aa, Homo sapiens
MRVEKMRLPLFVWSVSRTLKLLIQRSFRFKVFRFDRLYQFYQTSFCDIPVCSC

SEQ ID NO: 5444 - DNA, 584 bp, Homo sapiens
tgatcaaaagggataggacatcgagcaaaagttttcctgttatggccctaattttttaaagtacagtatttaaaaagaattttattcctttagtttttggtccacgatgtgcatgggggactgtgctgtgtgccacaaaggtgatgagggtggaaaagatgcggctcccactattcgtgtggttggagatgcaccagctaatttggaggctttcttgattccatacaaatatgacattgaaattagagttaagctcactcaggagagaggagattgccactgtttctaggactttaaagttgctgattcaacggagcttcaggtttaaagtcttcaggtttgatagactatatcagttctatcaaactagtttttgtgatattccagtatgttcttgcatgttaatattttagaatcctaaaaaaaatttaagtagatataaaactatgtcaatctctgaattagcataaaatgtgtgtttgcatatttatacatgtatatacacttacatatagaatacttttaaaataatagctttattgagatgtaattatgtaccataaaattcaaccttttaaaaagta

SEQ ID NO: 5445 - protein, 60 aa, Homo sapiens [sequence omitted]

SEQ ID NO: 5446 - DNA, 2799 bp, Homo sapiens
agtttctctctaaatttttgaacagtctgatttctgatgatgatttccatgtaatcacttcagggcttatatttgtgtgactcttggcttcaagtagtttttaatctaaagtaccacatcttagtatctgcacagaagatgcattcatttcttagagtggcagagacattacctcaaaaagataaaataccattctctgagggatcaaaatgatgtaaagacatgttaactgttaataacgatgatgttgttagggcacttaaaaaggaagtttgaaatggaaatacgtattacagagaaaatggcagacatcagtggctgtttaaatatggttgttgtttaccgtaaaatcaaagaactttttcctttttctttctgttttttgagaaacggagtcttgctctgttgcccaggctgaaatgcagtggcacaatcatagcttactatgtcctttaactcctaggctcaagccatcctcccgcctcagcctcctgagtagctaggaaggactacaggcgcgtgccacacctggctaattttttttttagagacagggtcgcactgtgttgcccaggctggtctcaaaatcctggcctcgagcaatcctcctgcttcagccacccaaagtggctgagccatcatgcccagccctcccttattttcttaatcgcattttattagagctggcatgtgaatttaatttgccatttttcagtttcctttaatttacatattaaagaattgtaacagttctttaccaatgaatcaaaaccattcacttgaattaattttctccaggcagaggctcgtctgcttgaggaacaacgaagagttcaggtttaccttcatgaaagcacacaagatgaattagcaaggaaatgtgaacaagtcctcattgaaaaacacttggaaattttccacacagaatttcagaatttattggatgctgacaaaaatgaagatttgggacgcatgtataatcttgtatctagaatccaggatggcctaggagaattgaaaaaactgttggagacacacattcataatcagggtcttgcagccattgaaaagtgtggagaagctgctttaaatgaccccaaaatgtatgtacagacagtgcttgatgttcataaaaaatacaatgccctggtaatgtctgcattcaacaatgacgctggctttgtggctgctcttgataaggcttgtggtcgcttcataaacaacaacgcggttaccaagatggcccaatcatccagtaaatcccctgagttgctggctcgatactgtgactccttgttgaagaaaagttccaagaacccagaggaggcagaactagaagacacactcaatcaagtgatggttgtcttcaagtacatagaagacaaagacgtatttcagaagttctatgcgaagatgctcgccaagaggctcgtccaccagaacagtgcaagtgacgatgccgaagccagcatgatctccaagttaaagcaagcttgcgggttcgagtacacctctaaacttcagcgcatgtttcaagacattggcgtgagcaaagatctgaacgagcaattcaaaaagcacttgacaaactcagaacccctagacttggatttcagcattcaagtgctgagctccgggtcctggcccttccagcagtcttgtacatttgccttgccgtcagagttggaacgtagttatcagcgattcacagctttctacgccagccgccacagtggccgaaaattgacgtggttatatcagttgtctaaaggagaattggtaactaactgcttcaaaaacagatatactttgcaggcgtcgacattccagatggctatcctgcttcagtacaacacggaagatgcctacactgtgcagcagctgaccgacagcactcaaattaaaatggacattttggcgcaagttttacagattttattaaagtcgaagctattggtcttggaagatgaaaatgcaaatgttgatgaggtggaattgaagccagataccttaataaaattatatcttggttataaaaataagaaattaagggttaacatcaatgtgccaatgaaaaccgaacagaagcaggaacaagaaaccacacacaaaaacatcgaggaagaccgcaaactactgattcaggcggccatcgtgagaatcatgaagatgaggaaggttctgaaacaccagcagttacttggcgaggtcctcactcagctgtcctccaggttcaaacctcgagtccctgtgatcaagaaatgcattgacattctaattgagaaagaatatttggagcgagtggatggtgaaaaggacacctacagttacttggcttaacccttctggaagggtctgactgtgtgacccgcagcaaatagttcatgttggaaagaatgaaaacaactcaagttcatagcagccagcctgccgccattggacctcccttttaaaaactgagaccaagactcccatcagctggtctcggatttacatcggaactgctcaggattgatacatttcaagtctgtaaatacggacaccaacgccatttaccctaatttaagaacagcggggactgaccctccgtgccgagggctgcatgctaccgcactaagtcaatacatgggctccccgattcgcagctgtcgtcttggcagcacttgtcacgttggcagcactttgagagcaagtctgagtggacccacatgtaacctgctatgaaaaccatttgtatagtgtgtttcattttttaatgtgtgaaaataaagaaaattaaaggatttctgtacaagtcgc

SEQ ID NO: 5447 - protein, 455 aa, Homo sapiens
MYNLVSRIQDGLGELKKLLETHIHNQGLAAIEKCGEAALNDPKMYVQTVLDVHKKYNALVMSAFNNDAGFVAALDKACGRFINNNAVTKMAQSSSKSPELLARYCDSLLKKSSKNPEEAELEDTLNQVMVVFKYIEDKDVFQKFYAKMLAKRLVHQNSASDDAEASMISKLKQACGFEYTSKLQRMFQDIGVSKDLNEQFKKHLTNSEPLDLDFSIQVLSSGSWPFQQSCTFALPSELERSYQRFTAFYASRHSGRKLTWLYQLSKGELVTNCFKNRYTLQASTFQMAILLQYNTEDAYTVQQLTDSTQIKMDILAQVLQILLKSKLLVLEDENANVDEVELKPDTLIKLYLGYKNKKLRVNINVPMKTEQKQEQETTHKNIEEDRKLLIQAAIVRIMKMRKVLKHQQLLGEVLTQLSSRFKPRVPVIKKCIDILIEKEYLERVDGEKDTYSYLA

SEQ ID NO: 5448 - DNA, 2870 bp, Homo sapiens
agtttctctctaaatttttgaacagtctgatttctgatgatgatttccatgtaatcacttcagggcttatatttgtgtgactcttggcttcaagtagtttttaatctaaagtaccacatcttagtatctgcacagaagatgcattcatttcttagagtggcagagacattacctcaaaaagataaaataccattctctgagggatcaaaatgatgtaaagacatgttaactgttaataacgatgatgttgttagggcacttaaaaaggaagtttgaaatggaaatacgtattacagagaaaatggcagacatcagtggctgtttaaatatggttgttgtttaccgtaaaatcaaagaactttttcctttttctttctgttttttgagaaacggagtcttgctctgttgcccaggctgaaatgcagtggcacaatcatagcttactatgtcctttaactcctaggctcaagccatcctcccgcctcagcctcctgagtagctaggaaggactacaggcgcgtgccacacctggctaattttttttttagagacagggtcgcactgtgttgcccaggctggtctcaaaatcctggcctcgagcaatcctcctgcttcagccacccaaagtggctgagccatcatgcccagccctcccttattttcttaatcgcattttattagagctggcatgtgaatttaatttgccatttttcagtttcctttaatttacatattaaagaattgtaacagttctttaccaatgaatcaaaaccattcacttgaattaattttctccaggcagaggctcgtctgcttgaggaacaacgaagagttcaggtttaccttcatgaaagcacacaagatgaattagcaaggaaatgtgaacaagtcctcattgaaaaacacttggaaattttccacacagaatttcagaatttattggatgctgacaaaaatgaagatttgggacgcatgtataatcttgtatctagaatccaggatggcctaggagaattgaaaaaactgttggagacacacattcataatcagggtcttgcagccattgaaaagtgtggagaagctgctttaaatgaccccaaaatgtatgtacagacagtgcttgatgttcataaaaaatacaatgccctggtaatgtctgcattcaacaatgacgctggctttgtggctgctcttgataaggcttgtggtcgcttcataaacaacaacgcggttaccaagatggcccaatcatccagtaaatcccctgagttgctggctcgatactgtgactccttgttgaagaaaagttccaagaacccagaggaggcagaactagaagacacactcaatcaagtgatggttgtcttcaagtacatagaagacaaagacgtatttcagaagttctatgcgaagatgctcgccaagaggctcgtccaccagaacagtgcaagtgacgatgccgaagccagcatgatctccaagttaaagcaagcttgcgggttcgagtacacctctaaacttcagcgcatgtttcaagacattggcgtgagcaaagatctgaacgagcaattcaaaaagcacttgacaaactcagaacccctagacttggatttcagcattcaagtgctgagctccgggtcctggcccttccagcagtcttgtacatttgccttgccgtcagagttggaacgtagttatcagcgattcacagctttctacgccagccgccacagtggccgaaaattgacgtggttatatcagttgtctaaaggagaattggtaactaactgcttcaaaaacagatatactttgcaggcgtcgacattccagatggctatcctgcttcagtacaacacggaagatgcctacactgtgcagcagctgaccgacagcactcaaattaaaatggacattttggcgcaagttttacagattttattaaagtcgaagctattggtcttggaagatgaaaatgcaaatgttgatgaggtggaattgaagccagataccttaataaaattatatcttggttataaaaataagaaattaagggttaacatcaatgtgccaatgaaaaccgaacagaagcaggaacaagaaaccacacacaaaaacatcgaggaagaccgcaaactactgattcaggcggccatcgtgagaatcatgaagatgaggaaggttctgaaacaccagcagttacttggcgaggtcctcactcagctgtcctccaggttcaaacctcgagtccctgtgatcaagaaatgcattgacattctaattgagaaagaatatttggagcgagtggatggtgaaaaggacacctacagttacttggcttaacccttctggaagggtctgactgtgtgacccgcagcaaatagttcatgttggaaagaatgaaaacaactcaagttcatagcagccagcctgccgccattggacctcccttttaaaaactgagaccaagactcccatcagctggtctcggatttacatcggaactgctcaggattgatacatttcaagtctgtaaatacggacaccaacgccatttaccctaatttaagaacagcggggactgaccctccgtgccgagggctgcatgctaccgcactaagtcaatacatgggctccccgattcgcagctgtcgtcttggcagcacttgtcacgttggcagcactttgagagcaagtctgagtggacccacatgtaacctgctatgaaaaccatttgtatagtgtgtttcattttttaatgtgtgaaaataaagaaaattaaaggatttctgtacaagtcgcattgggttttgttttaagttttactaatttctatatgtaaataaaagatataatgattgtgcaaatttata

SEQ ID NO: 5449 - protein, 455 aa, Homo sapiens; identical to SEQ ID NO: 5447

SEQ ID NO: 5450 - DNA, 2518 bp, Homo sapiens
gtgcttggctgggggtgacccggagctccctcccaccaaccttcccagccgggctccctcgcagcccggagccaagcctgtgcctgccaccatttcctggcagtgtgcttagctgtgacagtttctacgtctgtagaatggggatgaaaacagcacctgctgcccagtgtgggctttcgcggtctcatgaagggtggtggcggcgtgcgctgcatgcctagcagcagcgctgtttttctcattagcacttagctccgtctcctttgccttccattgtcgccgccttcctttggccacaggagcctctgcggccagccttcccgttgcatttccatgttgttccttgttccggggaggcccctttgctgccctgcgccgcgctccgcccctcttcccgtcctgcgatgaggccctggcccccggcatcgccacgcggatccgcgcctctggtttgcagtgggtgggggccgcagtcagactcccgccctgagccccgctttccctcgcgttgcctgcccagccgggctgatgaccgacctcggcggctaaacgccttctccagctgaaacagagtccagagttccactgtttaacaaggaggaattggcaaagcagaactgtcacttggaaaatgctgttttcatgatctctttgagttttcactgtttttaatgcaagctcggaatcaatatttagttttgagtgtggagaatagattgttttttcttttatatatataaacaaaatgtcctatgtgtttcaacgatggtaccaaaagtatttcttgctcttatctcttaactttgaaaaggaccccaaaatgtatgtacagacagtgcttgatgttcataaaaaatacaatgccctggtaatgtctgcattcaacaatgacgctggctttgtggctgctcttgataaggcttgtggtcgcttcataaacaacaacgcggttaccaagatggcccaatcatccagtaaatcccctgagttgctggctcgatactgtgactccttgttgaagaaaagttccaagaacccagaggaggcagaactagaagacacactcaatcaagtgatggttgtcttcaagtacatagaagacaaagacgtatttcagaagttctatgcgaagatgctcgccaagaggctcgtccaccagaacagtgcaagtgacgatgccgaagccagcatgatctccaagttaaagcaagcttgcgggttcgagtacacctctaaacttcagcgcatgtttcaagacattggcgtgagcaaagatctgaacgagcaattcaaaaagcacttgacaaactcagaacccctagacttggatttcagcattcaagtgctgagctccgggtcctggcccttccagcagtcttgtacatttgccttgccgtcagagttggaacgtagttatcagcgattcacagctttctacgccagccgccacagtggccgaaaattgacgtggttatatcagttgtctaaaggagaattggtaactaactgcttcaaaaacagatatactttgcaggcgtcgacattccagatggctatcctgcttcagtacaacacggaagatgcctacactgtgcagcagctgaccgacagcactcaaattaaaatggacattttggcgcaagttttacagattttattaaagtcgaagctattggtcttggaagatgaaaatgcaaatgttgatgaggtggaattgaagccagataccttaataaaattatatcttggttataaaaataagaaattaagggttaacatcaatgtgccaatgaaaaccgaacagaagcaggaacaagaaaccacacacaaaaacatcgaggaagaccgcaaactactgattcaggcggccatcgtgagaatcatgaagatgaggaaggttctgaaacaccagcagttacttggcgaggtcctcactcagctgtcctccaggttcaaacctcgagtccctgtgatcaagaaatgcattgacattctaattgagaaagaatatttggagcgagtggatggtgaaaaggacacctacagttacttggcttaacccttctggaagggtctgactgtgtgacccgcagcaaatagttcatgttggaaagaatgaaaacaactcaagttcatagcagccagcctgccgccattggacctcccttttaaaaactgagaccaagactcccatcagctggtctcggatttacatcggaactgctcaggattgatacatttcaagtctgtaaatacggacaccaacgccatttaccctaatttaagaacagcggggactgaccctccgtgccgagggctgcatgctaccgcactaagtcaatacatgggctccccgattcgcagctgtcgtcttggcagcacttgtcacgttggcagcactttgagagcaagtctgagtggacccacatgtaacctgctatgaaaaccatttgtatagtgtgtttcattttttaatgtgtgaaaataaagaaaattaaaggatttctgtacaagtcgc

SEQ ID NO: 5451 - protein, 437 aa, Homo sapiens
MSYVFQRWYQKYFLLLSLNFEKDPKMYVQTVLDVHKKYNALVMSAFNNDAGFVAALDKACGRFINNNAVTKMAQSSSKSPELLARYCDSLLKKSSKNPEEAELEDTLNQVMVVFKYIEDKDVFQKFYAKMLAKRLVHQNSASDDAEASMISKLKQACGFEYTSKLQRMFQDIGVSKDLNEQFKKHLTNSEPLDLDFSIQVLSSGSWPFQQSCTFALPSELERSYQRFTAFYASRHSGRKLTWLYQLSKGELVTNCFKNRYTLQASTFQMAILLQYNTEDAYTVQQLTDSTQIKMDILAQVLQILLKSKLLVLEDENANVDEVELKPDTLIKLYLGYKNKKLRVNINVPMKTEQKQEQETTHKNIEEDRKLLIQAAIVRIMKMRKVLKHQQLLGEVLTQLSSRFKPRVPVIKKCIDILIEKEYLERVDGEKDTYSYLA

SEQ ID NO: 5452 - DNA, 945 bp, Homo sapiens
gattgatgcttaacatgtccatatataccaggtgtgtgtatatgtgattgtctctataaatgcgtggggacgtatctatagtatgtatccacatagacaatacgttttttaaaaaaaaccctcaaattattttaatgtttgtaaacatggaaaatgaatgactttgggaaaatgttgcattgtagtggcattgccacgttttatattcccttttaaatagatctgtgctttttttgtacttgtttaaagaatttgtttcataaataagttcttcaaacttgggctgtatattttgggaggtgtttccatgcatgtaaattttccttctttttcttttatatggggggccgcaaaggcgtcgacattccagatggctatcctgcttcagtacaacacggaagatgcctacactgtgcagcagctgaccgacagcactcaaattaaaatggacattttggcgcaagttttacagattttattaaagtcgaagctattggtcttggaagatgaaaatgcaaatgttgatgaggtggaattgaagccagataccttaataaaattatatcttggttataaaaataagaaattaagggttaacatcaatgtgccaatgaaaaccgaacagaagcaggaacaagaaaccacacacaaaaacatcgaggaagaccgcaaactactgattcaggtgacttatctgtatgcctgtgccaggtgtgctgtccctcacgcagggatggctcgcaaggacgggccgtggggggtaggcgggggtgacaaaggagtgattgccagatgaatgggtctgtgatggcagaaggtggcaaggccgagagccagggccttgttatctgaattagtcctttatgtcaccaggcaaaacagggcagtcctcttgctctaaatgttggaaagcaaacattgtggcaggtttggctgaaatgaggg

SEQ ID NO: 5453 - protein, 162 aa, Homo sapiens
MHVNFPSFSFIWGAAKASTFQMAILLQYNTEDAYTVQQLTDSTQIKMDILAQVLQILLKSKLLVLEDENANVDEVELKPDTLIKLYLGYKNKKLRVNINVPMKTEQKQEQETTHKNIEEDRKLLIQVTYLYACARCAVPHAGMARKDGPWGVGGGDKGVIAR

SEQ ID NO: 5454 - DNA, 2625 bp, Homo sapiens
ggcgcaagttttacagattttattaaagtcgaagctattggtaggtttgcgcccttttatcttacactagaagaagccttttcctgagattgtagagtaacaattgttttcttacaggtcttggaagatgaaaatgcaaatgttgatgaggtggaattgaagccagataccttaataaaattatatcttggttataaaaagtaagaaaaatctaataagtagatggcccttgaccatagacacgtcccccgggagccctagcacggatctcagtattgttacaaaccaagggagaccggggactcagtgtgaagcgacaggcactaggctgggagtgtgaggtaggcctttgattccattcagcgagcctgatgtttctccaattctgagcttctgggatttttattattttggcaaataagtctccttaaatggctcaccaagaaagtttggacctttgtgtccaagtggcttgattttatctcacttgacaaaatttgggagagcagattagggacctggattttctgtaatgtggatgtccctgttaatggccgagtaggaaactaggccatgatcggactctacccagtgctgggtagaggacattttcacggagagctcacagaaatcaacattctcccctctgtctagggaagcagggcacttcttaaaggttgaaaaatagaaagcagccttcactgcctaccttttaatataatagtgatcggtttcctcatttttcttgatagtaagaaattaagggttaacatcaatgtgccaatgaaaaccgaacagaagcaggaacaagaaaccacacacaaaaacatcgaggaagaccgcaaactactgattcaggcggccatcgtgagaatcatgaagatgaggaaggttctgaaacaccagcagttacttggcgaggtcctcactcagctgtcctccaggttcaaacctcgagtccctgtgatcaaggtacaggactttacatagcagtcacattcctttcttaatttagaagataaaagatgtagcaaaaagtggattgattgctgtagcatgaaggaggagggagctggcttctttgtatgtagatttctataaaagaaagtcggcttcagtttaactgttgaaacacacatacaaagtgcacagatgatgaagtgccagcttgatgactttcacagtcaatacactgtgtgatcagcacccaggtaagaattgaaacatgcccggcatcccggaagcccacccaccccagccagcacctgtgtcccatagaaaatcactgtcgtgtcttctgacaccataaaacagttttgcctgcttttgcgtgatacataaacagattctagagcacacactcccgtgcctggtaagaatttcctcagcagtatcttcgggaggttcgtcgcattgcggtatcgagaagcactgggtcgtttttgttgcttttatgggtgttgtgttatgggaacacaccttcctttatgtagcctactgataattgacattttgcttatttctgattgggtttgtttaaaatggtaactaagcaggactttccttttcctaaaccacttgggtaagtcacagccagtggagagactcaggggtggcattgacaggtgacttccccaacaggcaggaggcccagtgtccctcctgggttacatttggcacaggtgccagttcgttcatggctgttcagggagttccccacagtcccctgttccctgttcatggcctcttcttgtgagactgagtcctgccgcagaggcaggcagattttggtggtagaaagggagactggcccacggggctcccgaagcacctgactccagttcctagggcgggtgcaggagggactcggagtcaccctcagcaagtgtcagggagctccgtgcatgaaggcttagctgccaggaagtaaaactctatgctaacagatctggggcggggacactgctccccactgagctccgaatcaggggagatttgtggtgggggcagcctctctctgttctgatgataatttgtgtttttcttctctttcactacctcttcctttttaaaaataacacccagaaatgcattgacattctaattgagaaagaatatttggagcgagtggatggtgaaaaggacacctacagttacttggcttaacccttctggaagggtctgactgtgtgacccgcagcaaatagttcatgttggaaagaatgaaaacaactcaagttcatagcagccagcctgccgccattggacctcccttttaaaaactgagaccaagactcccatcagctggtctcggatttacatcggaactgctcaggattgatacatttcaagtctgtaaatacggacaccaacgccatttaccctaatttaagaacagcggggactgaccctccgtgccgagggctgcatgctaccgcactaagtcaatacatgggctccccgattcgcagctgtcgtcttggcagcacttgtcacgttggcagcactttgagagcaagtctgagtggacccacatgtaacctgctatgaaaaccatttgtatagtgtgtttcattttttaatgtgtgaaaataaagaaaattaaaggatttctgtacaagtcgc

SEQ ID NO: 5455 - protein, 68 aa, Homo sapiens
MKTEQKQEQETTHKNIEEDRKLLIQAAIVRIMKMRKVLKHQQLLGEVLTQLSSRFKPRVPVIKVQDFT

SEQ ID NO: 5456 - DNA, 2696 bp, Homo sapiens
ggcgcaagttttacagattttattaaagtcgaagctattggtaggtttgcgcccttttatcttacactagaagaagccttttcctgagattgtagagtaacaattgttttcttacaggtcttggaagatgaaaatgcaaatgttgatgaggtggaattgaagccagataccttaataaaattatatcttggttataaaaagtaagaaaaatctaataagtagatggcccttgaccatagacacgtcccccgggagccctagcacggatctcagtattgttacaaaccaagggagaccggggactcagtgtgaagcgacaggcactaggctgggagtgtgaggtaggcctttgattccattcagcgagcctgatgtttctccaattctgagcttctgggatttttattattttggcaaataagtctccttaaatggctcaccaagaaagtttggacctttgtgtccaagtggcttgattttatctcacttgacaaaatttgggagagcagattagggacctggattttctgtaatgtggatgtccctgttaatggccgagtaggaaactaggccatgatcggactctacccagtgctgggtagaggacattttcacggagagctcacagaaatcaacattctcccctctgtctagggaagcagggcacttcttaaaggttgaaaaatagaaagcagccttcactgcctaccttttaatataatagtgatcggtttcctcatttttcttgatagtaagaaattaagggttaacatcaatgtgccaatgaaaaccgaacagaagcaggaacaagaaaccacacacaaaaacatcgaggaagaccgcaaactactgattcaggcggccatcgtgagaatcatgaagatgaggaaggttctgaaacaccagcagttacttggcgaggtcctcactcagctgtcctccaggttcaaacctcgagtccctgtgatcaaggtacaggactttacatagcagtcacattcctttcttaatttagaagataaaagatgtagcaaaaagtggattgattgctgtagcatgaaggaggagggagctggcttctttgtatgtagatttctataaaagaaagtcggcttcagtttaactgttgaaacacacatacaaagtgcacagatgatgaagtgccagcttgatgactttcacagtcaatacactgtgtgatcagcacccaggtaagaattgaaacatgcccggcatcccggaagcccacccaccccagccagcacctgtgtcccatagaaaatcactgtcgtgtcttctgacaccataaaacagttttgcctgcttttgcgtgatacataaacagattctagagcacacactcccgtgcctggtaagaatttcctcagcagtatcttcgggaggttcgtcgcattgcggtatcgagaagcactgggtcgtttttgttgcttttatgggtgttgtgttatgggaacacaccttcctttatgtagcctactgataattgacattttgcttatttctgattgggtttgtttaaaatggtaactaagcaggactttccttttcctaaaccacttgggtaagtcacagccagtggagagactcaggggtggcattgacaggtgacttccccaacaggcaggaggcccagtgtccctcctgggttacatttggcacaggtgccagttcgttcatggctgttcagggagttccccacagtcccctgttccctgttcatggcctcttcttgtgagactgagtcctgccgcagaggcaggcagattttggtggtagaaagggagactggcccacggggctcccgaagcacctgactccagttcctagggcgggtgcaggagggactcggagtcaccctcagcaagtgtcagggagctccgtgcatgaaggcttagctgccaggaagtaaaactctatgctaacagatctggggcggggacactgctccccactgagctccgaatcaggggagatttgtggtgggggcagcctctctctgttctgatgataatttgtgtttttcttctctttcactacctcttcctttttaaaaataacacccagaaatgcattgacattctaattgagaaagaatatttggagcgagtggatggtgaaaaggacacctacagttacttggcttaacccttctggaagggtctgactgtgtgacccgcagcaaatagttcatgttggaaagaatgaaaacaactcaagttcatagcagccagcctgccgccattggacctcccttttaaaaactgagaccaagactcccatcagctggtctcggatttacatcggaactgctcaggattgatacatttcaagtctgtaaatacggacaccaacgccatttaccctaatttaagaacagcggggactgaccctccgtgccgagggctgcatgctaccgcactaagtcaatacatgggctccccgattcgcagctgtcgtcttggcagcacttgtcacgttggcagcactttgagagcaagtctgagtggacccacatgtaacctgctatgaaaaccatttgtatagtgtgtttcattttttaatgtgtgaaaataaagaaaattaaaggatttctgtacaagtcgcattgggttttgttttaagttttactaatttctatatgtaaataaaagatataatgattgtgcaaatttata

SEQ ID NO: 5457 - protein, 68 aa, Homo sapiens; identical to SEQ ID NO: 5455

SEQ ID NO: 5458 - DNA, 1149 bp, Homo sapiens
acatacaaagtgcacagatgatgaagtgccagcttgatgactttcacagtcaatacactgtgtgatcagcacccaggtaagaattgaaacatgcccggcatcccggaagcccacccaccccagccagcacctgtgtcccatagaaaatcactgtcgtgtcttctgacaccataaaacagttttgcctgcttttgcgtgatacataaacagattctagagcacacactcccgtgcctggtaagaatttcctcagcagtatcttcgggaggttcgtcgcattgcggtatcgagaagcactgggtcgtttttgttgcttttatgggtgttgtgttatgggaacacaccttcctttatgtagcctactgataattgacattttgcttatttctgattgggtttgtttaaaatggtaactaagcaggactttccttttcctaaaccacttgggtaagtcacagccagtggagagactcaggggtggcattgacaggtgacttccccaacaggcaggaggcccagtgtccctcctgggttacatttggcacaggtgccagttcgttcatggctgttcagggagttccccacagtcccctgttccctgttcatggcctcttcttgtgagactgagtcctgccgcagaggcaggcagattttggtggtagaaagggagactggcccacggggctcccgaagcacctgactccagttcctagggcgggtgcaggagggactcggagtcaccctcagcaagtgtcagggagctccgtgcatgaaggcttagctgccaggaagtaaaactctatgctaacagatctggggcggggacactgctccccactgagctccgaatcaggggagatttgtggtgggggcagcctctctctgttctgatgataatttgtgtttttcttctctttcactacctcttcctttttaaaaataacacccagaaatgcattgacattctaattgagaaagaatatttggagcgagtggatggtgaaaaggacacctacagttacttggcttaacccttctggaagggtctgactgtgtgacccgcagcaaatagttcatgttggaaagaatgaaaacatttgtatagtgtgtttcattttttaatgtgtgaaaataaagaaaattaaagga

SEQ ID NO: 5459 - protein, 46 aa, Homo sapiens [sequence omitted]

SEQ ID NO: 5460 - DNA, 3021 bp, Homo sapiens
acctatcctccccgcctcccgtccgcggcgggctccgggcccccgcgatgtctcccggtccccgcgtgcctgcacaccgccttcctgagaggcgccgtgtgttcagcgaaagaacaaagagacggcggcggcgcttccacacggccagtggcgtcccttacagcgaaccccgccgccgcccgcgcgcgcacgcgctgccagtgcccgcccgcccacgagccctgagcgcactctgcgtggggctggctcggcgcctccgagcccggcgggccctgtgattggacgggcgcccgcctcgcgtcccgccaatcggggcggcgcttgattgggctgggggggccaaataaaagcgatggcgattgggctgccgcgtttggcgctcggtccggtcgcgtccgacacccggtgggactcagaaggcagtggagccccggcggcggcggcggcggcgcgcgggggcgacgcgcgggaacaacgcgagtcggcgcgcgggacgaagaataatcatgggccagactgggaagaaatctgagaagggaccagtttgttggcggaagcgtgtaaaatcagagtacatgcgactgagacagctcaagaggttcagacgagctgatgaagtaaagagtatgtttagttccaatcgtcagaaaattttggaaagaacggaaatcttaaaccaagaatggaaacagcgaaggatacagcctgtgcacatcctgacttctgtgagctcattgcgcgggactagggagtgttcggtgaccagtgacttggattttccaacacaagtcatcccattaaagactctgaatgcagttgcttcagtacccataatgtattcttggtctcccctacagcagaattttatggtggaagatgaaactgttttacataacattccttatatgggagatgaagttttagatcaggatggtactttcattgaagaactaataaaaaattatgatgggaaagtacacggggatagagaatgtgggtttataaatgatgaaatttttgtggagttggtgaatgcccttggtcaatataatgatgatgacgatgatgatgatggagacgatcctgaagaaagagaagaaaagcagaaagatctggaggatcaccgagatgataaagaaagccgcccacctcggaaatttccttctgataaaatttttgaagccatttcctcaatgtttccagataagggcacagcagaagaactaaaggaaaaatataaagaactcaccgaacagcagctcccaggcgcacttcctcctgaatgtacccccaacatagatggaccaaatgctaaatctgttcagagagagcaaagcttacactcctttcatacgcttttctgtaggcgatgttttaaatatgactgcttcctacatccttttcatgcaacacccaacacttataagcggaagaacacagaaacagctctagacaacaaaccttgtggaccacagtgttaccagcatttggagggagcaaaggagtttgctgctgctctcaccgctgagcggataaagaccccaccaaaacgtccaggaggccgcagaagaggacggcttcccaataacagtagcaggcccagcacccccaccattaatgtgctggaatcaaaggatacagacagtgatagggaagcagggactgaaacggggggagagaacaatgataaagaagaagaagagaagaaagatgaaacttcgagctcctctgaagcaaattctcggtgtcaaacaccaataaagatgaagccaaatattgaacctcctgagaatgtggagtggagtggtgctgaagcctcaatgtttagagtcctcattggcacttactatgacaatttctgtgccattgctaggttaattgggaccaaaacatgtagacaggtgtatgagtttagagtcaaagaatctagcatcatagctccagctcccgctgaggatgtggatactcctccaaggaaaaagaagaggaaacaccggttgtgggctgcacactgcagaaagatacagctgaaaaaggacggctcctctaaccatgtttacaactatcaaccctgtgatcatccacggcagccttgtgacagttcgtgcccttgtgtgatagcacaaaatttttgtgaaaagttttgtcaatgtagttcagagtgtcaaaaccgctttccgggatgccgctgcaaagcacagtgcaacaccaagcagtgcccgtgctacctggctgtccgagagtgtgaccctgacctctgtcttacttgtggagccgctgaccattgggacagtaaaaatgtgtcctgcaagaactgcagtattcagcggggctccaaaaagcatctattgctggcaccatctgacgtggcaggctgggggatttttatcaaagatcctgtgcagaaaaatgaattcatctcagaatactgtggagagattatttctcaagatgaagctgacagaagagggaaagtgtatgataaatacatgtgcagctttctgttcaacttgaacaatgattttgtggtggatgcaacccgcaagggtaacaaaattcgttttgcaaatcattcggtaaatccaaactgctatgcaaaagttatgatggttaacggtgatcacaggataggtatttttgccaagagagccatccagactggcgaagagctgttttttgattacagatacagccaggctgatgccctgaagtatgtcggcatcgaaagagaaatggaaatcccttgacatctgctacctcctcccccctcctctgaaacagctgccttagcttcaggaacctcgagtactgtgggcaatttagaaaaagaacatgcagtttgaaattctgaatttgcaaagtactgtaagaataatttatagtaatgagtttaaaaatcaactttttattgccttctcaccagctgcaaagtgttttgtaccagtgaatttttgcaataatgcagtatggtacatttttcaactttgaataaagaatacttgaacttgtccttgttgaatc

SEQ ID NO: 5461 - protein, 746 aa, Homo sapiens
MGQTGKKSEKGPVCWRKRVKSEYMRLRQLKRFRRADEVKSMFSSNRQKILERTEILNQEWKQRRIQPVHILTSVSSLRGTRECSVTSDLDFPTQVIPLKTLNAVASVPIMYSWSPLQQNFMVEDETVLHNIPYMGDEVLDQDGTFIEELIKNYDGKVHGDRECGFINDEIFVELVNALGQYNDDDDDDDGDDPEEREEKQKDLEDHRDDKESRPPRKFPSDKIFEAISSMFPDKGTAEELKEKYKELTEQQLPGALPPECTPNIDGPNAKSVQREQSLHSFHTLFCRRCFKYDCFLHPFHATPNTYKRKNTETALDNKPCGPQCYQHLEGAKEFAAALTAERIKTPPKRPGGRRRGRLPNNSSRPSTPTINVLESKDTDSDREAGTETGGENNDKEEEEKKDETSSSSEANSRCQTPIKMKPNIEPPENVEWSGAEASMFRVLIGTYYDNFCAIARLIGTKTCRQVYEFRVKESSIIAPAPAEDVDTPPRKKKRKHRLWAAHCRKIQLKKDGSSNHVYNYQPCDHPRQPCDSSCPCVIAQNFCEKFCQCSSECQNRFPGCRCKAQCNTKQCPCYLAVRECDPDLCLTCGAADHWDSKNVSCKNCSIQRGSKKHLLLAPSDVAGWGIFIKDPVQKNEFISEYCGEIISQDEADRRGKVYDKYMCSFLFNLNNDFVVDATRKGNKIRFANHSVNPNCYAKVMMVNGDHRIGIFAKRAIQTGEELFFDYRYSQADALKYVGIEREMEIP

SEQ ID NO: 5462 - DNA, 4031 bp, Homo sapiens
acctatcctccccgcctcccgtccgcggcgggctccgggcccccgcgatgtctcccggtccccgcgtgcctgcacaccgccttcctgagaggcgccgtgtgttcagcgaaagaacaaagagacggcggcggcgcttccacacggccagtggcgtcccttacagcgaaccccgccgccgcccgcgcgcgcacgcgctgccagtgcccgcccgcccacgagccctgagcgcactctgcgtggggctggctcggcgcctccgagcccggcgggccctgtgattggacgggcgcccgcctcgcgtcccgccaatcggggcggcgcttgattgggctgggggggccaaataaaagcgatggcgattgggctgccgcgtttggcgctcggtccggtcgcgtccgacacccggtgggactcagaaggcagtggagccccggcggcggcggcggcggcgcgcgggggcgacgcgcgggaacaacgcgagtcggcgcgcgggacgaagaataatcatgggccagactgggaagaaatctgagaagggaccagtttgttggcggaagcgtgtaaaatcagagtacatgcgactgagacagctcaagaggttcagacgagctgatgaagtaaagagtatgtttagttccaatcgtcagaaaattttggaaagaacggaaatcttaaaccaagaatggaaacagcgaaggatacagcctgtgcacatcctgacttctgtgagctcattgcgcgggactagggagtgttcggtgaccagtgacttggattttccaacacaagtcatcccattaaagactctgaatgcagttgcttcagtacccataatgtattcttggtctcccctacagcagaattttatggtggaagatgaaactgttttacataacattccttatatgggagatgaagttttagatcaggatggtactttcattgaagaactaataaaaaattatgatgggaaagtacacggggatagagaatgtgggtttataaatgatgaaatttttgtggagttggtgaatgcccttggtcaatataatgatgatgacgatgatgatgatggagacgatcctgaagaaagagaagaaaagcagaaagatctggaggatcaccgagatgataaagaaagccgcccacctcggaaatttccttctgataaaatttttgaagccatttcctcaatgtttccagataagggcacagcagaagaactaaaggaaaaatataaagaactcaccgaacagcagctcccaggcgcacttcctcctgaatgtacccccaacatagatggaccaaatgctaaatctgttcagagagagcaaagcttacactcctttcatacgcttttctgtaggcgatgttttaaatatgactgcttcctacatccttttcatgcaacacccaacacttataagcggaagaacacagaaacagctctagacaacaaaccttgtggaccacagtgttaccagcatttgccactcctacctaggaactaaatgggtatatattgcctgttggattttggacagaagattcattgaatggcacctgcagaaggagggagcaaaggagtttgctgctgctctcaccgctgagcggataaagaccccaccaaaacgtccaggaggccgcagaagaggacggcttcccaataacagtagcaggcccagcacccccaccattaatgtgctggaatcaaaggatacagacagtgatagggaagcagggactgaaacggggggagagaacaatgataaagaagaagaagagaagaaagatgaaacttcgagctcctctggtaagacacgtctaataactgggttttactgttctgtgaaagttcgtgttgtgaggattaaggatgtataatgcattgaataattttcttagttggttagtttcagtataaagaccagagttatctcaagaatgtgtagctgtgttgtttctgtttcctgcctgcacccgtaccctagcttgtggtgtttgccctgcttggttgtttgaaagctgatgatgcactttattctcattctttgtgccattttcttttttcgatctttctcaggtagggaataatgaaatttggatcatttggtttaatattcttgacgttctgtgagtagttttgttggaaaatgtgaactacgatgggttagtgttttgccgattggatttgagttgtcctcatcttttcgcttttttcttaagcacaccctgaattgtacttcttaatattatttccaatcatttcttgaccagtgcttacatttggttttgtagaagcaaattctcggtgtcaaacaccaataaagatgaagccaaatattgaacctcctgagaatgtggagtggagtggtgctgaagcctcaatgtttagagtcctcattggcacttactatgacaatttctgtgccattgctaggttaattgggaccaaaacatgtagacaggtaagatatccgataaaaatgttgttaaaagagcttcaaacatagagataaaactgtactcgttgtccaaacaaagaaaattcttggttattactaagctcctattcatctcctaaaaataatttttttttcttcccaagagggaattgaatgaaaattattctccaggtatgttacagaatttccccaatgtagacttttaaggttagatagcagtagcttttaaaagctagtaagaattgaaatttagcatcacagttcttgaccagaatataattacagctacccctaatgtgagggtagggacagcgatgtgtgttatatccccagcatctagcagtgtcacagaagagacaaagacatttttctggtatgcatgagtataagaatggtttgcctaaataagactgtcctcatggctctgtgactgtgcctcttgtcaggtgtatgagtttagagtcaaagaatctagcatcatagctccagctcccgctgaggatgtggatactcctccaaggaaaaagaagaggaaacaccggttgtgggctgcacactgcagaaagatacagctgaaaaaggacggctcctctaaccatgtttacaactatcaaccctgtgatcatccacggcagccttgtgacagttcgtgcccttgtgtgatagcacaaaatttttgtgaaaagttttgtcaatgtagttcagagtgtcaaaaccgctttccgggatgccgctgcaaagcacagtgcaacaccaagcagtgcccgtgctacctggctgtccgagagtgtgaccctgacctctgtcttacttgtggagccgctgaccattgggacagtaaaaatgtgtcctgcaagaactgcagtattcagcggggctccaaaaagcatctattgctggcaccatctgacgtggcaggctgggggatttttatcaaagatcctgtgcagaaaaatgaattcatctcagaatactgtggagagattatttctcaagatgaagctgacagaagagggaaagtgtatgataaatacatgtgcagctttctgttcaacttgaacaatgattttgtggtggatgcaacccgcaagggtaacaaaattcgttttgcaaatcattcggtaaatccaaactgctatgcaaaagttatgatggttaacggtgatcacaggataggtatttttgccaagagagccatccagactggcgaagagctgttttttgattacagatacagccaggctgatgccctgaagtatgtcggcatcgaaagagaaatggaaatcccttgacatctgctacctcctcccccctcctctgaaacagctgccttagcttcaggaacctcgagtactgtgggcaatttagaaaaagaacatgcagtttgaaattctgaatttgcaaagtactgtaagaataatttatagtaatgagtttaaaaatcaactttttattgccttctcaccagctgcaaagtgttttgtaccagtgaatttttgcaataatgcagtatggtacatttttcaactttgaataaagaatacttgaacttgtccttgttgaatc

SEQ ID NO: 5463 - protein, 334 aa, Homo sapiens
MGQTGKKSEKGPVCWRKRVKSEYMRLRQLKRFRRADEVKSMFSSNRQKILERTEILNQEWKQRRIQPVHILTSVSSLRGTRECSVTSDLDFPTQVIPLKTLNAVASVPIMYSWSPLQQNFMVEDETVLHNIPYMGDEVLDQDGTFIEELIKNYDGKVHGDRECGFINDEIFVELVNALGQYNDDDDDDDGDDPEEREEKQKDLEDHRDDKESRPPRKFPSDKIFEAISSMFPDKGTAEELKEKYKELTEQQLPGALPPECTPNIDGPNAKSVQREQSLHSFHTLFCRRCFKYDCFLHPFHATPNTYKRKNTETALDNKPCGPQCYQHLPLLPRN

SEQ ID NO: 5464 - DNA, 2904 bp, Homo sapiens
acctatcctccccgcctcccgtccgcggcgggctccgggcccccgcgatgtctcccggtccccgcgtgcctgcacaccgccttcctgagaggcgccgtgtgttcagcgaaagaacaaagagacggcggcggcgcttccacacggccagtggcgtcccttacagcgaaccccgccgccgcccgcgcgcgcacgcgctgccagtgcccgcccgcccacgagccctgagcgcactctgcgtggggctggctcggcgcctccgagcccggcgggccctgtgattggacgggcgcccgcctcgcgtcccgccaatcggggcggcgcttgattgggctgggggggccaaataaaagcgatggcgattgggctgccgcgtttggcgctcggtccggtcgcgtccgacacccggtgggactcagaaggcagtggagccccggcggcggcggcggcggcgcgcgggggcgacgcgcgggaacaacgcgagtcggcgcgcgggacgaagaataatcatgggccagactgggaagaaatctgagaagggaccagtttgttggcggaagcgtgtaaaatcagagtacatgcgactgagacagctcaagaggttcagacgagctgatgaagtaaagagtatgtttagttccaatcgtcagaaaattttggaaagaacggaaatcttaaaccaagaatggaaacagcgaaggatacagcctgtgcacatcctgacttctgtgagctcattgcgcgggactagggaggtggaagatgaaactgttttacataacattccttatatgggagatgaagttttagatcaggatggtactttcattgaagaactaataaaaaattatgatgggaaagtacacggggatagagaatgtgggtttataaatgatgaaatttttgtggagttggtgaatgcccttggtcaatataatgatgatgacgatgatgatgatggagacgatcctgaagaaagagaagaaaagcagaaagatctggaggatcaccgagatgataaagaaagccgcccacctcggaaatttccttctgataaaatttttgaagccatttcctcaatgtttccagataagggcacagcagaagaactaaaggaaaaatataaagaactcaccgaacagcagctcccaggcgcacttcctcctgaatgtacccccaacatagatggaccaaatgctaaatctgttcagagagagcaaagcttacactcctttcatacgcttttctgtaggcgatgttttaaatatgactgcttcctacatccttttcatgcaacacccaacacttataagcggaagaacacagaaacagctctagacaacaaaccttgtggaccacagtgttaccagcatttggagggagcaaaggagtttgctgctgctctcaccgctgagcggataaagaccccaccaaaacgtccaggaggccgcagaagaggacggcttcccaataacagtagcaggcccagcacccccaccattaatgtgctggaatcaaaggatacagacagtgatagggaagcagggactgaaacggggggagagaacaatgataaagaagaagaagagaagaaagatgaaacttcgagctcctctgaagcaaattctcggtgtcaaacaccaataaagatgaagccaaatattgaacctcctgagaatgtggagtggagtggtgctgaagcctcaatgtttagagtcctcattggcacttactatgacaatttctgtgccattgctaggttaattgggaccaaaacatgtagacaggtgtatgagtttagagtcaaagaatctagcatcatagctccagctcccgctgaggatgtggatactcctccaaggaaaaagaagaggaaacaccggttgtgggctgcacactgcagaaagatacagctgaaaaaggacggctcctctaaccatgtttacaactatcaaccctgtgatcatccacggcagccttgtgacagttcgtgcccttgtgtgatagcacaaaatttttgtgaaaagttttgtcaatgtagttcagagtgtcaaaaccgctttccgggatgccgctgcaaagcacagtgcaacaccaagcagtgcccgtgctacctggctgtccgagagtgtgaccctgacctctgtcttacttgtggagccgctgaccattgggacagtaaaaatgtgtcctgcaagaactgcagtattcagcggggctccaaaaagcatctattgctggcaccatctgacgtggcaggctgggggatttttatcaaagatcctgtgcagaaaaatgaattcatctcagaatactgtggagagattatttctcaagatgaagctgacagaagagggaaagtgtatgataaatacatgtgcagctttctgttcaacttgaacaatgattttgtggtggatgcaacccgcaagggtaacaaaattcgttttgcaaatcattcggtaaatccaaactgctatgcaaaagttatgatggttaacggtgatcacaggataggtatttttgccaagagagccatccagactggcgaagagctgttttttgattacagatacagccaggctgatgccctgaagtatgtcggcatcgaaagagaaatggaaatcccttgacatctgctacctcctcccccctcctctgaaacagctgccttagcttcaggaacctcgagtactgtgggcaatttagaaaaagaacatgcagtttgaaattctgaatttgcaaagtactgtaagaataatttatagtaatgagtttaaaaatcaactttttattgccttctcaccagctgcaaagtgttttgtaccagtgaatttttgcaataatgcagtatggtacatttttcaactttgaataaagaatacttgaacttgtccttgttgaatc

SEQ ID NO: 5465 - protein, 707 aa, Homo sapiens; identical to SEQ ID NO: 512

SEQ ID NO: 5466 - DNA, 580 bp, Homo sapiens
tatgcaaaaggtaggtacctttgacgtgagaattggaactcccttttcagtcctgtgatgatggacttgaatacttctgggatagttgtttgttatgtgaacaagtcagttaaccccccgtggcccgtcttcatgctcactgacaccagtgtgtctctttgcagttatgatggttaacggtgatcacaggataggtatttttgccaagagagccatccagactggcgaagagctgttttttgattacagatacagccaggctgatgccctgaagtatgtcggcatcgaaagagaaatggaaatcccttgacatctgctacctcctcccccctcctctgaaacagctgccttagcttcaggaacctcgagtactgtgggcaatttagaaaaagaacatgcagtttgaaattctgaatttgcaaagtactgtaagaataatttatagtaatgagtttaaaaatcaactttttattgccttctcaccagctgcaaagtgttttgtaccagtgaatttttgcaataatgcagtatggtacatttttcaactttgaataaagaatacttgaacttgtccttgttg

SEQ ID NO: 5467 - protein, 47 aa, Homo sapiens
MMVNGDHRIGIFAKRAIQTGEELFFDYRYSQADALKYVGIEREMEIP

SEQ ID NO: 5468 - DNA, 1080 bp, Homo sapiens
actgcatttgcaaccatcttccagactcccctggatattctcaaaggactgagaggaaaggcagctgctttcatagctgatgttctggggtagaatgtaaggctgtgtagggatgtttctggtgggattatgtgaaaatggaggtaggcttaacatgtaagatattcagagaaactcttagttggaacaagtagaataggtttttttctatgaatgctttatagacattataatgaaaaaaactaattttaaatgtgaaaatgcctattcgtgatgtttggaagaattttgtcagatttttttttttttttgctatgttttgctcagtaatgtatgtttatagttgataattaatagcttttgagtcagataaccatcttgaattataggtgattaattttaacctggaacaatagtgtgttcttccaaatgtcatttcttactgaatgaagctgcttgatttatttgcttttgcaggcaaaccctgaagaactgtaaccagttgcatttacaaaatcataataacttggtttacttataactgaaattattcactgggctgtgcttacttttttctttttagattttgtggtggatgcaacccgcaagggtaacaaaattcgttttgcaaatcattcggtaaatccaaactgctatgcaaaagttatgatggttaacggtgatcacaggataggtatttttgccaagagagccatccagactggcgaagagctgttttttgattacagatacagccaggctgatgccctgaagtatgtcggcatcgaaagagaaatggaaatcccttgacatctgctacctcctcccccctcctctgaaacagctgccttagcttcaggaacctcgagtactgtgggcaatttagaaaaagaacatgcagtttgaaattctgaatttgcaaagtactgtaagaataatttatagtaatgagtttaaaaatcaactttttattgccttctcaccagctgcaaagtgttttgtaccagtgaatttttgcaataatgcagtatggtacatttttcaactttgaataaagaatacttgaacttgtccttgttg

SEQ ID NO: 5469 - protein, 47 aa, Homo sapiens; identical to SEQ ID NO: 5467

SEQ ID NO: 5470 - DNA, 1199 bp, Homo sapiens
tgaggatttacagtgatagcttttgttttcattctgtagtctactttgtccccagtccattttcaccctccttttttgatgatgtgattgtgttttattctctagcatctattgctggcaccatctgacgtggcaggctgggggatttttatcaaagatcctgtgcagaaaaatgaattcatctcagaatactgtggagagattatttctcaagatgaagctgacagaagagggaaagtgtatgataaatacatgtgcagctttctgttcaacttgaacaatggtatgtttcagagctgggaggcagtgagttcctgagttgcatgtggcagccttctgccggccgagtgttcagaaacgagggtagaggtcagtgaggtgaccagaaggaggatctccttagaggcatggggggctgcttgcttgaaaggaactggagcaaggaattcctcagggagcagatagactagatgtgcaggaaaccgcctctctggagtcccggctgtctgtgggtggcactatcccagcatctggctgtgaaggggacgttgtgctcttgctgctcacctcacctcttgtgttcaggcagctcagcacacctcctccagtcagtgcctctgagcggggaaggaggggaggagcactgcatttgcaaccatcttccagactcccctggatattctcaaaggactgagaggaaaggcagctgctttcatagctgatgttctggggtagaatgtaaggctgtgtagggatgtttctggtgggattatgtgaaaatggaggtaggcttaacatgtaagatattcagagaaactcttagttggaacaagtagaataggtttttttctatgaatgctttatagacattataatgaaaaaaactaattttaaatgtgaaaatgcctattcgtgatgtttggaagaattttgtcagatttttttttttttttgctatgttttgctcagtaatgtatgtttatagttgataattaatagcttttgagtcagataaccatcttgaattataggtgattaattttaacctggaacaatagtgtgttcttccaaatgtcatttcttactgaatgaagctgcttgatttatttgcttttgcaggcaaaccctgaagaactgtaaccagttgcatttacaaaatcataataacttggtttacttataactgaaattattcactg

SEQ ID NO: 5471 - protein, 34 aa, Homo sapiens
MNSSQNTVERLFLKMKLTEEGKCMINTCAAFCST

SEQ ID NO: 5472 - DNA, 537 bp, Homo sapiens
attgggcgggggggtggtatgtgtatatgttggggagggagcagctttggggtgtttcctcaaattctctaattgggggacccctgcaaaagagtgtcactaagaagaaaggtattgggttggtgcaaaagtaattgctgtttttaccattaaaagtaatggcaaaactgtaattacttttgcatcaacctaatatcttgataatctgggatggaataagagtaggtggcagctgcagcatgggcactcccaaaggctccaagaggtacccagagcagggaggtgcattgcagcagagcagttggaacagcctggactctgacccgagaggagtgtggaacgaaccctggaactccagcagttctggaggctacaagatggaatcaaggtgtcagcaaggttgcccttcctccgaagactctacagaagaatcttctagcttctgctggcagctggtgacccctggcaatccttggattgtgacaggatcactttaatctcacgccttgccttcacttggattttttccctgtttgt

SEQ ID NO: 5473 - protein, 85 aa, Homo sapiens
MGTPKGSKRYPEQGGALQQSSWNSLDSDPRGVWNEPWNSSSSGGYKMESRCQQGCPSSEDSTEESSSFCWQLVTPGNPWIVTGSL

SEQ ID NO: 5474 - DNA, 896 bp, Homo sapiens
cccaaagtacttgtgtccgggtggtggactggattagctgcggagccctggaagctgcctgtccttctccctgtgcttaaccagaggtgcccatgggttggacaatgaggctggtcacagcagcactgttactgggtctcatgatggtggtcactggagacgaggatgagaacagcccgtgtgcccatgaggccctcttggacgaggacaccctcttttgccagggccttgaagttttctacccagagttggggaacattggctgcaaggttgttcctgattgtaacaactacagacagaagatcacctcctggatggagccgatagtcaagttcccgggggccgtggacggcgcaacctatatcctggtgatggtggatccagatgcccctagcagagcagaacccagacagagattctggagacattggctggtaacagatatcaagggcgccgacctgaagaaagggaagattcagggccaggagttatcagcctaccaggctccctccccaccggcacacagtggcttccatcgctaccagttctttgtctatcttcaggaaggaaaagtcatctctctccttcccaaggaaaacaaaactcgaggctcttggaaaatggacagatttctgaaccgtttccacctgggcgaacctgaagcaagcacccagttcatgacccagaactaccaggactcaccaaccctccaggctcccagagaaagggccagcgagcccaagcacaaaaaccaggcggagatagctgcctgctagatagccggctttgccatccgggcatgtggccacactgcccaccaccgacgatgtgggtatggaaccccctctggatacagaaccccttcttttccaaataaaaaaaaaatcatccagggc

SEQ ID NO: 5475 - protein, 227 aa, Homo sapiens; identical to SEQ ID NO: 514

SEQ ID NO: 5476 - DNA, 475 bp, Homo sapiens
ccttcttttcctgcactctagtgtcccttctgcctgactctctgtgcatcttgaaaggagaaacggtgcccatgggttggacaatgaggctggtcacagcagcactgttactgggtctcatgatggtggtcactggagacgaggatgagaacagcccgtgtgcccatgaggccctcttggacgaggacaccctcttttgccagggccttgaagttttctacccagagttggggaacattggctgcaaggttgttcctgattgtaacaactacagacagaagatcacctcctggatggagccgatagtcaagttcccgggggccgtggacggcgcaacctatatcctggtgatggtggatccagatgcccctagcagagcagaacccagacagagattctggagacattggctggtaacagatatcaagatggggaaagcagagcccagagaagttgaatgatgccatctcttagc

SEQ ID NO: 5477 - protein, 129 aa, Homo sapiens
MGWTMRLVTAALLLGLMMVVTGDEDENSPCAHEALLDEDTLFCQGLEVFYPELGNIGCKVVPDCNNYRQKITSWMEPIVKFPGAVDGATYILVMVDPDAPSRAEPRQRFWRHWLVTDIKMGKAEPREVE

SEQ ID NO: 5478 - DNA, 444 bp, Homo sapiens
aggccatggtagatgtgggcagggaactggagactccgggcccagtgggttcaacctcatgagggagtggagttgagatgctttggggatcagtgacacaacctcttacttggcttggggtgcaaacctagactccctgtcaccctggccttctcctctccaagagaaggagaactgtgggcatcgcagtggtgacacttcagttatcacaggctcagcagccaagtgaaaagatgatgttggaatttcctagatgattccattcatggattggccatgcagcagtccttagggatcccctcctaaaagtcacgatctacccaagaatccactgtgaatcgaccatccgccagtttctccaaacgttttaaagagcaatttgtattttcaacctgtctcacctcttggggataatgaattagacgagttgactacccactgtgt

SEQ ID NO: 5479 - protein, 37 aa, Homo sapiens
FHSWIGHAAVLRDPLLKVTIYPRIHCESTIRQFLQTF

SEQ ID NO: 5480 - DNA, 853 bp, Homo sapiens
ggttactttctcagctgtaaccaggaggcagggaagaaggcaatgcagtcctcattctttagagactcaacctgtgtccccagccctccccacctcctcccacacccccctccaaactcagcttggctgggaaaggaaactccccagtctgctgtgctcctgcaagctgagtgtttgcaggtgaatctactccaggccgtgagcgccccagaggtgggaactatatcttagtcacccttgtactttcaagcctcacaatgggacctgccgaaaaaagggcactcagtaaacgtcttgtgaacgcatgaattgggcagctgttggtgtacgtgttttgtttctgatgctgagacccttcctgaaccggatctccatcccttcactgagcagggttcacacatatttatgttggagtgcaaaggcttccgatgcccggacacgtgtcctccaatctgagaagggaaccagggaaggggctggagttgatgcatcttgacttaagggctgaagagttggcaattttggaggccagtgaagagccacgtagaaaatgtcccgctgcctgccatcatcagcagctcctcttgctcccatcctgcagagagggctcccacacagagagcagacacagggacctctttaaaatgaagatgaaatgcacctggttctaccacctagttagaagcagttatgaaggttgaagagctgttatctgagatttatagccccaaatctatgagatagactctcctaattaataagacaaggatgactagaaagttgtgaaaactacctggcagggcttggagcctgctgtcaccaccacgatgatagcactgtctttgctgctgag

SEQ ID NO: 5481 - protein, 63 aa, Homo sapiens
MNWAAVGVRVLFLMLRPFLNRISIPSLSRVHTYLCWSAKASDARTRVLQSEKGTREGAGVDAS

SEQ ID NO: 5482 - DNA, 3879 bp, Homo sapiens
agctgtaaccaggaggcagggaagaaggcaatgcagtcctcattctttagagactcaacctgtgtccccagccctccccacctcctcccacacccccctccaaactcagcttggctgggaaaggaaactccccagtctgctgtgctcctgcaagctgagtgtttgcagggcagctgttggtgtacgtgttttgtttctgatgctgagacccttcctgaaccggatctccatcccttcactgagcagggttcacacatatttatgttggagtgcaaaggcttccgatgcccggacacgtgtcctccaatctgagaagggaaccagggaaggggctggagttgatgcatcttgacttaagggctgaagagttggcaattttggaggccagtgaagagccacgtagaaaatgtcccgctgcctgccatcatcagcagctcctcttgctcccatcctgcagagagggctcccacacagagagcagacacagggacctctttaaaatgaagatgaaatgcacctggttctaccacctagttagaagcagttatgaaggttgaagagctgttatctgagatttatagccccaaatctatgagatagactctcctaattaataagacaaggatgactagaaagttgtgaaaactacctggcagggcttggagcctgctgtcaccaccacgatgatagcactgtctttgctgctgagcctattagaatgtcaggatgtgcattcttctctcctagtgggatggcacggttcacctggctattacagagaagcaagtgcagatcgtgacttaaggctccgggaggagagttaatcagggaagagctggttgacaagactcactcagtgcatgacttgagagcaccaagagggggaaagggagaagaaagaacctcttccaaaggcagcatccacccccttgacaaagggccatttcccccagcccggggtgctttctgacttcctttgttccccgatgagcattttcttccttgtccccagccttcacataagttcaattcaacatcctctctctcttctcccaatgtcctctccttaattttgctgcatcctccaatgtgaatgtttgcctcctggtctgggatctgtcttattccctttatctcacctgaaaaaactctcccctttaatctctgctcattcaagtcctgcccatccttcaaagtatggccaagctcacctcttccagaaagccccaccctgtggtgttatctccatcctgaatcacagcagcacttactgtgagataactatcaggttacatctatcagagttcaatgcactctccccaaatgaagtggacacttgttggcagtaagaagagaagctttttgcaccaagtggtgcattcaatgcaatgcaaggagactgtgacgatactgaaatgagtattacccggccccaggagatgaacaccgtccttgcttgatgccagttcataaagagagctcttgtttattgagagcttatgagtgctgaggaattcacataaatcatctcatctaaattttccaacaatcatgagatggtttctcttatttcctccttttacgcatgaagaaactggggctcaggaggttagatgactttctcagagtcacacagatagtacagggctgacccagaattcaagcccaggtctggcagactccagcacccgccctttgcctccacgaccaagtacaagcagcaggctggcactggcctttccctgctatgactgccgagctgggttacacctgctgctggtccccagcaccaggcacacgacgtaactgtgagtcctccgagtatgtgagggagctggcactcaccttctgcctgaagcaaaggagctgtgctcttccgtttcagtgtgaaaaagcctcagaagatgcccagcttagaaggacacaagagacagtctgtggacaacatctccacttcctggcgtcctcagcactgttgctagtgaagctactctgcccaaggtctccagagagcttctgaaagaagtcaggactcatgcatgcagatgaatacgcctcgtgggtattcaccaggtcctcttgggaagccagctctgtgtcccaggcacaccgtctgtgtgcaagagaaggggagcacctgagtttgggaactgctttcgtaccagcttataggccaccccaagaaccggcctcctggcttcctagtcacagaccgcctgcagggttgacttatgcatccttttgcaggagacaggctcacttctctcctgtgactaacatggaattacgggttaaggagggaagttgtactcacctgttgattcatttattcactcacttgctcactcatcaatcatttcttcaacaatgaaacccttactagacaaatactgactccctgctccagaataactatctgttcggtgctaggactgtcaaatgagtaagcgtttcttcccacaggcgttcagggtctatttctgcactttacagacaggcaagacagaagtgatcagaagcggccaccaaccatggagttcagaaacacggcacagttctggaagaggcgaaaggcggctcttccatccatgctggtcaagaggaaattcaacacacctcacagccattgaatctgaccaggcgtgtaatacatcccatcgtcttgtcagttagcagctgtgggaccttgaaggcttcttaaattccccaagtctagactttcttatctttaaaatgcagctgaaaacaatgcctgtctcatggaggtgtaagggttaaatggaatcatgtagcaagcattcagcacatgtcaagtccaggtcaaggccaacatgcaggggcagggagaggtgtaacctctttcagtttggagccatgcaggaccctgccatttgcagccctttggggtaagactgtagcccccaaacatcctgctgccccagagcagtggcccagcaggtgcactgagagctctggtgcacctggcatgccccgactcctcacacagcagcaacagggacagtgacagggacctgagatggggtggcccacctggctggcagctggcactgggcacattgcccagaagttggggagttctcaggtaggggcagaggtgggtgtttgagggagcagttagcagcactgtctgctgtggcaggggtctcctgggtaaggtcagagggattcgaggaggcccagggatcaccccagggtggggtgggacgctgctcaagtcacaaagcaaagttgcagggtgtaggggaggggatgggactgttagtctaattgtgactcatctctccttatttttctccttatctcttgtatttatttttttcaatcctcccaagttactgggccttgaggacactcctagtgtgtgtgtgtgtgtgtgtgtgtgtgtatgtgtgtgtgtgtgtgtatttctatatatataatttttcttttttttgagacagagtttcgctcttgttgctcaggtggaagtgcaatggtgcgatctcaactcactgcaacctgcatctcctgggatcgcttgagcccaggaagtcgaggctgcagtgagccatgatcatatttgccagcctgggtgacagagcaagaccatctcaaagaacgtatttaccgaatgaagttttatgatgttctctagcactttttagtttattgtctttaaaaagaaaccctctgaagtgtctctggagaatacaaacgcatgcgcgcatgcacacgctgggaacaggagctgcttcagtaggtaactgagtgggagggaggttagcttttcactgtgacccttatctgtacacctgctaactcaaaataatttaataacaacaacaatgacaataaaaagggagtgagtgctctcatttt

SEQ ID NO: 5483 - protein, 93 aa, Homo sapiens
MQSSFFRDSTCVPSPPHLLPHPPPNSAWLGKETPQSAVLLQAECLQGSCWCTCFVSDAETLPEPDLHPFTEQGSHIFMLECKGFRCPDTCPPI

SEQ ID NO: 5484 - DNA, 559 bp, Homo sapiens
ccaaagtacttgtgtccgggtggtggactggattagctgcggagccctggaagctgcctgtccttctccctgtgcttaaccagaggtgcccatgggttggacaatgaggctggtcacagcagcactgttactgggtctcatgatggtggtcactggagacgaggatgagaacagcccgtgtgcccatgaggccctcttggacgaggacaccctcttttgccagggccttgaagttttctacccagagttggggaacattggctgcaaggttgttcctgattgtaacaactacagacagaagatcacctcctggatggagccgatagtcaagttcccgggggccgtggacgtgagtgatgcctgggacacagagctggcttcccaagaggacctggtgaatacccacgaggcgtattcatctgcatgcatgagtcctgacttctttcagaagctctctggagaccttgggcagagtagcttcactagcaacagtgctgaggacgccaggaagtggagatgttgtccacagactgtctcttgtgtccttctaagctgggca

SEQ ID NO: 5485 - protein, 155 aa, Homo sapiens
MGWTMRLVTAALLLGLMMVVTGDEDENSPCAHEALLDEDTLFCQGLEVFYPELGNIGCKVVPDCNNYRQKITSWMEPIVKFPGAVDVSDAWDTELASQEDLVNTHEAYSSACMSPDFFQKLSGDLGQSSFTSNSAEDARKWRCCPQTVSCVLLSW

SEQ ID NO: 5486 - DNA, 898 bp, Homo sapiens
gggagacatggttcatttcatagcatatgggaaaggctgagggaagagcaggtttaggagatgagtacaagagctcagggcctctgatctggacatgatcttcatcagatcacactccagctatgacagtgattgtccaagctccattccctgtctctcctcccagactaggacatcttcttcttctgggttcccacatcattctaggttccagtggcacttttcttacttgatgcaaggatgtgggatttgggaacatggtttcatctctccaaccacaataccagcaactttcaggcaactgtctgatgccacacagcaaatctgccccagggcagagggggcagtaggtaggcagtaactgggagcacaggcagagaggctggcatgaagaaacctgcccatgggaagcagggccaatgccacctaggctgggttcaaggatgtggccaaaaaagcagaacttccgacaaacttggaaaactagtcaggttactgaaacaggaacttaagcttctcagcaaattagacgtaacatataaactggaaaaatcagtgaacttgaagatagagcaacagaaatgatctaaagaaatataaagagagaaaagaaggctgggggacagaacagagcacccaagcattgtgagacaacataaaatggtctaacatatgtatagttgggatctcattaagaaaagagagcagagtagaactatttgaagagataatgaccaagaacttgttaaagaaaggcaacataccacaagtccaagatactcagagaaccttaatcagaatttttaaaaaaatccacctagatgtgtcatgatcaaactgctaaaaaccaaagataaattctgaagacaaccaaggaaaacagaatgccggtgtcccc

SEQ ID NO: 5487 - protein, 88 aa, Homo sapiens
MIFIRSHSSYDSDCPSSIPCLSSQTRTSSSSGFPHHSRFQWHFSYLMQGCGIWEHGFISPTTIPATFRQLSDATQQICPRAEGAVGRQ

SEQ ID NO: 5488 - DNA, 2934 bp, Homo sapiens
caggtcttcttcagccggatgactgtggagcgccaccacaagcagggcctgcaacccaggcatccaggctagacaccaaatcagcaaactttattcccgcgctgccgagtacaagccggcgcctccccggcgcacacagtacacatcagctccgggagacctacccgacccgcccctccagcgccgtccccgcccccgttcctgccccacccctttccccgcccccggcccggctcgcctttctcgcggcgctgcaaccctcccaccacagcccatccagccccgcccagcgcgccgcggtgcgcatgcgtggaggccctcgctgccgctgagcacctcgggaagtgtagtctcttcgcaggtgcggctgggcagctagagtcctgcatcccggtggaatccggagaagtgagaacattcccgccgcccggtcctcattcccatcttcccacctgtccagtcccctcgcactcccgctgcaccccacgcgccgggcttcagtcagagagtgcactgaggaagagcggagaccccctcttcccctcagcaggctgtgccgggggaggcggggtccaccgcccgccccccgccgtcgctctccccgcctccccttccctcccctcctggcgggtgcggggccggtgtccgaagtcaggcggcggcccccgcagcggccgcaggaggggcggctgcggtgggcgccgcgggcgatgcccctgcccggctgctccggcggggggcagtgcgagcggcggcggcgggggaggaggcggggggcggcggctgcggcggctgcagcagaggggccgagagctggcggtggcggcggcggtggtcgtgaagggcatcggcggcggcggtgatggcagagatgatgtgagtgcccgccggctggagacctggggccgcggagcgcgggacgggcggcggcggcgtgcgggagcggccccgggggcggcggagggatgcggggagcgcgggcagagccggagcggcggccgccaaccggccggcagtggctggagccccgcgctgcggcgccgggggagccgggcccggcgtgggggtcgcgggcggcggcggggcggtcaggccgaggggcgtctgcgattgttctcaacacccctcccccaccccatcccgtgtgtctgtttgttacttgcagctgaagatggaaagagccaggcgaaggggaggcggcggcggccgcggccgcggaggcaagaatgtagggggctctggcctaagcaagagtagactctatccccaggcccagcactcccactacccccactacgcggcctcagccacccctaatcaggccgggggcgcagccgaaatccaggagctggcctccaaacgagtggacatccagaaaaagaggttttacctagacgtgaagcaaagctcccggggccgcttcctaaagatagccgaagtctggatagggagaggccggcaggacaacatcagaaagagtaaactgaccctctccctgtctgtggcagcggagctgaaggactgtctaggggacttcatcgagcactatgcccacctgggcctgaaaggccaccggcaagagcatggccacagcaaagagcaaggctccagaaggaggcagaagcactcggcaccctccccaccagtctcggtggggtccgaagagcatcctcacagtgtcctgaaaacagactatatcgagagggacaataggaaatattacctagacctaaaggaaaatcagcggggtcgcttcctacggattagacaaaccatgatgcgggggactggcatgataggttattttggccacagtttgggccaagaacagactattgtcctcccagcacaaggaatgattgagtttcgtgatgccttggttcagctgattgaagactatggcgaaggagacatagaagaacgaagaggtggagacgatgacccgcttgaactcccagaggggacttctttcagagtggacaataaaaggttctactttgatgtgggctctaataaatatggaattttcctgaagctcacaaattaccccaaatccagagagaatatcaacctttttcactgttgtcaaatcaagcataaggaacagccccatgatactacaaaaacagttgaggaataaggaataaatctcttatgttacacctcagaataaaggcattcggtgaaagaaatgaactgaagttcatcatgaatgtaaggcctcagtacttgacattcctccacggaagggaagacaagtatcaacaccactggcatcatttccaaactgatcttatgttgaataatttccaccacattgaagtacctttcgactctatccagtttttgggttttgttttttttaattcatcaagcctttcgttttcaaaccaccatttgtcagccttgaggtagagagacatatagatttgaaaatactttcttaagagatcatgtaactatataactctgaatttaaaaattgaggggggagggataatttcaacccactgcctcttaccagaaacatttttttaaatctgtaactgctttagtgttaacagggtgcaaggtggtttttgtcccgtattgttcttaaaaggttctcatttattgtgattgtattgtactgtatgagaacaaatcataaattgccttgtattgtttataatagaccataccacgtactacttcagtttttatgttccaagtttttcagtgatgcatgttaacagttaggtcctaaaattctgtggtgctaattctcccatacccaatggtgcttttgtggatgctaactgcacacatgctgaacaaagcttgaagtttaaaactttcctcccttcctctgtttatatgaagtaaaatgaaataacttgaatttgtctcaaagtatcactgacaatctaataaacttgtttatatgtgtgatta

SEQ ID NO: 5489 - protein, 322 aa, Homo sapiens; identical to SEQ ID NO: 516

SEQ ID NO: 5490 - DNA, 527 bp, Homo sapiens
ttaatgactattaaatattaggacttaaaagaccttggaattaatttaatcccttagttttccattttgtgacatacatcatgtagctcaaattgttcatagttactagaatacgctaagtaaacagaatttaaaggctagagcttaaattgctgattatctcaagatatataaatggtgagaaatatactaatttcttctaaaagcatatcgcatttttaccatcttcctgtatcctctctgtacgtatagaatggaggaactatatactgtactgtgtttatagtacctttttttgtcttcaaactctgcctcccaggttcaagcgattctccagcctcagcctcccgagtagctggaattacaggcgcgtgccaccacgcccagctaatttttgtattcttggtagaaacagggttttgccatgtgttcgagaccagcctggctaacatagtgaaaccccatctctactaaaaatacaaaaaattagccaggcatggggatgacagagtgagactccatctcac

SEQ ID NO: 5491 - protein, 81 aa, Homo sapiens
KHIAFLPSSCILSVRIEWRNYILYCVYSTFFCLQTLPPRFKRFSSLSLPSSWNYRRVPPRPANFCILGRNRVLPCVRDQPG

SEQ ID NO: 5492 - DNA, 2874 bp, Homo sapiens
ctttctcgcggcgctgcaaccctcccaccacagcccatccagccccgcccagcgcgccgcggtgcgcatgcgtggaggccctcgctgccgctgagcacctcgggaagtgtagtctcttcgcaggtgcggctgggcagctagagtcctgcatcccggtggaatccggagaagtgagaacattcccgccgcccggtcctcattcccatcttcccacctgtccagtcccctcgcactcccgctgcaccccacgcgccgggcttcagtcagagagtgcactgaggaagagcggagaccccctcttcccctcagcaggctgtgccgggggaggcggggtccaccgcccgccccccgccgtcgctctccccgcctccccttccctcccctcctggcgggtgcggggccggtgtccgaagtcaggcggcggcccccgcagcggccgcaggaggggcggctgcggtgggcgccgcgggcgatgcccctgcccggctgctccggcggggggcagtgcgagcggcggcggcgggggaggaggcggggggcggcggctgcggcggctgcagcagaggggccgagagctggcggtggcggcggcggtggtcgtgaagggcatcggcggcggcggtgatggcagagatgatgtgagtgcccgccggctggagacctggggccgcggagcgcgggacgggcggcggcggcgtgcgggagcggccccgggggcggcggagggatgcggggagcgcgggcagagccggagcggcggccgccaaccggccggcagtggctggagccccgcgctgcggcgccgggggagccgggcccggcgtgggggtcgcgggcggcggcggggcggtcaggccgaggggcgtctgcgattgttctcaacacccctcccccaccccatcccgtgtgtctgtttgttacttgcagctgaagatggaaagagccaggcgaaggggaggcggcggcggccgcggccgcggaggcaagaatgtagggggctctggcctaagcaagagtagactctatccccaggcccagcactcccactacccccactacgcggcctcagccacccctaatcaggccgggggcgcagccgaaatccaggagctggcctccaaacgagtggacatccagaaaaagaggttttacctagacgtgaagcaaagctcccggggccgcttcctaaagatagccgaagtctggatagggagaggccggcaggacaacatcagaaagagtaaactgaccctctccctgtctgtggcagcggagctgaaggactgtctaggggacttcatcgagcactatgcccacctgggcctgaaaggccaccggcaagagcatggccacagcaaagagcaaggctccagaaggaggcagaagcactcggcaccctccccaccagtctcggtggggtccgaagagcatcctcacagtgtcctgaaaacagactatatcgagagggacaataggaaatattacctagacctaaaggaaaatcagcggggtcgcttcctacggattagacaaaccatgatgcgggggactggcatgataggttattttggccacagtttgggccaagaacagactattgtcctcccagcacaaggaatgattgagtttcgtgatgccttggttcagctgattgaagactatggcgaaggagacatagaagaacgaagaggtggagacgatgacccgcttgaactcccagaggggacttctttcagagtggacaataaaaggttctactttgatgtgggctctaataaatatggaattttcctgaaggtaagtgaggtgagaccaccttaccgtaatactattactgttccattcaaagcttggacaaggtttggggagaattttatcaagtatgaagaagagatgaggaaaatttgcaacagccataaagaaaagagaatggatggcagaaaggccagtggtgaagaacaagaatgcctcgactagagtgaaattgaactccatcaggcaaaatttaaaatcacaaattggctaaaagtactgatccattatcctttgaagaagtttttcctcttttttggcccgttgttattagtaatacctctagtagttgatacttcaggaagtctgattctcatgttatgttacacatagatcactataattcttacgggaattccaaccttcccagagctaaatagtttagctgcttcaactgctccagactattgaagtatgcaaatcagcacaaaatgtgacattctgacattctaaataccataactaagatttacattgcactatgacataatcccgaaaaaagatacatatacttaaatagaagtgtgactttcccccaaaagtatttcaattctacttcattaaaagctgctaagcttacctgtagggcagttaccacagaaacagaaattgacctccggtatatataaatatttacttataaaagtacaagtagacgtatattgtccgttgaataactgaatataccatcaaaggatcaaatcttattacctaattaaaccttaaaaatataatgtcataatatttcttaagaatactatagtattctataatttcaaactttgtggtaaccctacattttatagttgccatatcaaagccatgggagagttttaattcgttattctaagtttagttacaatcccttctttacctctacttaatgttccatatatttttattgactttccaaagtttcaggaattacttttatgtcacattgagtgggaggcttcatccaatggctttgctatggaaatcttggtggtgtagcttttcatgctaatttaaagattgcaagaggtttcttccccaaaatatatcatggactcaaggtgttat

SEQ ID NO: 5493 - protein, 347 aa, Homo sapiens; identical to SEQ ID NO: 518

SEQ ID NO: 5494 - DNA, 1396 bp, Homo sapiens
gcggcggcggtgatggcagagatgatgcaagaatgtagggggctctggcctaagcaagagtagactctatccccaggcccagcactcccactacccccactacgcggcctcagccacccctaatcaggccgggggcgcagccgaaatccaggagctggcctccaaacgagtggacatccagaaaaagaggttttacctagacgtgaagcaaagctcccggggccgcttcctaaagatagccgaagtctggatagggagaggccggcaggacaacatcagaaagagtaaactgaccctctccctgtctgtggcagcggagctgaaggactgtctaggggacttcatcgagcactatgcccacctgggcctgaaaggccaccggcaagagcatggccacagcaaagagcaaggctccagaaggaggcagaagcactcggcaccctccccaccagtctcggtggggtccgaagagcatcctcacagtgtcctgaaaacagactatatcgagagggacaataggaaatattacctagacctaaaggaaaatcagcggggtcgcttcctacggattagacaaaccatgatgcgggggactggcatgataggttattttggccacagtttgggccaagaacagactattgtcctcccagcacaaggaatgattgagtttcgtgatgccttggttcagctgattgaagactatggcgaaggagacatagaagaacgaagaggtggagacgatgacccgcttgaactcccagaggggacttctttcagagtggacaataaaaggttctactttgatgtgggctctaataaatatggaattttcctgaaggtaagtgaggtgagaccaccttaccgtaatactattactgttccattcaaagcttggacaaggtttggggagaattttatcaagtatgaagaagagatgaggaaaatttgcaacagccataaagaaaagagaatggatggcagaaaggccagtggtgaagaacaagaatgcctcgactagagtgaaattgaactccatcaggcaaaatttaaaatcacaaattggctaaaagtactgatccattatcctttgaagaagtttttcctcttttttggcccgttgttattagtaatacctctagtagttgatacttcaggaagtctgattctcatgttatgttacacatagatcactataattcttacgggaattccaaccttcccagagctaaatagtttagctgcttcaactgctccagactattgaagtatgcaaatcagcacaaaatgtgacattctgacattctaaataccataactaagatttacattgcactatgacataatcccgaaaaaagatacatatacttaaatagaagtgtgactttcccccaaa

SEQ ID NO: 5495 - protein, 146 aa, Homo sapiens
MMRGTGMIGYFGHSLGQEQTIVLPAQGMIEFRDALVQLIEDYGEGDIEERRGGDDDPLELPEGTSFRVDNKRFYFDVGSNKYGIFLKVSEVRPPYRNTITVPFKAWTRFGENFIKYEEEMRKICNSHKEKRMDGRKASGEEQECLD

SEQ ID NO: 5496 - DNA, 614 bp, Homo sapiens
gggggaggaggcggggggcggcggctgcggcggctgcagcagaggggccgagagctggcggtggcggcggcggtggtcgtgaagggcatcggcggcggcggtgatggcagagatgatctgaagatggaaagagccaggcgaaggggaggcggcggcggccgcggccgcggaggcaagaatgtagggggctctggcctaagcaagagtagactctatccccaggcccagcactcccactacccccactacgcggcctcagccacccctaatcaggccgggggcgcagccgaaatccaggagctggcctccaaacgagtggacatccagaaaaagaggttttacctagacgtgaagcaaagctcccggggccgcttcctaaagatagccgaagtctggatagggagaggccggcaggacaacatcagaaagagtaaactgaccctctccctgtctgtggcagcggagctgaaggactgtctaggggacttcatcgagcactatgcccacctgggcctgaaaggccaccggcaagagcatggccacagcaaagagcaaggctccagaaggaggcagaagcactcggcaccctccccaccagtctcggtggggtccga

SEQ ID NO: 5497 - protein, 162 aa, Homo sapiens
MERARRRGGGGGRGRGGKNVGGSGLSKSRLYPQAQHSHYPHYAASATPNQAGGAAEIQELASKRVDIQKKRFYLDVKQSSRGRFLKIAEVWIGRGRQDNIRKSKLTLSLSVAAELKDCLGDFIEHYAHLGLKGHRQEHGHSKEQGSRRRQKHSAPSPPVSVG

SEQ ID NO: 5498 - DNA, 5745 bp, Homo sapiens
cagccgcccctcctgcggccgctgcgggggccgccgcctgacttcggacaccggccccgcacccgccaggaggggagggaaggggaggcggggagagcgacggcggggggcgggcggtggaccccgcctcccccggcacagcctgctgaggggaagagggggtctccgctcttcctcagtgcactctctgactgaagcccggcgcgtggggtgcagcgggagtgcgaggggactggacaggtgggaagatgggaatgaggaccgggcggcgggaatgttctcacttctccggattccaccgggatgcaggactctagctgcccagccgcacctgcgaagagactacacttcccgaggtgctcagcggcagcgagggcctccacgcatgcgcaccgcggcgcgctgggcggggctggatgggctgtggtgggagggttgcagcgccgcgagaaaggcgagccgggccgggggcggggaaaggggtggggcaggaacgggggcggggacggcgctggaggggcgggtcgggtaggtctcccggagctgatgtgtactgtgtgcgccggggaggcgccggcttgtactcggcagcgcgggaataaagtttgctgatttggtgtctagcctggatgcctgggttgcaggccctgcttgtggtggcgctccacagtcatccggctgaagaagacctgttggactggatcttctcgggttttctttcagatattgttttgtatttacccatgaagacattgttttttggactctgcaaataggacatttcaaagatgagtgaaaaaaaattggaaacaactgcacagcagcggaaatgtcctgaatggatgaatgtgcagaataaaagatgtgctgtagaagaaagaaaggcatgtgttcggaagagtgtttttgaagatgacctccccttcttagaattcactggatccattgtgtatagttacgatgctagtgattgctctttcctgtcagaagatattagcatgagtctatcagatggggatgtggtgggatttgacatggagtggccaccattatacaatagagggaaacttggcaaagttgcactaattcagttgtgtgtttctgagagcaaatgttacttgttccacgtttcttccatgtcagtttttccccagggattaaaaatgttgcttgaaaataaagcagttaaaaaggcaggtgtaggaattgaaggagatcagtggaaacttctacgtgactttgatatcaaattgaagaattttgtggagttgacagatgttgccaataaaaagctgaaatgcacagagacctggagccttaacagtctggttaaacacctcttaggtaaacagctcctgaaagacaagtctatccgctgtagcaattggagtaaatttcctctcactgaggaccagaaactgtatgcagccactgatgcttatgctggttttattatttaccgaaatttagagattttggatgatactgtgcaaaggtttgctataaataaagaggaagaaatcctacttagcgacatgaacaaacagttgacttcaatctctgaggaagtgatggatctggctaagcatcttcctcatgctttcagtaaattggaaaacccacggagggtttctatcttactaaaggatatttcagaaaatctatattcactgaggaggatgataattgggtctactaacattgagactgaactgaggcccagcaataatttaaacttattatcctttgaagattcaactactgggggagtacaacagaaacaaattagagaacatgaagttttaattcacgttgaagatgaaacatgggacccaacacttgatcatttagctaaacatgatggagaagatgtacttggaaataaagtggaacgaaaagaagatggatttgaagatggagtagaagacaacaaattgaaagagaatatggaaagagcttgtttgatgtcgttagatattacagaacatgaactccaaattttggaacagcagtctcaggaagaatatcttagtgatattgcttataaatctactgagcatttatctcccaatgataatgaaaacgatacgtcctatgtaattgagagtgatgaagatttagaaatggagatgcttaagcatttatctcccaatgataatgaaaacgatacgtcctatgtaattgagagtgatgaagatttagaaatggagatgcttaagtctttagaaaacctcaatagtggcacggtagaaccaactcattctaaatgcttaaaaatggaaagaaatctgggtcttcctactaaagaagaagaagaagatgatgaaaatgaagctaatgaaggggaagaagatgatgataaggactttttgtggccagcacccaatgaagagcaagttacttgcctcaagatgtactttggccattccagttttaaaccagttcagtggaaagtgattcattcagtattagaagaaagaagagataatgttgctgtcatggcaactggatatggaaagagtttgtgcttccagtatccacctgtttatgtaggcaagattggccttgttatctctccccttatttctctgatggaagaccaagtgctacagcttaaaatgtccaacatcccagcttgcttccttggatcagcacagtcagaaaatgttctaacagatattaaattaggtaaataccggattgtatacgtaactccagaatactgttcaggtaacatgggcctgctccagcaacttgaggctgatattggtatcacgctcattgctgtggatgaggctcactgtatttctgagtgggggcatgattttagggattcattcaggaagttgggctccctaaagacagcactgccaatggttccaatcgttgcacttactgctactgcaagttcttcaatccgggaagacattgtacgttgcttaaatctgagaaatcctcagatcacctgtactggttttgatcgaccaaacctgtatttagaagttaggcgaaaaacagggaatatccttcaggatctgcagccatttcttgtcaaaacaagttcccactgggaatttgaaggtccaacaatcatctactgtccttctagaaaaatgacacaacaagttacaggtgaacttaggaaactgaatctatcctgtggaacataccatgcgggcatgagttttagcacaaggaaagacattcatcataggtttgtaagagatgaaattcagtgtgtcatagctaccatagcttttggaatgggcattaataaagctgacattcgccaagtcattcattacggtgctcctaaggacatggaatcatattatcaggagattggtagagctggtcgtgatggacttcaaagttcttgtcacgtcctctgggctcctgcagacattaacttaaataggcaccttcttactgagatacgtaatgagaagtttcgattatacaaattaaagatgatggcaaagatggaaaaatatcttcattctagcagatgtaggagacaaatcatcttgtctcattttgaggacaaacaagtacaaaaagcctccttgggaattatgggaactgaaaaatgctgtgataattgcaggtccagattggatcattgctattccatggatgactcagaggatacatcctgggactttggtccacaagcatttaagcttttgtctgctgtggacatcttaggcgaaaaatttggaattgggcttccaattttatttctccgaggatctaattctcagcgtcttgccgatcaatatcgcaggcacagtttatttggcactggcaaggatcaaacagagagttggtggaaggctttttcccgtcagctgatcactgagggattcttggtagaagtttctcggtataacaaatttatgaagatttgcgcccttacgaaaaagggtagaaattggcttcataaagctaatacagaatctcagagcctcatccttcaagctaatgaagaattgtgtccaaagaagttgcttctgcctagttcgaaaactgtatcttcgggcaccaaagagcattgttataatcaagtaccagttgaattaagtacagagaagaagtctaacttggagaagttatattcttataaaccatgtgataagatttcttctgggagtaacatttctaaaaaaagtatcatggtacagtcaccagaaaaagcttacagttcctcacagcctgttatttcggcacaagagcaggagactcagattgtgttatatggcaaattggtagaagctaggcagaaacatgccaataaaatggatgttcccccagctattctggcaacaaacaagatactggtggatatggccaaaatgagaccaactacggttgaaaacgtaaaaaggattgatggtgtttctgaaggcaaagctgccatgttggcccctctgttggaagtcatcaaacatttctgccaaacaaatagtgttcagacagacctcttttcaagtacaaaacctcaagaagaacagaagacgagtctggtagcaaaaaataaaatatgcacactttcacagtctatggccatcacatactctttattccaagaaaagaagatgcctttgaagagcatagctgagagcaggattctgcctctcatgacaattggcatgcacttatcccaagcggtgaaagctggctgcccccttgatttggagcgagcaggcctgactccagaggttcagaagattattgctgatgttatccgaaaccctcccgtcaactcagatatgagtaaaattagcctaatcagaatgttagttcctgaaaacattgacacgtaccttatccacatggcaattgagatccttaaacatggtcctgacagcggacttcaaccttcatgtgatgtcaacaaaaggagatgttttcccggttctgaagagatctgttcaagttctaagagaagcaaggaagaagtaggcatcaatactgagacttcatctgcagagagaaagagacgattacctgtgtggtttgccaaaggaagtgataccagcaagaaattaatggacaaaacgaaaaggggaggtctttttagttaagctggcaattaccagaacaattatgtttcttgctgtattataagaggatagctatattttatttctgaagagtaaggagtagtattttggcttaaaaatcattctaattacaaagttcactgtttattgaagaactggcatcttaaatcagccttccgcaattcatgtagtttctgggtcttctgggagcctacgtgagtacatcacctaacagaatattaaattagacttcctgtaagattgctttaagaaactgttactgtcctgttttctaatctctttattaaaacagtgtatttggaaaatgttatgtgctctgatttgatatagataacagattagtagttacatggtaattatgtgatataaaatattcatatattatcaaaattctgttttgtaaatgtaagaaagcatagttattttacaaattgtttttactgtcttttgaagaagttcttaaatacgttgttaaatggtattagttgaccagggcagtgaaaatgaaaccgcattttgggtgccattaaatagggaaaaaacatgtaaaaaatgtaaaatggagaccaattgcactaggcaagtgtatattttgtattttatatacaatttctattatttttcaagtaataaaacaatgtttttcatactgaatatt

SEQ ID NO: 5499 - protein, 1432 aa, Homo sapiens; identical to SEQ ID NO: 520

SEQ ID NO: 5500 - DNA, 5119 bp, Homo sapiens
ggagctgatgtgtactgtgtgcgccggggaggcgccggcttgtactcggcagcgcgggaataaagtttgctgatttggtgtctagcctggatgcctgggttgcaggccctgcttgtggtggcgctccacagtcatccggctgaagaagacctgttggactggatcttctcgggttttctttcagatattgttttgtatttacccatgaagacattgttttttggactctgcaaataggacatttcaaagatgagtgaaaaaaaattggaaacaactgcacagcagcggaaatgtcctgaatggatgaatgtgcagaataaaagatgtgctgtagaagaaagaaaggcatgtgttcggaagagtgtttttgaagatgacctccccttcttagaattcactggatccattgtgtatagttacgatgctagtgattgctctttcctgtcagaagatattagcatgagtctatcagatggggatgtggtgggatttgacatggagtggccaccattatacaatagagggaaacttggcaaagttgcactaattcagttgtgtgtttctgagagcaaatgttacttgttccacgtttcttccatgtcagtttttccccagggattaaaaatgttgcttgaaaataaagcagttaaaaaggcaggtgtaggaattgaaggagatcagtggaaacttctacgtgactttgatatcaaattgaagaattttgtggagttgacagatgttgccaataaaaagctgaaatgcacagagacctggagccttaacagtctggttaaacacctcttaggtaaacagctcctgaaagacaagtctatccgctgtagcaattggagtaaatttcctctcactgaggaccagaaactgtatgcagccactgatgcttatgctggttttattatttaccgaaatttagagattttggatgatactgtgcaaaggtttgctataaataaagaggaagaaatcctacttagcgacatgaacaaacagttgacttcaatctctgaggaagtgatggatctggctaagcatcttcctcatgctttcagtaaattggaaaacccacggagggtttctatcttactaaaggatatttcagaaaatctatattcactgaggaggatgataattgggtctactaacattgagactgaactgaggcccagcaataatttaaacttattatcctttgaagattcaactactgggggagtacaacagaaacaaattagagaacatgaagttttaattcacgttgaagatgaaacatgggacccaacacttgatcatttagctaaacatgatggagaagatgtacttggaaataaagtggaacgaaaagaagatggatttgaagatggagtagaagacaacaaattgaaagagaatatggaaagagcttgtttgatgtcgttagatattacagaacatgaactccaaattttggaacagcagtctcaggaagaatatcttagtgatattgcttataaatctactgagcatttatctcccaatgataatgaaaacgatacgtcctatgtaattgagagtgatgaagatttagaaatggagatgcttaagcatttatctcccaatgataatgaaaacgatacgtcctatgtaattgagagtgatgaagatttagaaatggagatgcttaagtctttagaaaacctcaatagtggcacggtagaaccaactcattctaaatgcttaaaaatggaaagaaatctggcacccaatgaagagcaagttacttgcctcaagatgtactttggccattccagttttaaaccagttcagtggaaagtgattcattcagtattagaagaaagaagagataatgttgctgtcatggcaactggatatggaaagagtttgtgcttccagtatccacctgtttatgtaggcaagattggccttgttatctctccccttatttctctgatggaagaccaagtgctacagcttaaaatgtccaacatcccagcttgcttccttggatcagcacagtcagaaaatgttctaacagatattaaattaggtaaataccggattgtatacgtaactccagaatactgttcaggtaacatgggcctgctccagcaacttgaggctgatattggtatcacgctcattgctgtggatgaggctcactgtatttctgagtgggggcatgattttagggattcattcaggaagttgggctccctaaagacagcactgccaatggttccaatcgttgcacttactgctactgcaagttcttcaatccgggaagacattgtacgttgcttaaatctgagaaatcctcagatcacctgtactggttttgatcgaccaaacctgtatttagaagttaggcgaaaaacagggaatatccttcaggatctgcagccatttcttgtcaaaacaagttcccactgggaatttgaaggtccaacaatcatctactgtccttctagaaaaatgacacaacaagttacaggtgaacttaggaaactgaatctatcctgtggaacataccatgcgggcatgagttttagcacaaggaaagacattcatcataggtttgtaagagatgaaattcagtgtgtcatagctaccatagcttttggaatgggcattaataaagctgacattcgccaagtcattcattacggtgctcctaaggacatggaatcatattatcaggagattggtagagctggtcgtgatggacttcaaagttcttgtcacgtcctctgggctcctgcagacattaacttaaataggcaccttcttactgagatacgtaatgagaagtttcgattatacaaattaaagatgatggcaaagatggaaaaatatcttcattctagcagatgtaggagacaaatcatcttgtctcattttgaggacaaacaagtacaaaaagcctccttgggaattatgggaactgaaaaatgctgtgataattgcaggtccagattggatcattgctattccatggatgactcagaggatacatcctgggactttggtccacaagcatttaagcttttgtctgctgtggacatcttaggcgaaaaatttggaattgggcttccaattttatttctccgaggatctaattctcagcgtcttgccgatcaatatcgcaggcacagtttatttggcactggcaaggatcaaacagagagttggtggaaggctttttcccgtcagctgatcactgagggattcttggtagaagtttctcggtataacaaatttatgaagatttgcgcccttacgaaaaagggtagaaattggcttcataaagctaatacagaatctcagagcctcatccttcaagctaatgaagaattgtgtccaaagaagttgcttctgcctagttcgaaaactgtatcttcgggcaccaaagagcattgttataatcaagtaccagttgaattaagtacagagaagaagtctaacttggagaagttatattcttataaaccatgtgataagatttcttctgggagtaacatttctaaaaaaagtatcatggtacagtcaccagaaaaagcttacagttcctcacagcctgttatttcggcacaagagcaggagactcagattgtgttatatggcaaattggtagaagctaggcagaaacatgccaataaaatggatgttcccccagctattctggcaacaaacaagatactggtggatatggccaaaatgagaccaactacggttgaaaacgtaaaaaggattgatggtgtttctgaaggcaaagctgccatgttggcccctctgttggaagtcatcaaacatttctgccaaacaaatagtgttcagacagacctcttttcaagtacaaaacctcaagaagaacagaagacgagtctggtagcaaaaaataaaatatgcacactttcacagtctatggccatcacatactctttattccaagaaaagaagatgcctttgaagagcatagctgagagcaggattctgcctctcatgacaattggcatgcacttatcccaagcggtgaaagctggctgcccccttgatttggagcgagcaggcctgactccagaggttcagaagattattgctgatgttatccgaaaccctcccgtcaactcagatatgagtaaaattagcctaatcagaatgttagttcctgaaaacattgacacgtaccttatccacatggcaattgagatccttaaacatggtcctgacagcggacttcaaccttcatgtgatgtcaacaaaaggagatgttttcccggttctgaagagatctgttcaagttctaagagaagcaaggaagaagtaggcatcaatactgagacttcatctgcagagagaaagagacgattacctgtgtggtttgccaaaggaagtgataccagcaagaaattaatggacaaaacgaaaaggggaggtctttttagttaagctggcaattaccagaacaattatgtttcttgctgtattataagaggatagctatattttatttctgaagagtaaggagtagtattttggcttaaaaatcattctaattacaaagttcactgtttattgaagaactggcatcttaaatcagccttccgcaattcatgtagtttctgggtcttctgggagcctacgtgagtacatcacctaacagaatattaaattagacttcctgtaagattgctttaagaaactgttactgtcctgttttctaatctctttattaaaacagtgtatttggaaaatgttatgtgctctgatttgatatagataacagattagtagttacatggtaattatgtgatataaaatattcatatattatcaaaattctgttttgtaaatgtaagaaagcatagttattttacaaattgtttttactgtcttttgaagaagttcttaaatacgttgttaaatggtattagttgaccagggcagtgaaaatgaaaccgcattttgggtgccattaaatagggaaaaaacatgtaaaaaatgtaaaatggagaccaattgcactaggcaagtgtatattttgtattttatatacaatttctattatttttcaagtaataaaacaatgtttttcatactgaatatt

SEQ ID NO: 5501 - protein, 1403 aa, Homo sapiens
MSEKKLETTAQQRKCPEWMNVQNKRCAVEERKACVRKSVFEDDLPFLEFTGSIVYSYDASDCSFLSEDISMSLSDGDVVGFDMEWPPLYNRGKLGKVALIQLCVSESKCYLFHVSSMSVFPQGLKMLLENKAVKKAGVGIEGDQWKLLRDFDIKLKNFVELTDVANKKLKCTETWSLNSLVKHLLGKQLLKDKSIRCSNWSKFPLTEDQKLYAATDAYAGFIIYRNLEILDDTVQRFAINKEEEILLSDMNKQLTSISEEVMDLAKHLPHAFSKLENPRRVSILLKDISENLYSLRRMIIGSTNIETELRPSNNLNLLSFEDSTTGGVQQKQIREHEVLIHVEDETWDPTLDHLAKHDGEDVLGNKVERKEDGFEDGVEDNKLKENMERACLMSLDITEHELQILEQQSQEEYLSDIAYKSTEHLSPNDNENDTSYVIESDEDLEMEMLKHLSPNDNENDTSYVIESDEDLEMEMLKSLENLNSGTVEPTHSKCLKMERNLAPNEEQVTCLKMYFGHSSFKPVQWKVIHSVLEERRDNVAVMATGYGKSLCFQYPPVYVGKIGLVISPLISLMEDQVLQLKMSNIPACFLGSAQSENVLTDIKLGKYRIVYVTPEYCSGNMGLLQQLEADIGITLIAVDEAHCISEWGHDFRDSFRKLGSLKTALPMVPIVALTATASSSIREDIVRCLNLRNPQITCTGFDRPNLYLEVRRKTGNILQDLQPFLVKTSSHWEFEGPTIIYCPSRKMTQQVTGELRKLNLSCGTYHAGMSFSTRKDIHHRFVRDEIQCVIATIAFGMGINKADIRQVIHYGAPKDMESYYQEIGRAGRDGLQSSCHVLWAPADINLNRHLLTEIRNEKFRLYKLKMMAKMEKYLHSSRCRRQIILSHFEDKQVQKASLGIMGTEKCCDNCRSRLDHCYSMDDSEDTSWDFGPQAFKLLSAVDILGEKFGIGLPILFLRGSNSQRLADQYRRHSLFGTGKDQTESWWKAFSRQLITEGFLVEVSRYNKFMKICALTKKGRNWLHKANTESQSLILQANEELCPKKLLLPSSKTVSSGTKEHCYNQVPVELSTEKKSNLEKLYSYKPCDKISSGSNISKKSIMVQSPEKAYSSSQPVISAQEQETQIVLYGKLVEARQKHANKMDVPPAILATNKILVDMAKMRPTTVENVKRIDGVSEGKAAMLAPLLEVIKHFCQTNSVQTDLFSSTKPQEEQKTSLVAKNKICTLSQSMAITYSLFQEKKMPLKSIAESRILPLMTIGMHLSQAVKAGCPLDLERAGLTPEVQKIIADVIRNPPVNSDMSKISLIRMLVPENIDTYLIHMAIEILKHGPDSGLQPSCDVNKRRCFPGSEEICSSSKRSKEEVGINTETSSAERKRRLPVWFAKGSDTSKKLMDKTKRGGLFS

SEQ ID NO: 5502 - DNA, 6163 bp, Homo sapiens
ggagctgatgtgtactgtgtgcgccggggaggcgccggcttgtactcggcagcgcgggaataaagtttgctgatttggtgtctagcctggatgcctgggttgcaggccctgcttgtggtggcgctccacagtcatccggctgaagaagacctgttggactggatcttctcgggttttctttcagatattgttttgtatttacccatgaagacattgttttttggactctgcaaataggacatttcaaagatgagtgaaaaaaaattggaaacaactgcacagcagcggaaatgtcctgaatggatgaatgtgcagaataaaagatgtgctgtagaagaaagaaaggcatgtgttcggaagagtgtttttgaagatgacctccccttcttagaattcactggatccattgtgtatagttacgatgctagtgattgctctttcctgtcagaagatattagcatgagtctatcagatggggatgtggtgggatttgacatggagtggccaccattatacaatagagggaaacttggcaaagttgcactaattcagttgtgtgtttctgagagcaaatgttacttgttccacgtttcttccatgtcagtttttccccagggattaaaaatgttgcttgaaaataaagcagttaaaaaggcaggtgtaggaattgaaggagatcagtggaaacttctacgtgactttgatatcaaattgaagaattttgtggagttgacagatgttgccaataaaaagctgaaatgcacagagacctggagccttaacagtctggttaaacacctcttaggtaaacagctcctgaaagacaagtctatccgctgtagcaattggagtaaatttcctctcactgaggaccagaaactgtatgcagccactgatgcttatgctggttttattatttaccgaaatttagagattttggatgatactgtgcaaaggtttgctataaataaagaggaagaaatcctacttagcgacatgaacaaacagttgacttcaatctctgaggaagtgatggatctggctaagcatcttcctcatgctttcagtaaattggaaaacccacggagggtttctatcttactaaaggatatttcagaaaatctatattcactgaggaggatgataattgggtctactaacattgagactgaactgaggcccagcaataatttaaacttattatcctttgaagattcaactactgggggagtacaacagaaacaaattagagaacatgaagttttaattcacgttgaagatgaaacatgggacccaacacttgatcatttagctaaacatgatggagaagatgtacttggaaataaagtggaacgaaaagaagatggatttgaagatggagtagaagacaacaaattgaaagagaatatggaaagagcttgtttgatgtcgttagatattacagaacatgaactccaaattttggaacagcagtctcaggaagaatatcttagtgatattgcttataaatctactgagcatttatctcccaatgataatgaaaacgatacgtcctatgtaattgagagtgatgaagatttagaaatggagatgcttaagcatttatctcccaatgataatgaaaacgatacgtcctatgtaattgagagtgatgaagatttagaaatggagatgcttaagtctttagaaaacctcaatagtggcacggtagaaccaactcattctaaatgcttaaaaatggaaagaaatctggcacccaatgaagagcaagttacttgcctcaagatgtactttggccattccagttttaaaccagttcagtggaaagtgattcattcagtattagaagaaagaagagataatgttgctgtcatggcaactggatatggaaagagtttgtgcttccagtatccacctgtttatgtaggcaagattggccttgttatctctccccttatttctctgatggaagaccaagtgctacagcttaaaatgtccaacatcccagcttgcttccttggatcagcacagtcagaaaatgttctaacagatattaaattaggtaaataccggattgtatacgtaactccagaatactgttcaggtaacatgggcctgctccagcaacttgaggctgatattggtatcacgctcattgctgtggatgaggctcactgtatttctgagtgggggcatgattttagggattcattcaggaagttgggctccctaaagacagcactgccaatggttccaatcgttgcacttactgctactgcaagttcttcaatccgggaagacattgtacgttgcttaaatctgagaaatcctcagatcacctgtactggttttgatcgaccaaacctgtatttagaagttaggcgaaaaacagggaatatccttcaggatctgcagccatttcttgtcaaaacaagttcccactgggaatttgaaggtccaacaatcatctactgtccttctagaaaaatgacacaacaagttacaggtgaacttaggaaactgaatctatcctgtggaacataccatgcgggcatgagttttagcacaaggaaagacattcatcataggtttgtaagagatgaaattcagtgtgtcatagctaccatagcttttggaatgggcattaataaagctgacattcgccaagtcattcattacggtgctcctaaggacatggaatcatattatcaggagattggtagagctggtcgtgatggacttcaaagttcttgtcacgtcctctgggctcctgcagacattaacttaaataggcaccttcttactgagatacgtaatgagaagtttcgattatacaaattaaagatgatggcaaagatggaaaaatatcttcattctagcagatgtaggagacaaatcatcttgtctcattttgaggacaaacaagtacaaaaagcctccttgggaattatgggaactgaaaaatgctgtgataattgcaggtccagattggatcattgctattccatggatgactcagaggatacatcctgggactttggtccacaagcatttaagcttttgtctgctgtggacatcttaggcgaaaaatttggaattgggcttccaattttatttctccgaggatctaattctcagcgtcttgccgatcaatatcgcaggcacagtttatttggcactggcaaggatcaaacagagagttggtggaaggctttttcccgtcagctgatcactgagggattcttggtagaagtttctcggtataacaaatttatgaagatttgcgcccttacgaaaaagggtagaaattggcttcataaagctaatacagaatctcagagcctcatccttcaagctaatgaagaattgtgtccaaagaagttgcttctgcctagttcgaaaactgtatcttcgggcaccaaagagcattgttataatcaagtaccagttgaattaagtacagagaagaagtctaacttggagaagttatattcttataaaccatgtgataagatttcttctgggagtaacatttctaaaaaaagtatcatggtacagtcaccagaaaaagcttacagttcctcacagcctgttatttcggcacaagagcaggagactcagattgtgttatatggcaaattggtagaagctaggcagaaacatgccaataaaatggatgttcccccagctattctggcaacaaacaagatactggtggatatggccaaaatgagaccaactacggttgaaaacgtaaaaaggattgatggtgtttctgaaggcaaagctgccatgttggcccctctgttggaagtcatcaaacatttctgccaaacaaatagtgttcagacagacctcttttcaagtacaaaacctcaagaagaacagaagacgagtctggtagcaaaaaataaaatatgcacactttcacagtctatggccatcacatactctttattccaagaaaagaagatgcctttgaagagcatagctgagagcaggattctgcctctcatgacaattggcatgcacttatcccaagcggtgaaagctggctgcccccttgatttggagcgagcaggcctgactccagaggttcagaagattattgctgatgttatccgaaaccctcccgtcaactcagatatgagtaaaattagcctaatcagaatgttagttcctgaaaacattgacacgtaccttatccacatggcaattgagatccttaaacatggtcctgacagcggacttcaaccttcatgtgatgtcaacaaaaggagatgttttcccggttctgaagagatctgttcaagttctaagagaagcaaggaagaagtaggcatcaatactgagacttcatctgcagagagaaagagacgattacctgtgtggtttgccaaaggaagtgataccagcaagaaattaatggacaaaacgaaaaggggaggtctttttagttaagctggcaattaccagaacaattatgtttcttgctgtattataagaggatagctatattttatttctgaagagtaaggagtagtattttggcttaaaaatcattctaattacaaagttcactgtttattgaagaactggcatcttaaatcagccttccgcaattcatgtagtttctgggtcttctgggagcctacgtgagtacatcacctaacagaatattaaattagacttcctgtaagattgctttaagaaactgttactgtcctgttttctaatctctttattaaaacagtgtatttggaaaatgttatgtgctctgatttgatatagataacagattagtagttacatggtaattatgtgatataaaatattcatatattatcaaaattctgttttgtaaatgtaagaaagcatagttattttacaaattgtttttactgtcttttgaagaagttcttaaatacgttgttaaatggtattagttgaccagggcagtgaaaatgaaaccgcattttgggtgccattaaatagggaaaaaacatgtaaaaaatgtaaaatggagaccaattgcactaggcaagtgtatattttgtattttatatacaatttctattatttttcaagtaataaaacaatgtttttcatactgaatattatatatatattttttagctttcatttacttaattattttaagtacctttatttttccaggatgtcagaatttgattctaatctctcttatgtagcacatgtgacttaatttaaaacctatactgtgacacagagttgggtaaacgatgattatttaactttaagcagttcaccatccatttcaaagcctttgattggcttttttgtaaataaaaataacttgttaagaaacaaatatatctgtcatagaagaactagaaaatccagggaagtgagaaaaatgaaaataaaaatcattcatagttttactagtagctaatcacagtcaacctcttttgtgtatcccaccagacttttttatattcatttgtttttagttaaaatataaaagtctcgtatattcccatttttctgcattgcattaccagaaggtagtggcgcctattaaatatgtgatatgttgttgtccagccatggcttctgcatttgcatgcttttgtgtgtgcatctgcaataccctgtgaatatcctgtgtgatggagtggcaagtacgcacagacacgtctgctgcatgcctaggtacgaggctgtctccaggagaagcacttgtttgattatttgagttgccaattgaatttgctgctttttttcatggcttgccattttcactgaaaagaatgactaatgaaaaacgatgattggttattagatttggatgtttggcagacattttctcaaaattgaactaagttggcctcttcacggaaaacaactggtatttgttgtgccaatgataaaattggagatttctagcaaaatgtataattttggaaaagttgtgttcctccactggaagcttgacagctttccttaacataaagacttctctttctcttcgctttcactactactactactaattcttcttctgattcttcttcttctccttcttccttcttccttccttcctcctcctcctccttcttcttcctcttcctcttcttctttctctctttccttccttcccttcccttccccttccttc

SEQ ID NO: 5503 - protein, 1403 aa, Homo sapiens; identical to SEQ ID NO: 5501

SEQ ID NO: 5504 - DNA, 3592 bp, Homo sapiens
gtagtatggcttgcacatctgccagctttcgacaaaattgtaggccctgttaataatagtccttttgtgtttggtgaaaaagatacgacactgtcagtggttttgcttttaagatttcttttaaactttcagtctttagaaaacctcaatagtggcacggtagaaccaactcattctaaatgcttaaaaatggaaagaaatctgggtcttcctactaaagaagaagaagaagatgatgaaaatgaagctaatgaaggggaagaagatgatgataaggactttttgtggccagcacccaatgaagagcaagttacttgcctcaagatgtactttggccattccagttttaaaccgatatggaaagagtttgtgcttccagtatccacctgtttatgtaggcaagattggccttgttatctctccccttatttctctgatggaagaccaagtgctacagcttaaaatgtccaacatcccagcttgcttccttggatcagcacagtcagaaaatgttctaacagatattaaattaggtaaataccggattgtatacgtaactccagaatactgttcaggtaacatgggcctgctccagcaacttgaggctgatattggtatcacgctcattgctgtggatgaggctcactgtatttctgagtgggggcatgattttagggattcattcaggaagttgggctccctaaagacagcactgccaatggttccaatcgttgcacttactgctactgcaagttcttcaatccgggaagacattgtacgttgcttaaatctgagaaatcctcagatcacctgtactggttttgatcgaccaaacctgtatttagaagttaggcgaaaaacagggaatatccttcaggatctgcagccatttcttgtcaaaacaagttcccactgggaatttgaaggtccaacaatcatctactgtccttctagaaaaatgacacaacaagttacaggtgaacttaggaaactgaatctatcctgtggaacataccatgcgggcatgagttttagcacaaggaaagacattcatcataggtttgtaagagatgaaattcagtgtgtcatagctaccatagcttttggaatgggcattaataaagctgacattcgccaagtcattcattacggtgctcctaaggacatggaatcatattatcaggagattggtagagctggtcgtgatggacttcaaagttcttgtcacgtcctctgggctcctgcagacattaacttaaataggcaccttcttactgagatacgtaatgagaagtttcgattatacaaattaaagatgatggcaaagatggaaaaatatcttcattctagcagatgtaggagacaaatcatcttgtctcattttgaggacaaacaagtacaaaaagcctccttgggaattatgggaactgaaaaatgctgtgataattgcaggtccagattggatcattgctattccatggatgactcagaggatacatcctgggactttggtccacaagcatttaagcttttgtctgctgtggacatcttaggcgaaaaatttggaattgggcttccaattttatttctccgaggatctaattctcagcgtcttgccgatcaatatcgcaggcacagtttatttggcactggcaaggatcaaacagagagttggtggaaggctttttcccgtcagctgatcactgagggattcttggtagaagtttctcggtataacaaatttatgaagatttgcgcccttacgaaaaagggtagaaattggcttcataaagctaatacagaatctcagagcctcatccttcaagctaatgaagaattgtgtccaaagaagttgcttctgcctagttcgaaaactgtatcttcgggcaccaaagagcattgttataatcaagtaccagttgaattaagtacagagaagaagtctaacttggagaagttatattcttataaaccatgtgataagatttcttctgggagtaacatttctaaaaaaagtatcatggtacagtcaccagaaaaagcttacagttcctcacagcctgttatttcggcacaagagcaggagactcagattgtgttatatggcaaattggtagaagctaggcagaaacatgccaataaaatggatgttcccccagctattctggcaacaaacaagatactggtggatatggccaaaatgagaccaactacggttgaaaacgtaaaaaggattgatggtgtttctgaaggcaaagctgccatgttggcccctctgttggaagtcatcaaacatttctgccaaacaaatagtgttcagacagacctcttttcaagtacaaaacctcaagaagaacagaagacgagtctggtagcaaaaaataaaatatgcacactttcacagtctatggccatcacatactctttattccaagaaaagaagatgcctttgaagagcatagctgagagcaggattctgcctctcatgacaattggcatgcacttatcccaagcggtgaaagctggctgcccccttgatttggagcgagcaggcctgactccagaggttcagaagattattgctgatgttatccgaaaccctcccgtcaactcagatatgagtaaaattagcctaatcagaatgttagttcctgaaaacattgacacgtaccttatccacatggcaattgagatccttaaacatggtcctgacagcggacttcaaccttcatgtgatgtcaacaaaaggagatgttttcccggttctgaagagatctgttcaagttctaagagaagcaaggaagaagtaggcatcaatactgagacttcatctgcagagagaaagagacgattacctgtgtggtttgccaaaggaagtgataccagcaagaaattaatggacaaaacgaaaaggggaggtctttttagttaagctggcaattaccagaacaattatgtttcttgctgtattataagaggatagctatattttatttctgaagagtaaggagtagtattttggcttaaaaatcattctaattacaaagttcactgtttattgaagaactggcatcttaaatcagccttccgcaattcatgtagtttctgggtcttctgggagcctacgtgagtacatcacctaacagaatattaaattagacttcctgtaagattgctttaagaaactgttactgtcctgttttctaatctctttattaaaacagtgtatttggaaaatgttatgtgctctgatttgatatagataacagattagtagttacatggtaattatgtgatataaaatattcatatattatcaaaattctgttttgtaaatgtaagaaagcatagttattttacaaattgtttttactgtcttttgaagaagttcttaaatacgttgttaaatggtattagttgaccagggcagtgaaaatgaaaccgcattttgggtgccattaaatagggaaaaaacatgtaaaaaatgtaaaatggagaccaattgcactaggcaagtgtatattttgtattttatatacaatttctattatttttcaagtaataaaacaatgtttttcatactgaatattat

SEQ ID NO: 5505 - protein, 899 aa, Homo sapiens
MMKMKLMKGKKMMIRTFCGQHPMKSKLLASRCTLAIPVLNRYGKSLCFQYPPVYVGKIGLVISPLISLMEDQVLQLKMSNIPACFLGSAQSENVLTDIKLGKYRIVYVTPEYCSGNMGLLQQLEADIGITLIAVDEAHCISEWGHDFRDSFRKLGSLKTALPMVPIVALTATASSSIREDIVRCLNLRNPQITCTGFDRPNLYLEVRRKTGNILQDLQPFLVKTSSHWEFEGPTIIYCPSRKMTQQVTGELRKLNLSCGTYHAGMSFSTRKDIHHRFVRDEIQCVIATIAFGMGINKADIRQVIHYGAPKDMESYYQEIGRAGRDGLQSSCHVLWAPADINLNRHLLTEIRNEKFRLYKLKMMAKMEKYLHSSRCRRQIILSHFEDKQVQKASLGIMGTEKCCDNCRSRLDHCYSMDDSEDTSWDFGPQAFKLLSAVDILGEKFGIGLPILFLRGSNSQRLADQYRRHSLFGTGKDQTESWWKAFSRQLITEGFLVEVSRYNKFMKICALTKKGRNWLHKANTESQSLILQANEELCPKKLLLPSSKTVSSGTKEHCYNQVPVELSTEKKSNLEKLYSYKPCDKISSGSNISKKSIMVQSPEKAYSSSQPVISAQEQETQIVLYGKLVEARQKHANKMDVPPAILATNKILVDMAKMRPTTVENVKRIDGVSEGKAAMLAPLLEVIKHFCQTNSVQTDLFSSTKPQEEQKTSLVAKNKICTLSQSMAITYSLFQEKKMPLKSIAESRILPLMTIGMHLSQAVKAGCPLDLERAGLTPEVQKIIADVIRNPPVNSDMSKISLIRMLVPENIDTYLIHMAIEILKHGPDSGLQPSCDVNKRRCFPGSEEICSSSKRSKEEVGINTETSSAERKRRLPVWFAKGSDTSKKLMDKTKRGGLFS

SEQ ID NO: 5506 - DNA, 2128 bp, Homo sapiens
gatgggctcctctcctgagtgggaaggcaaggaaataggggcttaccacccaaaagatgggaggcagaagatacccacctgagttgcccagagcccacagtgtttgctttctcaccactccggactccacctttgagctctttgcgagagatgtggatttccagctttgaacaatccaagaaagaagcccaggcactaagcttattggtatttggcaaacctggtatcctgcagccgagcatgaacatgaaatacattagaacttggcaatgagagatcccatctgttggtttccagggatgtaagtgagtaataaaagctgtttcaagtttatccactatccactcttcaagtgaaaagaacttatgtgtgtctaccttcttctccataccctgagccacctctctcactttctttagttgtgccttgccctatcgcctcccattttcccttcaaagtagaatgtcttgtaaagacacagtaactcctgtgtgttttgattagtgagatgttaccacttaccccttctgctgcgcagaataatattaagaattgctatgcttatgattcaggctggacagcctggacattttgagcagcgcgagagtagaagtgaatacccccaggaactccaattgtgctgaagctgatttgtctgttcgtaggatgatgtgcagcctgtcacagtggcagccacaggcattcagtttgtgggcatttcctgtcatttcggatcctgctatagggaaggttcagctctcctgtctggggcatctactggagcacctcagaagacaaggaggaaaacactggctcatgttttctttccatgtgagggaggggaggtttctagatgatactaaaagcctgttgccactgttgtgtcatgatttccattcttcatcatggaaagccacaagcctcagaaggcagccagaggacaggaagagtctgtgatgctcatgtctgtgtcatggcatgagggggaattgacgagtgcttgcttagcatcagctctcattgtattgaaggctgtgcccttggtgtgcttagcagtgagcagcgtcttcattaggtagctctggctgggctttgtcagccagcgtgtgagaaaggagaaccaaaaccaatacctccttatagaagccagaaggatcacattggatgagagaaggtgtctataactgggttcttcccaatcccagctctttcattaactaaatatgatcttggacatatctcttaacctccatcggccttagtttttgcatccaaaaagaagtgattgggctggtcttggaaggtttttttcttttttttcccctgtgtaacattcttcattgttcatcaacatttaagaaatttaattttgtagatgtttttactaaagagggtaacaaactattttggaactgctgtatgttattcaagggaagcacgctgtttggaggaaggagcatacttaatgggtagtattgaggatgaaagggaatttctctctctgccattttatttgataatattaaagaaataaagactggaaagggggattccttgttaaaggtcagattttaaattgcatataaaatgaagtgagttgtgtttttttgaaccctcaaaagaaagcctgagaggtgatttatgcctctggcaaggtattatcatgataacttcagttcttctccataaatgccttcagcaaatacccagtgcttatgtgctgtgtgtatgtcttaaaccttaactttcatgaaatctcattccatcttagttcttcatcaagtccatagataaaatcctctctaagcgtttctgaagtatgtatccctgaacaaatttagtgaaataaaatcattaatctgtgttgatcccattttgccatacctttcactttacctcactgtctccttttgtgaaatattttaagaaagcaacgtccctcacaggactgttttgaggaatgcctcatggctgtgaaggagtttgtacaatgcaacattttgcttagcccttcagtacattttacttggattgttttcaagaactttattttttttgagaagaagtcttgctctatcacctaggctggagtgcagtggtgcgatctcagctcactgcaacctccacc

SEQ ID NO: 5507 - protein, 40 aa, Homo sapiens
MWISSFEQSKKEAQALSLLVFGKPGILQPSMNMKYIRTWQ

SEQ ID NO: 5508 - DNA, 3892 bp, Homo sapiens
agaatttttttgattccttcttatttggagaaatctccagctgctctgatgatagcctaagaagactgcatgctgcttcctctcgatgccaagccagaccctctcacaacctcggatctcagtccttcatggagacctggtcccagcaggaatggcagtgcaggaaattggcgcccagatggttcttccatgtgaagttgtctcgggctctgggctgacgagagaacacctggtaaccaggtcatggttgagctggggaagtttgaaaggaaggagtttaaaagttccagtttgcaagatggacatacaaaaatggaggaagcacctacgcatcttaattcatttcttaagaaagaaggattgaccttcaacaggaaaagaaaatgggaattggacagctaccccattatgctctggtggtccccgctgacgggggagactgggaggttaggccaatgtggagcagatgcttgtttcttcaccatcaaccggacctacctccatcatcacatgaccaaagcattcctcttctatggtactgactttaacatagatagcttacctctgcctcggaaagcccatcatgactgggctgtttttcatgaagagtccccgaaaaacaattataagctctttcataaaccagtgatcaccttgttcaactacactgccacgttcagcaggcattcccacttgccactaactacccaatacttggagagcattgaagtcctgaagtcactccgatacctagttcctttgcagtccaaaaacaagcttagaaaaagacttgctccgctggtgtatgtacagtcagactgtgacccaccatcagacagggacagctatgttcgcgagctgatgacttacatcgaggtcgattcctatggtgaatgtttacgaaacaaagacctccctcagcagctgaaaaatccagcctctatggatgccgatggcttttataggatcattgcacagtataagtttatcctagcttttgagaatgcagtttgtgatgactacatcactgagaagttctggaggccactgaaactgggggtagtccctgtatattacggatcccccagcatcacagactggcttccaagtaacaaaagtgctattcttgtatcagaattttctcaccccagggaactggcaagttacatcagacgactggattctgatgacagattgtatgaggcctatgtagaatggaagctgaagggtgagatctctaaccagcgacttctgacagctctcagggaacggaaatggggagtgcaagacgtcaaccaggacaattacatcgatgcatttgagtgtatggtgtgcaccaaggtgtgggctaatatcaggcttcaggaaaagggcttaccacccaaaagatgggaggcagaagatacccacctgagttgcccagagcccacagtgtttgctttctcaccactccggactccacctttgagctctttgcgagagatgtggatttccagctttgaacaatccaagaaagaagcccaggcactaaggtggctggttgataggaatcaaaacttttcatctcaagagttttggggcctagtattcaaggactgatttcaaaaatgatcagaatgaaacagactagagccttcttgaggtttattttctaggttgccttaatatttgaacataatagctattctgttgactatccatcaggataataattagttgctgcagtactcataatgagccctttcaaggaatagatgtaaattacccttaggggtagccactatattttttatactaaaaaaggaaatatttcttatggacactggttatcttccatgtccgtgtctgtggacccacatacttactgccttttgtggaaattcacctagagtgagtactttccttgtgcaatggagggagacgatctagctatagattcttgatactcacctcactctcaacagcttattggtatttggcaaacctggtatcctgcagccgagcatgaacatgaaatacattagaacttggcaatgagagatcccatctgttggtttccagggatgtaagtgagtaataaaagctgtttcaagtttatccactatccactcttcaagtgaaaagaacttatgtgtgtctaccttcttctccataccctgagccacctctctcactttctttagttgtgccttgccctatcgcctcccattttcccttcaaagtagaatgtcttgtaaagacacagtaactcctgtgtgttttgattagtgagatgttaccacttaccccttctgctgcgcagaataatattaagaattgctatgcttatgattcaggctggacagcctggacattttgagcagcgcgagagtagaagtgaatacccccaggaactccaattgtgctgaagctgatttgtctgttcgtaggatgatgtgcagcctgtcacagtggcagccacaggcattcagtttgtgggcatttcctgtcatttcggatcctgctatagggaaggttcagctctcctgtctggggcatctactggagcacctcagaagacaaggaggaaaacactggctcatgttttctttccatgtgagggaggggaggtttctagatgatactaaaagcctgttgccactgttgtgtcatgatttccattcttcatcatggaaagccacaagcctcagaaggcagccagaggacaggaagagtctgtgatgctcatgtctgtgtcatggcatgagggggaattgacgagtgcttgcttagcatcagctctcattgtattgaaggctgtgcccttggtgtgcttagcagtgagcagcgtcttcattaggtagctctggctgggctttgtcagccagcgtgtgagaaaggagaaccaaaaccaatacctccttatagaagccagaaggatcacattggatgagagaaggtgtctataactgggttcttcccaatcccagctctttcattaactaaatatgatcttggacatatctcttaacctccatcggccttagtttttgcatccaaaaagaagtgattgggctggtcttggaaggtttttttcttttttttcccctgtgtaacattcttcattgttcatcaacatttaagaaatttaattttgtagatgtttttactaaagagggtaacaaactattttggaactgctgtatgttattcaagggaagcacgctgtttggaggaaggagcatacttaatgggtagtattgaggatgaaagggaatttctctctctgccattttatttgataatattaaagaaataaagactggaaagggggattccttgttaaaggtcagattttaaattgcatataaaatgaagtgagttgtgtttttttgaaccctcaaaagaaagcctgagaggtgatttatgcctctggcaaggtattatcatgataacttcagttcttctccataaatgccttcagcaaatacccagtgcttatgtgctgtgtgtatgtcttaaaccttaactttcatgaaatctcattccatcttagttcttcatcaagtccatagataaaatcctctctaagcgtttctgaagtatgtatccctgaacaaatttagtgaaataaaatcattaatctgtgttgatcccattttgccatacctttcactttacctcactgtctccttttgtgaaatattttaagaaagcaacgtccctcacaggactgttttgaggaatgcctcatggctgtgaaggagtttgtacaatgcaacattttgcttagcccttcagtacattttacttggattgttttcaagaactttattttttttgagaagaagtcttgctctatcacctaggctggagtgcagtggtgcgatctcagctcactgcaacctccacc

SEQ ID NO: 5509 - protein, 451 aa, Homo sapiens
MVELGKFERKEFKSSSLQDGHTKMEEAPTHLNSFLKKEGLTFNRKRKWELDSYPIMLWWSPLTGETGRLGQCGADACFFTINRTYLHHHMTKAFLFYGTDFNIDSLPLPRKAHHDWAVFHEESPKNNYKLFHKPVITLFNYTATFSRHSHLPLTTQYLESIEVLKSLRYLVPLQSKNKLRKRLAPLVYVQSDCDPPSDRDSYVRELMTYIEVDSYGECLRNKDLPQQLKNPASMDADGFYRIIAQYKFILAFENAVCDDYITEKFWRPLKLGVVPVYYGSPSITDWLPSNKSAILVSEFSHPRELASYIRRLDSDDRLYEAYVEWKLKGEISNQRLLTALRERKWGVQDVNQDNYIDAFECMVCTKVWANIRLQEKGLPPKRWEAEDTHLSCPEPTVFAFSPLRTPPLSSLREMWISSFEQSKKEAQALRWLVDRNQNFSSQEFWGLVFKD

SEQ ID NO: 5510 - DNA, 4357 bp, Homo sapiens
cctagtccagttggagaagcggagagtttcccctgtcttaaagaagagggcccccgcagccttcccgagaactttccatagggccgtggcctcaggcggactgcgaaccaagatcatcagcagggggcggcccggtgttcttagaacccgggtcccaagagcttgtgaacagggcacgagtgaaaacccggatccaggctggctccgccggaacgcgccccgagctcgcccgcgcggccgcctcttccgctcctgatcggctcttcgggtcttcccggcgcccaggcttgggctcatagggagaaaggaagctgcgctgcattctgcgggacgaaccctgctccgcgcgagaatttttttgattccttcttatttggagaaatctccagctgctctgatgatagcctaagaagactgcatgctgcttcctctcgatgccaagccagaccctctcacaacctcggatctcagtccttcatggagacctggtcccagcaggaatggcagtgcaggaaattggcgcccagatggttcttccatgtgaagttgtctcgggctctgggctgacgagagaacacctggtaaccaggttagccctctgtcagtcacccagggcagggcagcatggtgcggattcagaggaggaagcttttggcatcttgcctgtgcgtcacagccaccgtctttctgcttgtcacactccaggtcatggttgagctggggaagtttgaaaggaaggagtttaaaagttccagtttgcaagatggacatacaaaaatggaggaagcacctacgcatcttaattcatttcttaagaaagaaggattgaccttcaacaggaaaagaaaatgggaattggacagctaccccattatgctctggtggtccccgctgacgggggagactgggaggttaggccaatgtggagcagatgcttgtttcttcaccatcaaccggacctacctccatcatcacatgaccaaagcattcctcttctatggtactgactttaacatagatagcttacctctgcctcggaaagcccatcatgactgggctgtttttcatgaagagtccccgaaaaacaattataagctctttcataaaccagtgatcaccttgttcaactacactgccacgttcagcaggcattcccacttgccactaactacccaatacttggagagcattgaagtcctgaagtcactccgatacctagttcctttgcagtccaaaaacaagcttagaaaaagacttgctccgctggtgtatgtacagtcagactgtgacccaccatcagacagggacagctatgttcgcgagctgatgacttacatcgaggtcgattcctatggtgaatgtttacgaaacaaagacctccctcagcagctgaaaaatccagcctctatggatgccgatggcttttataggatcattgcacagtataagtttatcctagcttttgagaatgcagtttgtgatgactacatcactgagaagttctggaggccactgaaactgggggtagtccctgtatattacggatcccccagcatcacagactggcttccaagtaacaaaagtgctattcttgtatcagaattttctcaccccagggaactggcaagttacatcagacgactggattctgatgacagattgtatgaggcctatgtagaatggaagctgaagggtgagatctctaaccagcgacttctgacagctctcagggaacggaaatggggagtgcaagacgtcaaccaggacaattacatcgatgcatttgagtgtatggtgtgcaccaaggtgtgggctaatatcaggcttcaggaaaagggcttaccacccaaaagatgggaggcagaagatacccacctgagttgcccagagcccacagtgtttgctttctcaccactccggactccacctttgagctctttgcgagagatgtggatttccagctttgaacaatccaagaaagaagcccaggcactaaggtggctggttgataggaatcaaaacttttcatctcaagagttttggggcctagtattcaaggactgatttcaaaaatgatcagaatgaaacagactagagccttcttgaggtttattttctaggttgccttaatatttgaacataatagctattctgttgactatccatcaggataataattagttgctgcagtactcataatgagccctttcaaggaatagatgtaaattacccttaggggtagccactatattttttatactaaaaaaggaaatatttcttatggacactggttatcttccatgtccgtgtctgtggacccacatacttactgccttttgtggaaattcacctagagtgagtactttccttgtgcaatggagggagacgatctagctatagattcttgatactcacctcactctcaacagcttattggtatttggcaaacctggtatcctgcagccgagcatgaacatgaaatacattagaacttggcaatgagagatcccatctgttggtttccagggatgtaagtgagtaataaaagctgtttcaagtttatccactatccactcttcaagtgaaaagaacttatgtgtgtctaccttcttctccataccctgagccacctctctcactttctttagttgtgccttgccctatcgcctcccattttcccttcaaagtagaatgtcttgtaaagacacagtaactcctgtgtgttttgattagtgagatgttaccacttaccccttctgctgcgcagaataatattaagaattgctatgcttatgattcaggctggacagcctggacattttgagcagcgcgagagtagaagtgaatacccccaggaactccaattgtgctgaagctgatttgtctgttcgtaggatgatgtgcagcctgtcacagtggcagccacaggcattcagtttgtgggcatttcctgtcatttcggatcctgctatagggaaggttcagctctcctgtctggggcatctactggagcacctcagaagacaaggaggaaaacactggctcatgttttctttccatgtgagggaggggaggtttctagatgatactaaaagcctgttgccactgttgtgtcatgatttccattcttcatcatggaaagccacaagcctcagaaggcagccagaggacaggaagagtctgtgatgctcatgtctgtgtcatggcatgagggggaattgacgagtgcttgcttagcatcagctctcattgtattgaaggctgtgcccttggtgtgcttagcagtgagcagcgtcttcattaggtagctctggctgggctttgtcagccagcgtgtgagaaaggagaaccaaaaccaatacctccttatagaagccagaaggatcacattggatgagagaaggtgtctataactgggttcttcccaatcccagctctttcattaactaaatatgatcttggacatatctcttaacctccatcggccttagtttttgcatccaaaaagaagtgattgggctggtcttggaaggtttttttcttttttttcccctgtgtaacattcttcattgttcatcaacatttaagaaatttaattttgtagatgtttttactaaagagggtaacaaactattttggaactgctgtatgttattcaagggaagcacgctgtttggaggaaggagcatacttaatgggtagtattgaggatgaaagggaatttctctctctgccattttatttgataatattaaagaaataaagactggaaagggggattccttgttaaaggtcagattttaaattgcatataaaatgaagtgagttgtgtttttttgaaccctcaaaagaaagcctgagaggtgatttatgcctctggcaaggtattatcatgataacttcagttcttctccataaatgccttcagcaaatacccagtgcttatgtgctgtgtgtatgtcttaaaccttaactttcatgaaatctcattccatcttagttcttcatcaagtccatagataaaatcctctctaagcgtttctgaagtatgtatccctgaacaaatttagtgaaataaaatcattaatctgtgttgatcccattttgccatacctttcactttacctcactgtctccttttgtgaaatattttaagaaagcaacgtccctcacaggactgttttgaggaatgcctcatggctgtgaaggagtttgtacaatgcaacattttgcttagcccttcagtacattttacttggattgttttcaagaactttattttttttgagaagaagtcttgctctatcacctaggctggagtgcagtggtgcgatctcagctcactgcaacctccacc

SEQ ID NO: 5511 - protein, 479 aa, Homo sapiens; identical to SEQ ID NO: 522

SEQ ID NO: 5512 - DNA, 2561 bp, Homo sapiens
cctagtccagttggagaagcggagagtttcccctgtcttaaagaagagggcccccgcagccttcccgagaactttccatagggccgtggcctcaggcggactgcgaaccaagatcatcagcagggggcggcccggtgttcttagaacccgggtcccaagagcttgtgaacagggcacgagtgaaaacccggatccaggctggctccgccggaacgcgccccgagctcgcccgcgcggccgcctcttccgctcctgatcggctcttcgggtcttcccggcgcccaggcttgggctcatagggagaaaggaagctgcgctgcattctgcgggacgaaccctgctccgcgcgagaatttttttgattccttcttatttggagaaatctccagctgctctgatgatagcctaagaagactgcatgctgcttcctctcgatgccaagccagaccctctcacaacctcggatctcagtccttcatggagacctggtcccagcaggaatggcagtgcaggaaattggcgcccagatggttcttccatgtgaagttgtctcgggctctgggctgacgagagaacacctggtaaccaggttagccctctgtcagtcacccagggcagggcagcatggtgcggattcagaggaggaagcttttggcatcttgcctgtgcgtcacagccaccgtctttctgcttgtcacactccaggtcatggttgagctggggaagtttgaaaggaaggagtttaaaagttccagtttgcaagatggacatacaaaaatggaggaagcacctacgcatcttaattcatttcttaagaaagaaggattgaccttcaacaggaaaagaaaatgggaattggacagctaccccattatgctctggtggtccccgctgacgggggagactgggaggttaggccaatgtggagcagatgcttgtttcttcaccatcaaccggacctacctccatcatcacatgaccaaagcattcctcttctatggtactgactttaacatagatagcttacctctgcctcggaaagcccatcatgactgggctgtttttcatgaagagtccccgaaaaacaattataagctctttcataaaccagtgatcaccttgttcaactacactgccacgttcagcaggcattcccacttgccactaactacccaatacttggagagcattgaagtcctgaagtcactccgatacctagttcctttgcagtccaaaaacaagcttagaaaaagacttgctccgctggtgtatgtacagtcagactgtgacccaccatcagacagggacagctatgttcgcgagctgatgacttacatcgaggtcgattcctatggtgaatgtttacgaaacaaagacctccctcagcagctgaaaaatccagcctctatggatgccgatggcttttataggatcattgcacagtataagtttatcctagcttttgagaatgcagtttgtgatgactacatcactgagaagttctggaggccactgaaactgggggtagtccctgtatattacggatcccccagcatcacagactggcttccaagtaacaaaagtgctattcttgtatcagaattttctcaccccagggaactggcaagttacatcagacgactggattctgatgacagattgtatgaggcctatgtagaatggaagctgaagggtgagatctctaaccagcgacttctgacagctctcagggaacggaaatggggagtgcaagacgtcaaccaggacaattacatcgatgcatttgagtgtatggtgtgcaccaaggtgtgggctaatatcaggcttcaggaaaagggcttaccacccaaaagatgggaggcagaagatacccacctgagttgcccagagcccacagtgtttgctttctcaccactccggactccacctttgagctctttgcgagagatgtggatttccagctttgaacaatccaagaaagaagcccaggcactaaggtggctggttgataggaatcaaaacttttcatctcaagagttttggggcctagtattcaaggactgatttcaaaaatgatcagaatgaaacagactagagccttcttgaggtttattttctaggttgccttaatatttgaacataatagctattctgttgactatccatcaggataataattagttgctgcagtactcataatgagccctttcaaggaatagatgtaaattacccttaggggtagccactatattttttatactaaaaaaggaaatatttcttatggacactggttatcttccatgtccgtgtctgtggacccacatacttactgccttttgtggaaattcacctagagtgagtactttccttgtgcaatggagggagacgatctagctatagattcttgatactcacctcactctcaacagcttattggtatttggcaaacctggtatcctgcagccgagcatgaacatgaaatacattagaacttggcaatgagagatcccatctgttggtttccagggatgtaagtgagtaataaaagctgtttcaagttt

SEQ ID NO: 5513 - protein, 479 aa, Homo sapiens; identical to SEQ ID NO: 522

SEQ ID NO: 5514 - DNA, 2504 bp, Homo sapiens
cctagtccagttggagaagcggagagtttcccctgtcttaaagaagagggcccccgcagccttcccgagaactttccatagggccgtggcctcaggcggactgcgaaccaagatcatcagcagggggcggcccggtgttcttagaacccgggtcccaagagcttgtgaacagggcacgagtgaaaacccggatccaggctggctccgccggaacgcgccccgagctcgcccgcgcggccgcctcttccgctcctgatcggctcttcgggtcttcccggcgcccaggcttgggctcatagggagaaaggaagctgcgctgcattctgcgggacgaaccctgctccgcgcgagaatttttttgattccttcttatttggagaaatctccagctgctctgatgatagcctaagaagactgcatgctgcttcctctcgatgccaagccagaccctctcacaacctcggatctcagtccttcatggagacctggtcccagcaggaatggcagtgcaggaaattggcgcccagatggttcttccatgtgaagttgtctcgggctctgggctgacgagagaacacctggtaaccaggttagccctctgtcagtcacccagggcagggcagcatggtgcggattcagaggaggaagcttttggcatcttgcctgtgcgtcacagccaccgtctttctgcttgtcacactccaggtgaaactgaggtttagtgaatggacgtgtcaggcagaaacaaagtcattgaaatagaaggtcatggttgagctggggaagtttgaaaggaaggagtttaaaagttccagtttgcaagatggacatacaaaaatggaggaagcacctacgcatcttaattcatttcttaagaaagaaggattgaccttcaacaggaaaagaaaatgggaattggacagctaccccattatgctctggtggtccccgctgacgggggagactgggaggttaggccaatgtggagcagatgcttgtttcttcaccatcaaccggacctacctccatcatcacatgaccaaagcattcctcttctatggtactgactttaacatagatagcttacctctgcctcggaaagcccatcatgactgggctgtttttcatgaagagtccccgaaaaacaattataagctctttcataaaccagtgatcaccttgttcaactacactgccacgttcagcaggcattcccacttgccactaactacccaatacttggagagcattgaagtcctgaagtcactccgatacctagttcctttgcagtccaaaaacaagcttagaaaaagacttgctccgctggtgtatgtacagtcagactgtgacccaccatcagacagggacagctatgttcgcgagctgatgacttacatcgaggtcgattcctatggtgaatgtttacgaaacaaagacctccctcagcagctgaaaaatccagcctctatggatgccgatggcttttataggatcattgcacagtataagtttatcctagcttttgagaatgcagtttgtgatgactacatcactgagaagttctggaggccactgaaactgggggtagtccctgtatattacggatcccccagcatcacagactggcttccaagtaacaaaagtgctattcttgtatcagaattttctcaccccagggaactggcaagttacatcagacgactggattctgatgacagattgtatgaggcctatgtagaatggaagctgaagggtgagatctctaaccagcgacttctgacagctctcagggaacggaaatggggagtgcaagacgtcaaccaggacaattacatcgatgcatttgagtgtatggtgtgcaccaaggtgtgggctaatatcaggcttcaggaaaaggtaagcaaatcaaaggtgggcatagagccagcaggctggccatcttgatgttctctgctctcctgcatttccttctgttgttgccacctcatcagtgttcttcattcctatcagaaagaccgggctttgcaggaaggttgaatattccattactaccttttgggactgtcgtaaagtttacaagccctggacaggccttcattcctgaaagccttcattctcctttattgtttcttctgggggatcccgtgctgcaggtgctgggcagtgacacagaaaactgcagaaaaggggaagagtccctaacataaaaaattaagagttcttgccacacatgatggctcacgcctgtaattggagcactttgggaggttgaggtgggtggatcacttgagcccaggggttcgagaccagcctgggcaacatggcaaaaccccatctctactaaaaatataaaaattagcccggcatggtgacatgcacttgtaatcccagctactcgagaggctgaagtgggagaattgctggaatccaggatgcagaggttgcagtgagccgagatcatgccacaatactacagcctgggcgacagagcgagactctgtctc

SEQ ID NO: 5515 - protein, 391 aa, Homo sapiens
MVELGKFERKEFKSSSLQDGHTKMEEAPTHLNSFLKKEGLTFNRKRKWELDSYPIMLWWSPLTGETGRLGQCGADACFFTINRTYLHHHMTKAFLFYGTDFNIDSLPLPRKAHHDWAVFHEESPKNNYKLFHKPVITLFNYTATFSRHSHLPLTTQYLESIEVLKSLRYLVPLQSKNKLRKRLAPLVYVQSDCDPPSDRDSYVRELMTYIEVDSYGECLRNKDLPQQLKNPASMDADGFYRIIAQYKFILAFENAVCDDYITEKFWRPLKLGVVPVYYGSPSITDWLPSNKSAILVSEFSHPRELASYIRRLDSDDRLYEAYVEWKLKGEISNQRLLTALRERKWGVQDVNQDNYIDAFECMVCTKVWANIRLQEKVSKSKVGIEPAGWPS

SEQ ID NO: 5516 - DNA, 2482 bp, Homo sapiens
cctagtccagttggagaagcggagagtttcccctgtcttaaagaagagggcccccgcagccttcccgagaactttccatagggccgtggcctcaggcggactgcgaaccaagatcatcagcagggggcggcccggtgttcttagaacccgggtcccaagagcttgtgaacagggcacgagtgaaaacccggatccaggctggctccgccggaacgcgccccgagctcgcccgcgcggccgcctcttccgctcctgatcggctcttcgggtcttcccggcgcccaggcttgggctcatagggagaaaggaagctgcgctgcattctgcgggacgaaccctgctccgcgcgagaatttttttgattccttcttatttggagaaatctccagctgctctgatgatagcctaagaagactgcatgctgcttcctctcgatgccaagccagaccctctcacaacctcggatctcagtccttcatggagacctggtcccagcaggaatggcagtgcaggaaattggcgcccagatggttcttccatgtgaagttgtctcgggctctgggctgacgagagaacacctggtaaccaggttagccctctgtcagtcacccagggcagggcagcatggtgcggattcagaggaggaagcttttggcatcttgcctgtgcgtcacagccaccgtctttctgcttgtcacactccaggtcatggttgagctggggaagtttgaaaggaaggagtttaaaagttccagtttgcaagatggacatacaaaaatggaggaagcacctacgcatcttaattcatttcttaagaaagaaggattgaccttcaacaggaaaagaaaatgggaattggacagctaccccattatgctctggtggtccccgctgacgggggagactgggaggttaggccaatgtggagcagatgcttgtttcttcaccatcaaccggacctacctccatcatcacatgaccaaagcattcctcttctatggtcccaagaagaatcaccacctttggcagaaaatgatggtactgactttaacatagatagcttacctctgcctcggaaagcccatcatgactgggctgtttttcatgaagagtccccgaaaaacaattataagctctttcataaaccagtgatcaccttgttcaactacactgccacgttcagcaggcattcccacttgccactaactacccaatacttggagagcattgaagtcctgaagtcactccgatacctagttcctttgcagtccaaaaacaagcttagaaaaagacttgctccgctggtgtatgtacagtcagactgtgacccaccatcagacagggacagctatgttcgcgagctgatgacttacatcgaggtcgattcctatggtgaatgtttacgaaacaaagacctccctcagcagctgaaaaatccagcctctatggatgccgatggcttttataggatcattgcacagtataagtttatcctagcttttgagaatgcagtttgtgatgactacatcactgagaagttctggaggccactgaaactgggggtagtccctgtatattacggatcccccagcatcacagactggcttccaagtaacaaaagtgctattcttgtatcagaattttctcaccccagggaactggcaagttacatcagacgactggattctgatgacagattgtatgaggcctatgtagaatggaagctgaagggtgagatctctaaccagcgacttctgacagctctcagggaacggaaatggggagtgcaagacgtcaaccaggacaattacatcgatgcatttgagtgtatggtgtgcaccaaggtgtgggctaatatcaggcttcaggaaaaggtaagcaaatcaaaggtgggcatagagccagcaggctggccatcttgatgttctctgctctcctgcatttccttctgttgttgccacctcatcagtgttcttcattcctatcagaaagaccgggctttgcaggaaggttgaatattccattactaccttttgggactgtcgtaaagtttacaagccctggacaggccttcattcctgaaagccttcattctcctttattgtttcttctgggggatcccgtgctgcaggtgctgggcagtgacacagaaaactgcagaaaaggggaagagtccctaacataaaaaattaagagttcttgccacacatgatggctcacgcctgtaattggagcactttgggaggttgaggtgggtggatcacttgagcccaggggttcgagaccagcctgggcaacatggcaaaaccccatctctactaaaaatataaaaattagcccggcatggtgacatgcacttgtaatcccagctactcgagaggctgaagtgggagaattgctggaatccaggatgcagaggttgcagtgagccgagatcatgccacaatactacagcctgggcgacagagcgagactctgtctc

SEQ ID NO: 5517 - protein, 357 aa, Homo sapiens
MGIGQLPHYALVVPADGGDWEVRPMWSRCLFLHHQPDLPPSSHDQSIPLLWSQEESPPLAENDGTDFNIDSLPLPRKAHHDWAVFHEESPKNNYKLFHKPVITLFNYTATFSRHSHLPLTTQYLESIEVLKSLRYLVPLQSKNKLRKRLAPLVYVQSDCDPPSDRDSYVRELMTYIEVDSYGECLRNKDLPQQLKNPASMDADGFYRIIAQYKFILAFENAVCDDYITEKFWRPLKLGVVPVYYGSPSITDWLPSNKSAILVSEFSHPRELASYIRRLDSDDRLYEAYVEWKLKGEISNQRLLTALRERKWGVQDVNQDNYIDAFECMVCTKVWANIRLQEKVSKSKVGIEPAGWPS

SEQ ID NO: 5518 - DNA, 2444 bp, Homo sapiens
cctagtccagttggagaagcggagagtttcccctgtcttaaagaagagggcccccgcagccttcccgagaactttccatagggccgtggcctcaggcggactgcgaaccaagatcatcagcagggggcggcccggtgttcttagaacccgggtcccaagagcttgtgaacagggcacgagtgaaaacccggatccaggctggctccgccggaacgcgccccgagctcgcccgcgcggccgcctcttccgctcctgatcggctcttcgggtcttcccggcgcccaggcttgggctcatagggagaaaggaagctgcgctgcattctgcgggacgaaccctgctccgcgcgagaatttttttgattccttcttatttggagaaatctccagctgctctgatgatagcctaagaagactgcatgctgcttcctctcgatgccaagccagaccctctcacaacctcggatctcagtccttcatggagacctggtcccagcaggaatggcagtgcaggaaattggcgcccagatggttcttccatgtgaagttgtctcgggctctgggctgacgagagaacacctggtaaccaggttagccctctgtcagtcacccagggcagggcagcatggtgcggattcagaggaggaagcttttggcatcttgcctgtgcgtcacagccaccgtctttctgcttgtcacactccaggtcatggttgagctggggaagtttgaaaggaaggagtttaaaagttccagtttgcaagatggacatacaaaaatggaggaagcacctacgcatcttaattcatttcttaagaaagaaggattgaccttcaacaggaaaagaaaatgggaattggacagctaccccattatgctctggtggtccccgctgacgggggagactgggaggttaggccaatgtggagcagatgcttgtttcttcaccatcaaccggacctacctccatcatcacatgaccaaagcattcctcttctatggtactgactttaacatagatagcttacctctgcctcggaaagcccatcatgactgggctgtttttcatgaagagtccccgaaaaacaattataagctctttcataaaccagtgatcaccttgttcaactacactgccacgttcagcaggcattcccacttgccactaactacccaatacttggagagcattgaagtcctgaagtcactccgatacctagttcctttgcagtccaaaaacaagcttagaaaaagacttgctccgctggtgtatgtacagtcagactgtgacccaccatcagacagggacagctatgttcgcgagctgatgacttacatcgaggtcgattcctatggtgaatgtttacgaaacaaagacctccctcagcagctgaaaaatccagcctctatggatgccgatggcttttataggatcattgcacagtataagtttatcctagcttttgagaatgcagtttgtgatgactacatcactgagaagttctggaggccactgaaactgggggtagtccctgtatattacggatcccccagcatcacagactggcttccaagtaacaaaagtgctattcttgtatcagaattttctcaccccagggaactggcaagttacatcagacgactggattctgatgacagattgtatgaggcctatgtagaatggaagctgaagggtgagatctctaaccagcgacttctgacagctctcagggaacggaaatggggagtgcaagacgtcaaccaggacaattacatcgatgcatttgagtgtatggtgtgcaccaaggtgtgggctaatatcaggcttcaggaaaaggtaagcaaatcaaaggtgggcatagagccagcaggctggccatcttgatgttctctgctctcctgcatttccttctgttgttgccacctcatcagtgttcttcattcctatcagaaagaccgggctttgcaggaaggttgaatattccattactaccttttgggactgtcgtaaagtttacaagccctggacaggccttcattcctgaaagccttcattctcctttattgtttcttctgggggatcccgtgctgcaggtgctgggcagtgacacagaaaactgcagaaaaggggaagagtccctaacataaaaaattaagagttcttgccacacatgatggctcacgcctgtaattggagcactttgggaggttgaggtgggtggatcacttgagcccaggggttcgagaccagcctgggcaacatggcaaaaccccatctctactaaaaatataaaaattagcccggcatggtgacatgcacttgtaatcccagctactcgagaggctgaagtgggagaattgctggaatccaggatgcagaggttgcagtgagccgagatcatgccacaatactacagcctgggcgacagagcgagactctgtctc

SEQ ID NO: 5519 - protein, 419 aa, Homo sapiens
MVRIQRRKLLASCLCVTATVFLLVTLQVMVELGKFERKEFKSSSLQDGHTKMEEAPTHLNSFLKKEGLTFNRKRKWELDSYPIMLWWSPLTGETGRLGQCGADACFFTINRTYLHHHMTKAFLFYGTDFNIDSLPLPRKAHHDWAVFHEESPKNNYKLFHKPVITLFNYTATFSRHSHLPLTTQYLESIEVLKSLRYLVPLQSKNKLRKRLAPLVYVQSDCDPPSDRDSYVRELMTYIEVDSYGECLRNKDLPQQLKNPASMDADGFYRIIAQYKFILAFENAVCDDYITEKFWRPLKLGVVPVYYGSPSITDWLPSNKSAILVSEFSHPRELASYIRRLDSDDRLYEAYVEWKLKGEISNQRLLTALRERKWGVQDVNQDNYIDAFECMVCTKVWANIRLQEKVSKSKVGIEPAGWPS

SEQ ID NO: 5520 - DNA, 1179 bp, Homo sapiens
gtggcctgcgtttgtaatcccagctactccagaggctgaggcaggagaatcacttgaactcgggaagaggaggctgcagtaggctgagatcacgccattgcactctagcctgggcgacagagagagactctgtctcaaaaaataaaaaaataaaaaataaataaaaaaataagttgtatggcagaagaagaatctctccttaaaagcatccctattatttggaaatgaatttataactcacatagtagatattgatctgaaatgtggaataaattttacctttggagttgtatcctatggctttctaaaagcctttcttttaagtgactggttgtacatttgcaggggaagaaggtcagatgaaaagatagtttgtggctacaagtcatctcccatggatcaaactactggggagagccacattgttccatcataaaaatgctgagagagctattggcaacaggcagactttagttttcagtgatggctctgctgctctagtgttgactttggcgtctcaggtgatccatgactttttaaagccaatataatttcttactccttctggagtgctgcttggctttcactcagtggttttttttttttttcttttttggccttggataccgttgagaatctaatgaaagtcacgggccctccccagggagttacagactccatgcaatgcttcaatgatcagcggcctttatctaacaccaggagcagcgagcacataaaagaggtcatggttgagctggggaagtttgaaaggaaggagtttaaaagttccagtttgcaagatggacatacaaaaatggaggaagcacctacgcatcttaattcatttcttaagaaagaaggattgaccttcaacaggaaaagaaaatgggaattggacagctaccccattatgctctggtggtccccgctgacgggggagactgggaggttaggccaatgtggagcagatgcttgtttcttcaccatcaaccggacctacctccatcatcacatgaccaaagcattcctcttctatggtaagcaggactttcgcctttctcccttgtttgctgtggtcttcctccaaagctgagttacagtttacctctgaaaagtgatggtggagctccccttgaaaacactttgacacccctgatttcctttgcatttgctctgtgg

SEQ ID NO: 5521 - protein, 150 aa, Homo sapiens
MKVTGPPQGVTDSMQCFNDQRPLSNTRSSEHIKEVMVELGKFERKEFKSSSLQDGHTKMEEAPTHLNSFLKKEGLTFNRKRKWELDSYPIMLWWSPLTGETGRLGQCGADACFFTINRTYLHHHMTKAFLFYGKQDFRLSPLFAVVFLQS

SEQ ID NO: 5522 - DNA, 703 bp, Homo sapiens
aaggaggaaagccctcactaggaagagacttgtgccacccggggcaagaacatcagagatccagtgacagcccagcgacctccgggatcaattgcaatgggaggtgtgttttatggaccatgtgctgctatgtatgcctgaagaagtacttgaaatgcaaatttggggagactttgccatataaatgcttggctggattaagcgcctaattaggatggtttttcaacaagttggagtaagcatgcaatcggtactttggtctaggaagccatatggttcgtctcgaagtatcgtaaggaaaattggtactaatttgtctctgattcagtgtccaagagttcagtttcagattaacagccatgcaacagaatggagtcccagccacccaggagaggatgcagtggcgtcttttgctgatgttggatgggtagccaaagaagaaggagagtgttcagcaagactaaggacagaggtcagatcaaggccaccccttcaggatgaccttcttttctttgagaaggccccaagcagacagatttccttaccagacttgtctcaagaagagcctcagctgaagaccccagcgctggcaaatgaggaagcactgcagaagatttgcgctctcgaaaatgaacttgctgctctcagagctcagattgccaaaattgtgacccagcaggagcagcaaaatctcactgcaggt

SEQ ID NO: 5523 - protein, 172 aa, Homo sapiens
MLGWIKRLIRMVFQQVGVSMQSVLWSRKPYGSSRSIVRKIGTNLSLIQCPRVQFQINSHATEWSPSHPGEDAVASFADVGWVAKEEGECSARLRTEVRSRPPLQDDLLFFEKAPSRQISLPDLSQEEPQLKTPALANEEALQKICALENELAALRAQIAKIVTQQEQQNLTA

SEQ ID NO: 5524 - DNA, 2811 bp, Homo sapiens
ccgactgtgactctcagcagccggcttgcggagcggttgccgcgtcctctgccgagcttcttgtgcccgcctccgagcctgaggaaacagctgattgatcagcctggctcaggcttggggcggggattggctgattggcagcaacgccacgggacagccaagctagaagcctgaggagccggagagggtgctggctgccgcgcggccgagtgtgttttatggaccatgtgctgctatgtatgcctgaagaagtacttgaaatgcaaatttggggagactttgccatataaatgcttggctggattaagcgcctaattaggatggtttttcaacaagttggagtaagcatgcaatcggtactttggtctaggaagccatatggttcgtctcgaagtatcgtaaggaaaattggtactaatttgtctctgattcagtgtccaagagttcagtttcagattaacagccatgcaacagaatggagtcccagccacccaggagaggatgcagtggcgtcttttgctgatgttggatgggtagccaaagaagaaggagagtgttcagcaagactaaggacagaggtcagatcaaggccaccccttcaggatgaccttcttttctttgagaaggccccaagcagacagatttccttaccagacttgtctcaagaagagcctcagctgaagaccccagcgctggcaaatgaggaagcactgcagaagatttgcgctctcgaaaatgaacttgctgctctcagagctcagattgccaaaattgtgacccagcaggagcagcaaaatctcactgcaggtgacttagattctaccacatttggtaccataccaccacaccctccacctcccccaccgcccctgcctccccctgcactggggctccaccaaagtacatctgctgttgatctgattaaagaacgaagagagaaaagagccaatgctggaaagactttggttaagaacaatccaaagaaacctgaaatgccaaatatgctagagatccttaaagagatgaacagtgtaaaacttcggtcagtgaagaggtcagagcaagatgtgaagcccaagccagtggatgctactgaccctgctgccctcatagcagaggctctgaaaaagaaatttgcttatcggtatcgaagtgatagccaagatgaagttgaaaaaggaattccaaagtctgaatcagaggccacctcagagagagtgttgtttgggccacacatgttgaagccaacaggaaaaatgaaggctttaattgaaaatgtatcagactcctaatagacaatgagctgcgaaaagactcctggttcccctgttgatttgtgagggccaagtttgctagtagaaatcgacactgtttagtaaatacctctttagtattcagtggtcttcttttcaggctaattagtggattaagcaataatgaaagcactaagtttggttttgcttttgtgagatggtcagctttggtgctctccacaacatgtgtgttctgacatgtttctaatatgtggccagggcgttcagatttccagttttgaaaacaattgtatagatttcacaacacaaaaaggacatttgtggatgttactgcacattttaaattcttaacactaatttatctgtataagtgttttatatgcatatttttggacataaacagtttatgtaaaattagtaatgaatgatggcaacgagggcactgttatcttcgtttgttttcaatgatcatttagcattcaatgatggaacagctggtataacataagttgttggcatgaaatatttgagattggaaacttcttgccttgaacagaacttatatcttagattctctctcacattttcttggagctggggtttgaataggaaccagatgatgttcactgctgaaattccataatgcttcccattgaagggaagttgagaaccaggaaagctgctttcacgtcattgccatccagtactgacagggaagaaagatgtagttttccagtagtgatgaatcaaattattgaattaaatttcttcttaagaagtaaaaactcagaatgtaccatcttgtttcctttcagtttattaaatggcatcataaagatgactttgctaagttaatagagttaaaaatttttttaatataagccaaaatattaactttaatgaaacattgacttggcaaatgaatttcctataaattatcattggtcagaatgctgttttgtttaataatattacgcaacataaaccataggtgttattagaagtggagaactgcctttttcatctggggcttttaaggacttgctataaatgattattttttaaatgctttataaatcttcatggtttttctatttctgatacactcagctatagttaataccagagtatcctaccaggagtaatatttggaatatttaaatctagtaaaagaagaaagttgtacttcctggctgggagtattaggagatgggagtagagattcacttttaagttcttgaaaatatatgcattctcctaaatattaacaaaaatgatttggggaaatgacatggcttgattgttctgtttaaatttgtactgtggcttatgttacacatgttcatgttcacctctcattcacctgttttatatggtttaaaattctctttaacaaaattcagaaaattcacctgaaacgtattttgacctaaaagaaacatatttttgtatcagtattgaattttggacagtgcccccatataaggaagttactgttttaaaataaagcaaactaactgttttattttccttggac

SEQ ID NO: 5525 - protein, 333 aa, Homo sapiens
MLGWIKRLIRMVFQQVGVSMQSVLWSRKPYGSSRSIVRKIGTNLSLIQCPRVQFQINSHATEWSPSHPGEDAVASFADVGWVAKEEGECSARLRTEVRSRPPLQDDLLFFEKAPSRQISLPDLSQEEPQLKTPALANEEALQKICALENELAALRAQIAKIVTQQEQQNLTAGDLDSTTFGTIPPHPPPPPPPLPPPALGLHQSTSAVDLIKERREKRANAGKTLVKNNPKKPEMPNMLEILKEMNSVKLRSVKRSEQDVKPKPVDATDPAALIAEALKKKFAYRYRSDSQDEVEKGIPKSESEATSERVLFGPHMLKPTGKMKALIENVSDS

SEQ ID NO: 5526 - DNA, 765 bp, Homo sapiens
ctgaggaaacagctgattgatcagcctggctcaggcttggggcggggattggctgattggcagcaacgccacgggacagccaagctagaagcctgaggagccggagagggtgctggctgccgcgcggccgagtgtgttttatggaccatgtgctgctatgtatgcctgaagaagtacttgaaatgcaaatttggggagactttgccatataaatgcttggctggattaagcgcctaattaggatggtttttcaacaagttggagtaagcatgcaatcggtactttggtctaggaagccatatggttcgtctcgaagtatcgtaaggaaaattggtactaatttgtctctgattcagtgtccaagagttcagtttcagctgtagtaggacaggaccttgctgggaaccttcaattaacagccatgcaacagaatggagtcccagccacccaggagaggatgcagtggcgtcttttgctgatgttggatgggtagccaaagaagaaggagagtgttcagcaagactaaggacagaggtcagatcaaggccaccccttcaggatgaccttcttttctttgagaaggccccaagcagacagatttccttaccagacttgtctcaagaagagcctcagctgaagaccccagcgctggcaaatgaggaagcactgcagaagatttgcgctctcgaaaatgaacttgctgctctcagagctcagattgccaaaattgtgacccagcaggagcagcaaaatctcactgcaggt

SEQ ID NO: 5527 - protein, 56 aa, Homo sapiens
MLGWIKRLIRMVFQQVGVSMQSVLWSRKPYGSSRSIVRKIGTNLSLIQCPRVQFQL

SEQ ID NO: 5528 - DNA, 802 bp, Homo sapiens
ctgaggaaacagctgattgatcagcctggctcaggcttggggcggggattggctgattggcagcaacgccacgggacagccaagctagaagcctgaggagccggagagggtgctggctgccgcgcggccgagtgtgttttatggaccatgtgctgctatgtatgcctgaagaagtacttgaaatgcaaatttggggagactttgccatataaatgcttggctggattaagcgcctaattaggatggtttttcaacaagttggagtaagcatgcaatcgaatagtatgaaaacctgatgaaaataaaatttttactgtactttggtctaggaagccatatggttcgtctcgaagtatcgtaaggaaaattggtactaatttgtctctgattcagtgtccaagagttcagtttcagctgtagtaggacaggaccttgctgggaaccttcaattaacagccatgcaacagaatggagtcccagccacccaggagaggatgcagtggcgtcttttgctgatgttggatgggtagccaaagaagaaggagagtgttcagcaagactaaggacagaggtcagatcaaggccaccccttcaggatgaccttcttttctttgagaaggccccaagcagacagatttccttaccagacttgtctcaagaagagcctcagctgaagaccccagcgctggcaaatgaggaagcactgcagaagatttgcgctctcgaaaatgaacttgctgctctcagagctcagattgccaaaattgtgacccagcaggagcagcaaaatctcactgcaggt

SEQ ID NO: 5529 - protein, 137 aa, Homo sapiens
FSVQEFSFSCSRTGPCWEPSINSHATEWSPSHPGEDAVASFADVGWVAKEEGECSARLRTEVRSRPPLQDDLLFFEKAPSRQISLPDLSQEEPQLKTPALANEEALQKICALENELAALRAQIAKIVTQQEQQNLTA

SEQ ID NO: 5530 - DNA, 813 bp, Homo sapiens
ctgaggaaacagctgattgatcagcctggctcaggcttggggcggggattggctgattggcagcaacgccacgggacagccaagctagaagcctgaggagccggagagggtgctggctgccgcgcggccgagtgtgttttatggaccatgtgctgctatgtatgcctgaagaagtacttgaaatgcaaatttggggagactttgccatataaatgcttggctggattaagcgcctaattaggatggtttttcaacaagttggagtaagcatgcaatcggtactttggtctaggaagccatatggttcgtctcgaagtatcgtaaggaaaattggtactaatttgtctctgattcagtgtccaagagttcagtttcagattaacagccatgcaacagaatggagtcccagccacccaggagaggatgcagtggcgtcttttgctgatgttggatgggtagccaaagaagaaggagagtgttcagcaagactaaggacagaggtcagatcaaggccaccccttcaggatgaccttcttttctttgagaaggccccaagcagacagatttccttaccagacttgtctcaagaagagcctcagctgaagaccccagcgctggcaaatgaggaagcactgcagaagatttgcgctctcgaaaatgaacttgctgttgatctgattaaagaacgaagagagaaaagagccaatgctggaaagactttggttaagaacaatccaaagaaacctgaaatgccaaatatgctagagatccttaaagagatgaacagtgtaaaacttcggtcagtgaagaggt

SEQ ID NO: 5531 - protein, 199 aa, Homo sapiens
MLGWIKRLIRMVFQQVGVSMQSVLWSRKPYGSSRSIVRKIGTNLSLIQCPRVQFQINSHATEWSPSHPGEDAVASFADVGWVAKEEGECSARLRTEVRSRPPLQDDLLFFEKAPSRQISLPDLSQEEPQLKTPALANEEALQKICALENELAVDLIKERREKRANAGKTLVKNNPKKPEMPNMLEILKEMNSVKLRSVK

SEQ ID NO: 5532 - DNA, 635 bp, Homo sapiens
atctcagctactcaagaggctgaagcaggagaatcacttgaacctggagggggcagaggttgcagggagccgagattgctccacttcactccagcctgggcgaaagagtgaaactccatctcaaaaataaatacataatagtaataaggtactttggtctaggaagccatatggttcgtctcgaagtatcgtaaggaaaattggtactaatttgtctctgattcagtgtccaagagttcagtttcagctgtagtaggacaggaccttgctgggaaccttcaattaacagccatgcaacagaatggagtcccagccacccaggagaggatgcagtggcgtcttttgctgatgttggatgggtagccaaagaagaaggagagtgttcagcaagactaaggacagaggtcagatcaaggccaccccttcaggatgaccttcttttctttgagaaggccccaagcagacagatttccttaccagacttgtctcaagaagagcctcagctgaagaccccagcgctggcaaatgaggaagcactgcagaagatttgcgctctcgaaaatgaacttgctgctctcagagctcagattgccaaaattgtgacccagcaggagcagcaaaatctcactgcaggt

SEQ ID NO: 5533 - protein, 137 aa, Homo sapiens; identical to SEQ ID NO: 5529

SEQ ID NO: 5534 - DNA, 978 bp, Homo sapiens
caggctaattagtggattaagcaataatgaaagcactaagtttggttttgcttttgtgagatggtcagctttggtgctctccacaacatgtgtgttctgacatgtttctaatatgtggccagggcgttcagatttccagttttgaaaacaattgtatagatttcacaacacaaaaaggacatttgtggatgttactgcacattttaaattcttaacactaatttatctgtataagtgttttatatgcatatttttggacataaacagtttatgtaaaattagtaatgaatgatggcaacgagggcactgttatcttcgtttgttttcaatgatcatttagcattcaatgatggaacagctggtataacataagttgttggcatgaaatatttgagattggaaacttcttgccttgaacagaacttatatcttagattctctctcacattttcttggagctggggtttgaataggaaccagatgatgttcactgctgaaattccataatgcttcccattgaagggaagttgagaaccaggaaagctgctttcacgtcattgccatccagtactgacagggaagaaagatgtagttttccagtagtgatgaatcaaattattgaattaaatttcttcttaagaagtaaaaactcagaatgtaccatcttgtttcctttcagtttattaaatggcatcataaagatgactttgctaagttaatagagttaaaaatttttttaatataagccaaaatattaactttaatgaaacattgacttggcaaatgaatttcctataaattatcattggtcagaatgctgttttatatggtttaaaattctctttaacaaaattcagaaaattcacctgaaacgtattttgacctaaaagaaacatatttttgtatcagtattgaattttggacagtgcccccatataaggaagttactgttttaaaataaagcaaactaactgtttt

SEQ ID NO: 5535 - protein, 70 aa, Homo sapiens
MLPIEGKLRTRKAAFTSLPSSTDREERCSFPVVMNQIIELNFFLRSKNSECTILFPFSLLNGIIKMTLLS

SEQ ID NO: 5536 - DNA, 1195 bp, Homo sapiens
aactaggctggagtgcagtggcatgatcactgcagcctccacctcctaggctcaagcaatcctcccacctcagcctcctgagtgccaccacaccacccagtccagcctaggtgacagagcaagactctgtctcaaaaaaaaaaaaaaaacttttttatagagacagggtctctctttgttggcttggctggtcttgaactcttgggctcaagcagtcctgccaccgtggcctctcaaagtgctgggattacaggtgtgagacactgcatcaggcctatagctccacttaaatacgacctatattactggaatatttttttctaaaaaattttaggaaacagttaaatatttaaaagattacttttttaaaaagcaagtaaatattacagaacagaatgcaaaatttattttacatgggagactaaaaattttcacacacatggccaccctttgggcctcttggctcaacatttcaggggctgagggagtctctgctctaggagtaaaaggtccttggagagaaaattttgacaagtcctaactttaaaaaagaaaaattggttcctggtcaatatttgtactcactgtaaatgtgatggttggtaatgatactctgtataaaagtaaaaatcatattttatgtcctttgcaaacaaatatatttgtacctgaggtacagattagaggtgctagtaattccttgaagattctgaaaatgatctttttttccaaaatgctttcttggtttttattaaactttctattttcttaaaactctcacatcaggtatttccagtgttttcaagcatgtataaatattttaatgtataaatgttgtttaaaatcccctcaatcggtatctcctgattgagaaaatacacagtgaccaatagctaataggaattcagtattgctttcaaagaaatgtgcatattaatcactgtagcatctgcatacatttgaaacacggagtaatacaggtctgtgcaagaattagcagcttgttccttgctaataatgacttgtgtcatctggaaggcccccaagagcccatggtctacaggtggaatgaccaccacttgggagtgagctgatggagagcacccagcaggtctcctccatcttcctggttcctgtgctcaccatagggctggtgtacattgggccattaataaacgtttgttgaacaaattaa

SEQ ID NO: 5537 - protein, 58 aa, Homo sapiens
MVGNDTLYKSKNHILCPLQTNIFVPEVQIRGASNSLKILKMIFFSKMLSWFLLNFLFS

SEQ ID NO: 5538 - DNA, 4021 bp, Homo sapiens
ggtgatcactgttggaaggcagctgcttgaggtccaaggcagtcagtgtcccctctcttttgcctcgggacagctggtatttatcagactcctaagaagttttccttgctccctagtagaagagagagattatgcagcgggcttttgattgatccaatgggaattacattgatctggtgtctggccttggttcttatcaagtggatcacctctaagaggcgtggagctatttcctatgacagttctgatcagactgcattatacattcgtatgctaggagatgtacgtgtaaggagccgagcaggatttgaatcagaaagaagaggttctcacccatatattgattttcgtattttccactctcaatctgaaattgaagtgtctgtctctgcaaggaatatcagaaggctactaagtttccagcgatatcttagatcttcacgcttttttcgtggtactgcggtttcaaattccctaaacattttagatgatgattataatggacaagccaagtgtatgctggaaaaagttggaaattggaattttgatatctttctatttgatagactaacaaatggaaatagtctagtaagcttaacctttcatttatttagtcttcatggattaattgagtacttccatttagatatgatgaaacttcgtagatttttagttatgattcaagaagattaccacagtcaaaatccttaccataacgcagtccacgctgcggatgttactcaggccatgcactgttacttaaaggaacctaagcttgccaattctgtaactccttgggatatcttgctgagcttaattgcagctgccactcatgatctggatcatccaggtgttaatcaacctttccttattaaaactaaccattacttggcaactttatacaagaatacctcagtactggaaaatcaccactggagatctgcagtgggcttattgagagaatcaggcttattctcacatctgccattagaaagcaggcaacaaatggagacacagataggtgctctgatactagccacagacatcagtcgccagaatgagtatctgtctttgtttaggtcccatttggatagaggtgatttatgcctagaagacaccagacacagacatttggttttacagatggctttgaaatgtgctgatatttgtaacccatgtcggacgtgggaattaagcaagcagtggagtgaaaaagtaacggaggaattcttccatcaaggcaaatatagaaaaaaaatatcatttgggtgtgagtccactttgcgatcgtcacactgaatctattgccaacatccagattggttttatgacttacctagtggagcctttatttacagaatgggccaggttttccaatacaaggctatcccagacaatgcttggacacgtggggctgaataaagccagctggaagggactgcagagagaacagtcgagcagtgaggacactgatgctgcatttgagttgaactcacagttattacctcaggaaaatcggttatcataacccccagaaccagtgggacaaactgcctcctggaggtttttagaaatgtgaaatggggtcttgaggtgagagaacttaactcttgactgccaaggtttccaagtgagtgatgccagccagcattatttatttccaagatttcctctgttggatcatttgaacccacttgttaattgcaagacccgaacatacagcaatatgaatttggctttcatgtgaaaccttgaatatgcaaagcccagcaggagagaatccgaaaggagtaacaaaggaagttttgatatgtgccacgactttttcaaagcatctaatcttcaaaacgtgaaacttgaattgttcagcaacaatctcttggaatttaaccagtctgatgcaacaatgtgtatcttgtaccttccactaagttctctctgagaaaatggaaatgtgaagtgcccagcctctgctgcctctggcaagacaatgtttacaaatcaactctgaaaatattggttctaaattgccttggagcatgattgtgaaggaaccactcaaacaaatttaaagatcaaactttagactgcagctctttccccctggtttgcctttttcttctttggatgccaccaaagcctcccatttgctatagttttatttcatgcactggaaactgagcatttatcgtagagtaccgccaagctttcactccagtgccgtttggcaatgcaattttttttagcaattagtttttaatttggggtgggaggggaagaacaccaatgtcctagctgtattatgattctgcagtgaagacattgcatgttgttttcactactgtacacttgacctgcacatgcgagaaaaaggtggaatgtttaaaacaccataatcagctcagggtatttgccaatctgaaataaaagtgggatgggagagtgtgtccttcagatcaagggtactaaagtccctttcgctgcagtgagtgagaggtatgttgtgtgtgaatgtacggatgtgtgtttgcgtgcatgtttgtgcatgtgtgactgtgcatgttatgtttctccatgtgggcaaagatttgaaatgtaagcttttatttattattttagaatgtgacataatgagcagccacactcgggggaggggaaggttggtaggtaagctgtaacagattgctccagttgccttaaactatgcacatagctaagtgaccaaacttcttgttttgatttgaaaaaagtgcattgttttcttgtccctccctttgatgaaacgttaccctttgacgggccttttgatgtgaacagatgttttctaggacaaactataaggactaattttaaacttcaaacattccacttttgtaatttgttttaaattgttttatgtatagtaagcacaactgtaatctagttttaagagaaaccggtgctttcttttagttcatttgtatttcccttgttactgtaaaagactgtttattaattgtttacagtttgttgcaacagccattttcttgggagaaagcttgagtgtaaagccatttgtaaaaggctttgccatactcattttaatatgtgcctgttgctgttaacttttgatgaataaaaacctatcttttcatatttttatctttgacatttaccttataactcaatcttttggaaaacacaatgctaaattacaaggaaatcaaagttagcttcttggctcttgtaattcatccctcagatgtttactcagtccgagcttatctactaatgactcaccttgcaagtgagtaagcagaagcccagttagggctgttggagtcctgactaacacaggggagaggtcagctttgagccaggccttttgttcctacagtggtgaactgcataagacatcagcaagtcttgcaagtactaaaatactagttgtatttatttctatcaatcattggcctttttaaagtgataagaaaaggccactccactctacttgattgatatcagttgtaaacaaggtaccactgtgccattccctatatcttcccaggtccaactcattagaagggatatggtgcaaacttctaaatcaaacacattaacatattatttgtacagaagagtgttgatgtccaatagaaacagaatccaagccacataattttcggttttctagtagccacatttagaaaacatggaattaattttagtaacatctattccaatacgtccaaaatattgtatcactttaaaatgtcaatataaaaacaattagatgtttttacattcttttggggggtactaagtctttgaaatccagtgtatattgtgtacttacagcacatctcaatttggactagtcatatctcaggcacccaatatccacatgtggctagtggctaccatattggacagtgtgggtatagaggtctgagggtagtagaggaatatggtcagctggtcactctcgtgagatggccataccttggcctatatttaatgtgtacagaaagtctgataactc

SEQ ID NO: 5539 - protein, 380 aa, Homo sapiens [sequence omitted]

SEQ ID NO: 5540 - DNA, 4396 bp, Homo sapiens
gagctggtcgctgctcctgagtcccgcgcgccctgggtctggccgctggctccagctgtcttttcttgcactgctttgctccgttcgtgctgcgctcgaactctgcagtccgggtacctgctcctctcggccgaggagccccagggcggcggggttccctttccgactttgcctgtgctggccccgcttgcaccccgtcccccctcgcctggagcgaggcgcgcgccggtcctggtaattggcgccgcggccgccgcggagccttcccgccggcggcccgagcggagggctggggttggggaggcgtgagcgcggcttcccagcccggggtcggtccccgcccgccctgcccccgtctcggcccggagcccccgagccgcggccccctcccactgcaggggccggcggccgcggcagggcgggcgccgcgcggaggcagggcgggcgtattcaatggaagtgtgttaccagctgccggtactgcccctggacaggccggtcccccagcacgtcctcagccgccgaggagccatcagcttcagctccagctccgctctcttcggctgccccaatccccggcagctctctcagaggcgtggagctatttcctatgacagttctgatcagactgcattatacattcgtatgctaggagatgtacgtgtaaggagccgagcaggatttgaatcagaaagaagaggttctcacccatatattgattttcgtattttccactctcaatctgaaattgaagtgtctgtctctgcaaggaatatcagaaggctactaagtttccagcgatatcttagatcttcacgcttttttcgtggtactgcggtttcaaattccctaaacattttagatgatgattataatggacaagccaagtgtatgctggaaaaagttggaaattggaattttgatatctttctatttgatagactaacaaatggaaatagtctagtaagcttaacctttcatttatttagtcttcatggattaattgagtacttccatttagatatgatgaaacttcgtagatttttagttatgattcaagaagattaccacagtcaaaatccttaccataacgcagtccacgctgcggatgttactcaggccatgcactgttacttaaaggaacctaagcttgccaattctgtaactccttgggatatcttgctgagcttaattgcagctgccactcatgatctggatcatccaggtgttaatcaacctttccttattaaaactaaccattacttggcaactttatacaagaatacctcagtactggaaaatcaccactggagatctgcagtgggcttattgagagaatcaggcttattctcacatctgccattagaaagcaggcaacaaatggagacacagataggtgctctgatactagccacagacatcagtcgccagaatgagtatctgtctttgtttaggtcccatttggatagaggtgatttatgcctagaagacaccagacacagacatttggttttacagatggctttgaaatgtgctgatatttgtaacccatgtcggacgtgggaattaagcaagcagtggagtgaaaaagtaacggaggaattcttccatcaaggcaaatatagaaaaaaaatatcatttgggtgtgagtccactttgcgatcgtcacactgaatctattgccaacatccagattggttttatgacttacctagtggagcctttatttacagaatgggccaggttttccaatacaaggctatcccagacaatgcttggacacgtggggctgaataaagccagctggaagggactgcagagagaacagtcgagcagtgaggacactgatgctgcatttgagttgaactcacagttattacctcaggaaaatcggttatcataacccccagaaccagtgggacaaactgcctcctggaggtttttagaaatgtgaaatggggtcttgaggtgagagaacttaactcttgactgccaaggtttccaagtgagtgatgccagccagcattatttatttccaagatttcctctgttggatcatttgaacccacttgttaattgcaagacccgaacatacagcaatatgaatttggctttcatgtgaaaccttgaatatgcaaagcccagcaggagagaatccgaaaggagtaacaaaggaagttttgatatgtgccacgactttttcaaagcatctaatcttcaaaacgtgaaacttgaattgttcagcaacaatctcttggaatttaaccagtctgatgcaacaatgtgtatcttgtaccttccactaagttctctctgagaaaatggaaatgtgaagtgcccagcctctgctgcctctggcaagacaatgtttacaaatcaactctgaaaatattggttctaaattgccttggagcatgattgtgaaggaaccactcaaacaaatttaaagatcaaactttagactgcagctctttccccctggtttgcctttttcttctttggatgccaccaaagcctcccatttgctatagttttatttcatgcactggaaactgagcatttatcgtagagtaccgccaagctttcactccagtgccgtttggcaatgcaattttttttagcaattagtttttaatttggggtgggaggggaagaacaccaatgtcctagctgtattatgattctgcagtgaagacattgcatgttgttttcactactgtacacttgacctgcacatgcgagaaaaaggtggaatgtttaaaacaccataatcagctcagggtatttgccaatctgaaataaaagtgggatgggagagtgtgtccttcagatcaagggtactaaagtccctttcgctgcagtgagtgagaggtatgttgtgtgtgaatgtacggatgtgtgtttgcgtgcatgtttgtgcatgtgtgactgtgcatgttatgtttctccatgtgggcaaagatttgaaatgtaagcttttatttattattttagaatgtgacataatgagcagccacactcgggggaggggaaggttggtaggtaagctgtaacagattgctccagttgccttaaactatgcacatagctaagtgaccaaacttcttgttttgatttgaaaaaagtgcattgttttcttgtccctccctttgatgaaacgttaccctttgacgggccttttgatgtgaacagatgttttctaggacaaactataaggactaattttaaacttcaaacattccacttttgtaatttgttttaaattgttttatgtatagtaagcacaactgtaatctagttttaagagaaaccggtgctttcttttagttcatttgtatttcccttgttactgtaaaagactgtttattaattgtttacagtttgttgcaacagccattttcttgggagaaagcttgagtgtaaagccatttgtaaaaggctttgccatactcattttaatatgtgcctgttgctgttaacttttgatgaataaaaacctatcttttcatatttttatctttgacatttaccttataactcaatcttttggaaaacacaatgctaaattacaaggaaatcaaagttagcttcttggctcttgtaattcatccctcagatgtttactcagtccgagcttatctactaatgactcaccttgcaagtgagtaagcagaagcccagttagggctgttggagtcctgactaacacaggggagaggtcagctttgagccaggccttttgttcctacagtggtgaactgcataagacatcagcaagtcttgcaagtactaaaatactagttgtatttatttctatcaatcattggcctttttaaagtgataagaaaaggccactccactctacttgattgatatcagttgtaaacaaggtaccactgtgccattccctatatcttcccaggtccaactcattagaagggatatggtgcaaacttctaaatcaaacacattaacatattatttgtacagaagagtgttgatgtccaatagaaacagaatccaagccacataattttcggttttctagtagccacatttagaaaacatggaattaattttagtaacatctattccaatacgtccaaaatattgtatcactttaaaatgtcaatataaaaacaattagatgtttttacattcttttggggggtactaagtctttgaaatccagtgtatattgtgtacttacagcacatctcaatttggactagtcatatctcaggcacccaatatccacatgtggctagtggctaccatattggacagtgtgggtatagaggtctgagggtagtagaggaatatggtcagctggtcactctcgtgagatggccataccttggcctatatttaatgtgtacagaaagtctgataactc

SEQ ID NO: 5541 - protein, 406 aa, Homo sapiens [sequence omitted]

SEQ ID NO: 5542 - DNA, 3147 bp, Homo sapiens
ggtgatcactgttggaaggcagctgcttgaggtccaaggcagtcagtgtcccctctcttttgcctcgggacagctggtatttatcagactcctaagaagttttccttgctccctagtagaagagagagattatgcagcgggcttttgattgatccaatgggaattacattgatctggtgtctggccttggttcttatcaagtggatcacctctaagaggcgtggagctatttcctatgacagttctgatcagactgcattatacattcgtatgctaggagatgtacgtgtaaggagccgagcaggatttgaatcagaaagaagaggttctcacccatatattgattttcgtattttccactctcaatctgaaattgaagtgtctgtctctgcaaggaatatcagaaggctactaagtttccagcgatatcttagatcttcacgcttttttcgtggtactgcggtttcaaattccctaaacattttagatgatgattataatggacaagccaagtgtatgctggaaaaagttggaaattggaattttgatatctttctatttgatagactaacaaatggaaatagtctagtaagcttaacctttcatttatttagtcttcatggattaattgagtacttccatttagatatgatgaaacttcgtagatttttagttatgattcaagaagattaccacagtcaaaatccttaccataacgcagtccacgctgcggatgttactcaggccatgcactgttacttaaaggaacctaagcttgccaattctgtaactccttgggatatcttgctgagcttaattgcagctgccactcatgatctggatcatccaggtgttaatcaacctttccttattaaaactaaccattacttggcaactttatacaagaatacctcagtactggaaaatcaccactggagatctgcagtgggcttattgagagaatcaggcttattctcacatctgccattagaaagcaggcaacaaatggagacacagataggtgctctgatactagccacagacatcagtcgccagaatgagtatctgtctttgtttaggtcccatttggatagaggtgatttatgcctagaagacaccagacacagacatttggttttacagatggctttgaaatgtgctgatatttgtaacccatgtcggacgtgggaattaagcaagcagtggagtgaaaaagtaacggaggaattcttccatcaaggcaaatatagaaaaaaaatatcatttgggtgtgagtccactttgcgatcgtcacactgaatctattgccaacatccagattggttttatgacttacctagtggagcctttatttacagaatgggccaggttttccaatacaaggctatcccagacaatgcttggacacgtggggctgaataaagccagctggaagggactgcagagagaacagtcgagcagtgaggacactgatgctgcatttgagttgaactcacagttattacctcaggaaaatcggttatcataacccccagaaccagtgggacaaactgcctcctggaggtttttagaaatgtgaaatggggtcttgaggtgagagaacttaactcttgactgccaaggtttccaagtgagtgatgccagccagcattatttatttccaagatttcctctgttggatcatttgaacccacttgttaattgcaagacccgaacatacagcaatatgaatttggctttcatgtgaaaccttgaatatgcaaagcccagcaggagagaatccgaaaggagtaacaaaggaagttttgatatgtgccacgactttttcaaagcatctaatcttcaaaacgtgaaacttgaattgttcagcaacaatctcttggaatttaaccagtctgatgcaacaatgtgtatcttgtaccttccactaagttctctctgagaaaatggaaatgtgaagtgcccagcctctgctgcctctggcaagacaatgtttacaaatcaactctgaaaatattggttctaaattgccttggagcatgattgtgaaggaaccactcaaacaaatttaaagatcaaactttagactgcagctctttccccctggtttgcctttttcttctttggatgccaccaaagcctcccatttgctatagttttatttcatgcactggaaactgagcatttatcgtagagtaccgccaagctttcactccagtgccgtttggcaatgcaattttttttagcaattagtttttaatttggggtgggaggggaagaacaccaatgtcctagctgtattatgattctgcagtgaagacattgcatgttgttttcactactgtacacttgacctgcacatgcgagaaaaaggtggaatgtttaaaacaccataatcagctcagggtatttgccaatctgaaataaaagtgggatgggagagtgtgtccttcagatcaagggtactaaagtccctttcgctgcagtgagtgagaggtatgttgtgtgtgaatgtacggatgtgtgtttgcgtgcatgtttgtgcatgtgtgactgtgcatgttatgtttctccatgtgggcaaagatttgaaatgtaagcttttatttattattttagaatgtgacataatgagcagccacactcgggggaggggaaggttggtaggtaagctgtaacagattgctccagttgccttaaactatgcacatagctaagtgaccaaacttcttgttttgatttgaaaaaagtgcattgttttcttgtccctccctttgatgaaacgttaccctttgacgggccttttgatgtgaacagatgttttctaggacaaactataaggactaattttaaacttcaaacattccacttttgtaatttgttttaaattgttttatgtatagtaagcacaactgtaatctagttttaagagaaaccggtgctttcttttagttcatttgtatttcccttgttactgtaaaagactgtttattaattgtttacagtttgttgcaacagccattttcttgggagaaagcttgagtgtaaagccatttgtaaaaggctttgccatactcattttaatatgtgcctgttgctgttaacttttgatgaataaaaacctatcttttcatatttttatctttg

SEQ ID NO: 5543 - protein, 380 aa, Homo sapiens [sequence omitted]

SEQ ID NO: 5544 - DNA, 3522 bp, Homo sapiens
gagctggtcgctgctcctgagtcccgcgcgccctgggtctggccgctggctccagctgtcttttcttgcactgctttgctccgttcgtgctgcgctcgaactctgcagtccgggtacctgctcctctcggccgaggagccccagggcggcggggttccctttccgactttgcctgtgctggccccgcttgcaccccgtcccccctcgcctggagcgaggcgcgcgccggtcctggtaattggcgccgcggccgccgcggagccttcccgccggcggcccgagcggagggctggggttggggaggcgtgagcgcggcttcccagcccggggtcggtccccgcccgccctgcccccgtctcggcccggagcccccgagccgcggccccctcccactgcaggggccggcggccgcggcagggcgggcgccgcgcggaggcagggcgggcgtattcaatggaagtgtgttaccagctgccggtactgcccctggacaggccggtcccccagcacgtcctcagccgccgaggagccatcagcttcagctccagctccgctctcttcggctgccccaatccccggcagctctctcagaggcgtggagctatttcctatgacagttctgatcagactgcattatacattcgtatgctaggagatgtacgtgtaaggagccgagcaggatttgaatcagaaagaagaggttctcacccatatattgattttcgtattttccactctcaatctgaaattgaagtgtctgtctctgcaaggaatatcagaaggctactaagtttccagcgatatcttagatcttcacgcttttttcgtggtactgcggtttcaaattccctaaacattttagatgatgattataatggacaagccaagtgtatgctggaaaaagttggaaattggaattttgatatctttctatttgatagactaacaaatggaaatagtctagtaagcttaacctttcatttatttagtcttcatggattaattgagtacttccatttagatatgatgaaacttcgtagatttttagttatgattcaagaagattaccacagtcaaaatccttaccataacgcagtccacgctgcggatgttactcaggccatgcactgttacttaaaggaacctaagcttgccaattctgtaactccttgggatatcttgctgagcttaattgcagctgccactcatgatctggatcatccaggtgttaatcaacctttccttattaaaactaaccattacttggcaactttatacaagaatacctcagtactggaaaatcaccactggagatctgcagtgggcttattgagagaatcaggcttattctcacatctgccattagaaagcaggcaacaaatggagacacagataggtgctctgatactagccacagacatcagtcgccagaatgagtatctgtctttgtttaggtcccatttggatagaggtgatttatgcctagaagacaccagacacagacatttggttttacagatggctttgaaatgtgctgatatttgtaacccatgtcggacgtgggaattaagcaagcagtggagtgaaaaagtaacggaggaattcttccatcaaggcaaatatagaaaaaaaatatcatttgggtgtgagtccactttgcgatcgtcacactgaatctattgccaacatccagattggttttatgacttacctagtggagcctttatttacagaatgggccaggttttccaatacaaggctatcccagacaatgcttggacacgtggggctgaataaagccagctggaagggactgcagagagaacagtcgagcagtgaggacactgatgctgcatttgagttgaactcacagttattacctcaggaaaatcggttatcataacccccagaaccagtgggacaaactgcctcctggaggtttttagaaatgtgaaatggggtcttgaggtgagagaacttaactcttgactgccaaggtttccaagtgagtgatgccagccagcattatttatttccaagatttcctctgttggatcatttgaacccacttgttaattgcaagacccgaacatacagcaatatgaatttggctttcatgtgaaaccttgaatatgcaaagcccagcaggagagaatccgaaaggagtaacaaaggaagttttgatatgtgccacgactttttcaaagcatctaatcttcaaaacgtgaaacttgaattgttcagcaacaatctcttggaatttaaccagtctgatgcaacaatgtgtatcttgtaccttccactaagttctctctgagaaaatggaaatgtgaagtgcccagcctctgctgcctctggcaagacaatgtttacaaatcaactctgaaaatattggttctaaattgccttggagcatgattgtgaaggaaccactcaaacaaatttaaagatcaaactttagactgcagctctttccccctggtttgcctttttcttctttggatgccaccaaagcctcccatttgctatagttttatttcatgcactggaaactgagcatttatcgtagagtaccgccaagctttcactccagtgccgtttggcaatgcaattttttttagcaattagtttttaatttggggtgggaggggaagaacaccaatgtcctagctgtattatgattctgcagtgaagacattgcatgttgttttcactactgtacacttgacctgcacatgcgagaaaaaggtggaatgtttaaaacaccataatcagctcagggtatttgccaatctgaaataaaagtgggatgggagagtgtgtccttcagatcaagggtactaaagtccctttcgctgcagtgagtgagaggtatgttgtgtgtgaatgtacggatgtgtgtttgcgtgcatgtttgtgcatgtgtgactgtgcatgttatgtttctccatgtgggcaaagatttgaaatgtaagcttttatttattattttagaatgtgacataatgagcagccacactcgggggaggggaaggttggtaggtaagctgtaacagattgctccagttgccttaaactatgcacatagctaagtgaccaaacttcttgttttgatttgaaaaaagtgcattgttttcttgtccctccctttgatgaaacgttaccctttgacgggccttttgatgtgaacagatgttttctaggacaaactataaggactaattttaaacttcaaacattccacttttgtaatttgttttaaattgttttatgtatagtaagcacaactgtaatctagttttaagagaaaccggtgctttcttttagttcatttgtatttcccttgttactgtaaaagactgtttattaattgtttacagtttgttgcaacagccattttcttgggagaaagcttgagtgtaaagccatttgtaaaaggctttgccatactcattttaatatgtgcctgttgctgttaacttttgatgaataaaaacctatcttttcatatttttatctttg

SEQ ID NO: 5545 - protein, 406 aa, Homo sapiens [sequence omitted]

SEQ ID NO: 5546 - DNA, 1556 bp, Homo sapiens
tcaagtgtacagtagtgaaaacaacatgcaatgtcttcactgcagaatcataatacagctaggacattggtgttcttcccctcccaccccaaattaaaaactaattgctaaaaaaaattgcattgccaaacggcactggagtgaaagcttggcggtactctacgataaatgctcagtttccagtgcatgaaataaaactatagcaaatgggaggctttggtggcatccaaagaagaaaaaggcaaaccagggggaaagagctgcagtctaaagtttgatctttaaatttgtttgagtggttccttcacaatcatgctccaaggcaatttagaaccaatattttcagagttgatttgtaaacattgtcttgccagaggcagcagaggctgggcacttcacatttccattttctcagagagaacttagtggaaggtacaagatacacattgttgcatcagactggttaaattccaagagattgttgctgaacaattcaagtttcacgttttgaagattagatgctttgaaaaagtcgtggcacatatcaaaacttcctttgttactcctttcggattctctcctgctgggctttgcatattcaaggtttcacatgaaagccaaattcatattgctgtatgttcgggtcttgcaattaacaagtgggttcaaatgatccaacagaggaaatcttggaaataaataatgctggctggcatcactcacttggaaaccttggcagtcaagagttaagttctctcacctcaagaccccatttcacatttctaaaaacctccaggaggcagtttgtcccactggttctgggggttatgataaccgattttcctgaggtaataactgtgagttcaactcaaatgcagcatcagtgtcctcactgctcgactgttctctctgcagtcccttccagctggctttattcagccccacgtgtccaagcattgtctgggatagccttgtattggaaaacctggcccattctgtaaataaaggctccactagatttcacaggacgccttgtcaaatgccttactcttatccagtacatattttcttgttcaacaaaattagtattcctatcaaagaaagaaactgtattagttcaacatgacttgtacatactgcccctatgttggggagtagtaatcactgcttggtgagttgttaagaggctgggatttgatgtccgaaagacctggatttgaagcccaacaccaacagctgttaactgcatgaagtgggcaaaccatctgaaaataaggatgctcaaagcaccggtcccctagggttgttgtgtggagtcagcagatgtcaacaatcaccatcagatcagtgaccttatccctgacaacccattctagatctgtacaacactgacaagatcaatagcttgagatgaacagtgaaagggatctagcttctgttaccttataaaaattacaatgttttaaatctcatttgcaagttctcccattaagcaagggagtagtttactaggataaaaagacatttaatattaaaagtaactgagttgactaccg

SEQ ID NO: 5547 - protein, 57 aa, Homo sapiens
MITDFPEVITVSSTQMQHQCPHCSTVLSAVPSSWLYSAPRVQALSGIALYWKTWPIL

SEQ ID NO: 5548 - DNA, 4187 bp, Homo sapiens
gagctggtcgctgctcctgagtcccgcgcgccctgggtctggccgctggctccagctgtcttttcttgcactgctttgctccgttcgtgctgcgctcgaactctgcagtccgggtacctgctcctctcggccgaggagccccagggcggcggggttccctttccgactttgcctgtgctggccccgcttgcaccccgtcccccctcgcctggagcgaggcgcgcgccggtcctggtaattggcgccgcggccgccgcggagccttcccgccggcggcccgagcggagggctggggttggggaggcgtgagcgcggcttcccagcccggggtcggtccccgcccgccctgcccccgtctcggcccggagcccccgagccgcggccccctcccactgcaggggccggcggccgcggcagggcgggcgccgcgcggaggcagggcgggcgtattcaatggaagtgtgttaccagctgccggtactgcccctggacaggccggtcccccagcacgtcctcagccgccgaggagccatcagcttcagctccagctccgctctcttcggctgccccaatccccggcagctctctcagaggcgtggagctatttcctatgacagttctgatcagactgcattatacattcgtatgctaggagatgtacgtgtaaggagccgagcaggatttgaatcagaaagaagaggttctcacccatatattgattttcgtattttccactctcaatctgaaattgaagtgtctgtctctgcaaggaatatcagaaggctactaagtttccagcgatatcttagatcttcacgcttttttcgtggtactgcggtttcaaattccctaaacattttagatgatgattataatggacaagccaagtgtatgctggaaaaagttggaaattggaattttgatatctttctatttgatagactaacaaatggaaatagtctagtaagcttaacctttcatttatttagtcttcatggattaattgagtacttccatttagatatgatgaaacttcgtagatttttagttatgattcaagaagattaccacagtcaaaatccttaccataacgcagtccacgctgcggatgttactcaggccatgcactgttacttaaaggaacctaagcttgccaattctgtaactccttgggatatcttgctgagcttaattgcagctgccactcatgatctggatcatccaggtgttaatcaacctttccttattaaaactaaccattacttggcaactttatacaagaatacctcagtactggaaaatcaccactggagatctgcagtgggcttattgagagaatcaggcttattctcacatctgccattagaaagcaggcaacaaatggagacacagataggtgctctgatactagccacagacatcagtcgccagaatgagtatctgtctttgtttaggtcccatttggatagaggtgatttatgcctagaagacaccagacacagacatttggttttacagatggctttgaaatgtgctgatatttgtaacccatgtcggacgtgggaattaagcaagcagtggagtgaaaaagtaacggaggaattcttccatcaaggcaaatatagaaaaaaaatatcatttgggtgtgagtccactttgcgatcgtcacactgaatctattgccaacatccagattggtaactatacatatttagatatagctggttagaaaaatgccactgtttttatcaagaagggaaatatatttgaaatataaaatattaaaattatgctcatttctatttttaaaaataatttaagaaattttacccttgttttcccttgttatggctcttctaattctcatttaattttaggatgtaaaaagtatatttttgcagaacaggcagcagcaataacttgtttctgttcttatgtaaataagaatccattattcgctcatgtggaagcttcttttgcatcatttgggactgccatttaaaaaaggataggtaaacaaagaaatgacaaaaataaaataaataaaataaaaatggataggtggtgacccactgagcctgatcataatacgaagaccagcttctgccactgcctttccagactcttaccactgcctgttgattaaatctaactcttcaacatcctagacaggcccttataatcttgcttcaaatgctgtgcagccatcttgcctcaacttccctctcatttgcctacagcatctcgggacgcttctgtgtttcccaagtatacgctgttctttcgctctttgtgcctcgccagtgctttccatgtgcctcgtagagttatttttcttgaagaggcagctcaaatgtcaccttctccagaagctgctctccacttgctttaggcagagtcagtcacttttcttctagattccaaagtgcctgatccacttggttgtggattcctggagcctagcaccacaccagaagcacgaggcccttgagaactgtgtgttgagtgaactaataactgtattatagaaagcataatgaaaatgtcctgtgactgaagtatgtgtagcttgttgcaggagttcacaggaaagttgactaggattgagtgtgttgggctttgggtataaaggagggggattctacgggggcagtagctcaacaaggaatagagggaggagtgtaattttggtagctggtgttgaatagggcctttgagaatcagactgaacacagtgaaatatgtgcccaaagttcagaaagatgaagtttccagaaactaagaaggtagcacaatatgtggcatcatactcagaaaggaagaccatgccatggggccagaaattcagaaacgtaattcttacattgtgattgcaatggatactcatggaagaaagtgggtagtggccgatttgacttcagagtgacaggtagagaagggaagagcgtgtagaactgtggccagactttaggagtgtgagggatgctgaatctcccagagagctcacactggccaggaatgctgagagtagcagatgcttttcttttgggaggatagtaaaacaatttagaaccagatatgctttgtcttgattctcaagtagaataatcttcaaatgcaaaagaatacattagaaatggacaaaagtggccaggagcggtagctcatacttgtaacccagcactttgggaagccgaggcgggctgatcgcttgaggtcaggagttcgagaccagcctggccaaaatagtgaaactcacgtttctactaaaaatacaaaaattagctgggtgtgatggccacttgggaggctgagataggagaatcgcttgaacctgggaggcagaggttgcagtgagccaatatcgtgccactgcattccagcctgggtgacagaatgaaactccatcactccatctcaaaaaaaaaaaaaaaaaaaaatggacaaaagagaattgaatcgaagacaggtgaatcggtagtcaactcagttacttttaatattaaatgtctttttatcctagtaaactactcccttgcttaatgggagaacttgcaaatgagatttaaaacattgtaatttttataaggtaacagaagctagatccctttcactgttcatctcaagctattgatcttgtcagtgttgtacagatctagaatgggttgtcagggataaggtcactgatctgatggtgattgttgacatctgctgactccacacaacaaccctaggggaccggtgctttgagcatccttattttcagatggtttgcccacttcatgcagttaacagctgttggtgttgggcttcaaatccaggtctttcggacatcaaatcccagcctcttaacaactcaccaagcagtgattactactccccaacataggggcagtatgtacaagtcatgttgaactaatacagtttctttctttgataggaatactaattttgttgaacaagaaaatatgtactggataagagtaaggcatttgacaaggcgtcctgtgaaatctgtgaagataaagtagaggcttgtggggctagtacaattaaatggagtcacaaatggttgaacagctgtgttcgaggtactaattaacagagtcctgccctccaagagagaggctggtccatggctctggtctgttcatttttatcaggtatttaaaacctaaaagaaattt

SEQ ID NO: 5549 - protein, 406 aa, Homo sapiens [sequence omitted]

SEQ ID NO: 5550 - DNA, 442 bp, Homo sapiens
tcagaaagatgaagtttccagaaactaagaaggtagcacaatatgtggcatcatactcagaaaggaagaccatgccatggggccagaaattcagaaacgtaattcttacattgtgattgcaatggatactcatggaagaaagtgggtagtggccgatttgacttcagagtgacaggtagagaagggaagagcgtgtagaactgtggccagactttaggagtgtgagggatgctgaatctcccagagagctcacactggccaggaatgctgagagtagcagatgcttttcttttgggaggatagtaaaacaatttagaaccagatatgctttgtcttgattctcaagtagaataatcttcaaatgcaaaagaatacatgagccaatatcgtgccactgcattccagcctgggtgacagaatgaaactccatcactccatctca

SEQ ID NO: 5551 - protein, 35 aa, Homo sapiens
MKFPETKKVAQYVASYSERKTMPWGQKFRNVILTL

SEQ ID NO: 5552 - DNA, 4031 bp, Homo sapiens
aaaaaatcaactttattgtggtagaacttacatgcagtaatacagtgcatacattttatgtgtacggttttgacaaatgtatactcccaaccacccaactgtttttttttctctaagagacagggtttcacagtgttgccaggctggagtgcagtggcgtgatcatggctcactgcagcctcgacatcctgggctcaagctggaggccagctaattttttaaattttttgtagagacagggtctcactctattgcccaccccaatttttaaattaaacttcaaaaaaatctctgggccaagactgcatcctctgtttgagaatgttgtgggagagattgatgagtaatcaccatacaatctggtaagtggaaagatggtaataagttctctgcagcacacaaaagggttaacctggtcagcgaaggcttctgcactcccatctccctctgggcacacccaacccaagccaggggcagggaaatctgggtgatgccaggtgagcagggtggggatgcatgtggacaaaaattaataaaaacatgattttgaacactttttgcctgtggagttctgataatacttaaacacttttcatccttaacatactcagtgaacactttacccaaggcttcaattaaggatatagataaaatcacaaagccctacaatgcaggcatttcccttctcccttatcatagtgaacattttaaaatggagtcacccaggactgggcacggtgactcatgcctgtaataccagctacttgggaggctgaggcagaagaatcacttaaacccgggaggtggaggtttcggtgagccgtgattgcgccattactctgcagcctgggcaacaagagcgaaactccatctcaaaaaaaaaaaaaaaaaaaaaaaaaagaagtgcgcaacctggatccctcacatgcacagtttacaatagggtttgtgctcctatgagaagctactgcttccaaggcagagctcaggcaataatgctcactggctggcagctcacctcctgctgtgcacctggttcctctcaggttcctaacaggccatggaccagtaccggtccatggcctggggattgaggagccctgcgaggaccgccttgtccttttgccttctgtgtgtgggaggttcatttctttcagtaatttctcaggatggacataatgtgtcaagaatctgtcttcactaggcagggcatggtggcttatgcctgtgattccagcactttgggaggccaaggcaggcggatcacctgagattaggaattcgagaccagcctggccaacatggtgaaaccccatctctataaaagtaccaaaaaaaaaaaaaagtcaggcatggtggtaggcgcctataatcccagctgctcaggagcctgagtaagagaatcgattgaacctgggaggcagaggctgcagtgagccgagatcgcaccactgcactccaggctgggcatcagcaagactctgtcacaaaaaaatagaatctgttttcagaggtagcatcattaggaaaaataaaaatacaatactgattcaggacattttatgtcactaaactgctctcctccatgatagtgccacctcctctttaccctcagcaagccaccagtatctcaggtaccttctttctgctatttctactatatttttgatttgccaatttagccaaaaaaaaaaaaaaaaaaaaaaagctaccaccaacgaaactcactgtgataaccattacaatgggaaatgataagggctggcaggcagtgaaaacagtaagcttttcactgaacacagcaaaactcaccacttaatagttttctattttattgaaaaagaaccctaatgatggctttgcagatacaagtaaaagctgaccttcacatatgttaaataatctgtagtttcttttttgacatttctttgttgtcagctcttaacagatgtaatcacagaatggaaataacatctgtcttttaatccaccttaaaaagttaagttattgaagtccttgtctttgttataatattgaaaattttgtttctgatgaaaggtttttttttacaagcagaaatgttacatttttatatcaaatatttttttgcatgtgtgatttgtttttaaagttactttctcttcacagaatttttgagaattcagttgcttattgtcatgttcctatttttaatggttaactctttaatatacctgagaatgttttgatgtcatgtgcagtcatacattaattttttaaatcagtctaattttggattattgtattctcccaggatgtctattcttctgccaataagaatgtaacccctttgcatactgcctaataaattacatgttcataagacatagacacccatgcccattcatgtatatgtcaaggaggggagattgctttatatgcagtatgctttatatcctatgcattctgttcatcttgattagtaagcagcgctttagaatgctttattttttcaatgcttttgtatatcctaaagaggaaataattttcttcatcttctcctattcattgaccttctccgtgtactaattatatgcgatacaaaaataaataatatgcatctctgcttccaggtagcttacagttttccaggagattcaagccctcagacagtgatttctctgactgagatgaacttaacacagggagtagaaagagatgattgattcgttctagcagagaaagaaaacaatagaatttgaatctaaaattatttttatctcatttttaaaattttcagtttttatctttgttgtataacatataaatgttagttcagtataataatccataagtacatatacttaatataagtggtgtatgctcaaaaattttcactgttagagcacaggatcattacagtttagtcagcactgtcctaacgtaaacctaaataataccatgctctgatgagtggtattgtggcaggtcatgaggtgctgtgggaacacaaatctggccaagtttgccagaaaatgagaggcatttcatgaaaagcagatgatatagtcaaggtgatcttttttatcattgaacatttgtcagctaatcataaacttttatttattgtgattattaaataagtttggtaatgattattgagagtaaagttacaatttctggtgtgcaagattgctttccctgacatgaatacattgtatcattgttatgaatgtagccatccgttaggggaggattttatcacagacttgacatagacttccacttaacatgattactcagtagcctccttaaacatcaggactaaaggaataaccttacatcttagattacattattgaaatccaataaccaatttgttgataaataaacacccttaaaattttagatcttttgttcagtaatggctacagtaataaaaatgtgccaaactatgtttgtcattttaaagccattatttctcaaaaagaacggtttatgttttagctgccattttaattaagcttgttaaaaatgaaatggcctaaggatgaactctgtaaactccacatgggcagggccactgttgtatcatggctttgccagtgtggtgatgagatcaggacctggcagatgtgcttggtgaacctaatgaacaaccacctgaggaatgacgtgaagggggaggagattaccaccactaccattggctgctaattcaaaactactgtgatggcgtagagcttattttagatatatctgtgattcattattcttttgtcacacttcagcttgccaattctgtaactccttgggatatcttgctgagcttaattgcagctgccactcatgatctggatcatccaggtgttaatcaacctttccttattaaaactaaccattacttggcaactttatacaaggttagtgcaattttatcatcaagatttattatttttgcattctagaaaatctttcatattttgaagaaatgaaagtaatgaaaataaattctcaatgaatgttagaattttaaccagattaatattgct

SEQ ID NO: 5553 - protein, 35 aa, Homo sapiens
MQAFPFSLIIVNILKWSHPGLGTVTHACNTSYLGG

SEQ ID NO: 5554 - DNA, 1089 bp, Homo sapiens
gagctggtcgctgctcctgagtcccgcgcgccctgggtctggccgctggctccagctgtcttttcttgcactgctttgctccgttcgtgctgcgctcgaactctgcagtccgggtacctgctcctctcggccgaggagccccagggcggcggggttccctttccgactttgcctgtgctggccccgcttgcaccccgtcccccctcgcctggagcgaggcgcgcgccggtcctggtaattggcgccgcggccgccgcggagccttcccgccggcggcccgagcggagggctggggttggggaggcgtgagcgcggcttcccagcccggggtcggtccccgcccgccctgcccccgtctcggcccggagcccccgagccgcggccccctcccactgcaggggccggcggccgcggcagggcgggcgccgcgcggaggcagggcgggcgtattcaatggaagtgtgttaccagctgccggtactgcccctggacaggccggtcccccagcacgtcctcagccgccgaggagccatcagcttcagctccagctccgctctcttcggctgccccaatccccggcagctctctcagaggcgtggagctatttcctatgacagttctgatcagactgcattatacattcgtatgctaggagatgtacgtgtaaggagccgagcaggatttgaatcagaaagaagaggttctcacccatatattgattttcgtattttccactctcaatctgaaattgaagtgtctgtctctgcaaggaatatcagaaggctactaagtttccagcgatatcttagatcttcacgcttttttcgtggtactgcggtttcaaattccctaaacattttagatgatgattataatggacaagccaagtgtatgctggaaaaagttggaaattggaattttgatatctttctatttgatagactaacaaatggaaatagtctagtaagcttaacctttcatttatttagtcttcatggattaattgagtacttccatttagatatgatgaaacttcgtagatttttaggtaagtgattctaacccattaacagtaacaagatttacatt

SEQ ID NO: 5555 - protein, 200 aa, Homo sapiens
MEVCYQLPVLPLDRPVPQHVLSRRGAISFSSSSALFGCPNPRQLSQRRGAISYDSSDQTALYIRMLGDVRVRSRAGFESERRGSHPYIDFRIFHSQSEIEVSVSARNIRRLLSFQRYLRSSRFFRGTAVSNSLNILDDDYNGQAKCMLEKVGNWNFDIFLFDRLTNGNSLVSLTFHLFSLHGLIEYFHLDMMKLRRFLGK

SEQ ID NO: 5556 - DNA, 608 bp, Homo sapiens
aaaagctgcatgcaagataccaactgaggattataataccaagacagacacttcaatttcagattgagctgaaataaaaagaataaaagaaaagactcgttaaagtcagaacctgctggacaagaaggcctatggcaaatcctactgaagataaatttataagccttaagagaataaggactatgacaaaaacaatccaaaccacaataattcatggtaggaaatattgtggcatctacataataaaatggttgaggtccttcttttgttaattttgaggcctataattgctccttaactggtcaggtatcttagatatcagctggctcacaggagaatgtatcttcataatataaacccaaacgttgcttataataaactgtacatataaaaaatcttaaaagaaaagttcaatattgcaatatagatgtctaatttctaggtaaatttagtaaacagaatatgttcaacatggagaaaatcacactccagaaataagttaaaaatatttcaacatctaaaaaaaaattcagcagcacccacagatacagcacatagaagaaattaaaaaattatgaatagttttaataaataacactaatatcata

SEQ ID NO: 5557 - protein, 46 aa, Homo sapiens
MANPTEDKFISLKRIRTMTKTIQTTIIHGRKYCGIYIIKWLRSFFC

SEQ ID NO: 5558 - DNA, 572 bp, Homo sapiens
agaagaaaaactcttagaagccagcaacttttacaagcaccctgggacatttagttgaggggcttgagtgttgtataacacaataatttttagtcagaataatgttaatagagcctgtttttaaaagttgaaagattcgtactgtttttttgtttttaaaaagatttccatgccaaagagttttaagtattgatgctgaactgaaatggacaagcttgagttacctggaaaattcatttatgtggatggaacaccagctcttccaaggatgccaatagaagagagagattatgcagcgggcttttgattgatccaatgggaattacattgatctggtgtctggccttggttcttatcaagtggatcacctctaagaggcgtggagctatttcctatgacagttctgatcagactgcattatacattcgtatgctaggagatgtacgtgtaaggagccgagcaggatttgaatcagaaagaagaggttctcacccatatattgattttcgtattttccactctcaatctgaaattgaagtgtctgtctctgcaaggaatatcagaaggctact

SEQ ID NO: 5559 - protein, 84 aa, Homo sapiens
MGITLIWCLALVLIKWITSKRRGAISYDSSDQTALYIRMLGDVRVRSRAGFESERRGSHPYIDFRIFHSQSEIEVSVSARNIRR

SEQ ID NO: 5560 - DNA, 725 bp, Homo sapiens
ggaaaagccagcagtgaccccgcggtcagggctgaggacggcgactgcgccgggtgctttgggtttctggggtcggcaggccggaacgccgcctctagcgcgggacgagcacaccccatagcctaggcgcgctggaacgcacgaatttagcgctcggggggatgccccgaaacggtggggcctcgtgcgcacgcgccttggctggcgaggagctagggaagggagtcacggcggggcgcgaagggaactgcggatgagatagatgggggaaaacgtttgtcgggaggcgactccaacagagccccagggtgcagaacacaaggaaggctactgtcgccctcggccgcttgccagtctccctgggcgctgcggcggcgcggggcgctgggcctgcggcgcggcgtcgtgacgtcacggtggcggcagccgtggttggcgcaaggccggtcccccagcacgtcctcagccgccgaggagccatcagcttcagctccagctccgctctcttcggctgccccaatccccggcagctctctcagaggcgtggagctatttcctatgacagttctgatcagactgcattatacattcgtatgctaggagatgtacgtgtaaggagccgagcaggatttgaatcagaaagaagaggttctcacccatatattgattttcgtattttccactctcaatctgaaattgaagtgtctgtctctgcaaggaatatc

SEQ ID NO: 5561 - protein, 43 aa, Homo sapiens
MLGDVRVRSRAGFESERRGSHPYIDFRIFHSQSEIEVSVSARN

SEQ ID NO: 5562 - DNA, 872 bp, Homo sapiens
gagctggtcgctgctcctgagtcccgcgcgccctgggtctggccgctggctccagctgtcttttcttgcactgctttgctccgttcgtgctgcgctcgaactctgcagtccgggtacctgctcctctcggccgaggagccccagggcggcggggttccctttccgactttgcctgtgctggccccgcttgcaccccgtcccccctcgcctggagcgaggcgcgcgccggtcctggtaattggcgccgcggccgccgcggagccttcccgccggcggcccgagcggagggctggggttggggaggcgtgagcgcggcttcccagcccggggtcggtccccgcccgccctgcccccgtctcggcccggagcccccgagccgcggccccctcccactgcaggggccggcggccgcggcagggcgggcgccgcgcggaggcagggcgggcgtattcaatggaagtgtgttaccagctgccggtactgcccctggacaggccggtcccccagcacgtcctcagccgccgaggagccatcagcttcagctccagctccgctctcttcggctgccccaatccccggcagctctctcagaggcgtggagctatttcctatgacagttctgatcagactgcattatacattcgtatgctagcatgaaggaatggccacaggacaggtgactagtcattgtgggatggaattatagtcgatgaagtgagccttggaggaagtcatggtcctactcagagaaacagagagatgtacgtgtaaggagccgagcaggatttgaatcagaaagaagaggttctcacccatatattgattttcgtattttccactctcaatctgaaattgaagtgtctgtctctgca

SEQ ID NO: 5563 - protein, 67 aa, Homo sapiens
MEVCYQLPVLPLDRPVPQHVLSRRGAISFSSSSALFGCPNPRQLSQRRGAISYDSSDQTALYIRMLA

SEQ ID NO: 5564 - DNA, 2451 bp, Homo sapiens
agcagcctcggggagcagcccgggctgtttgttccgtcaccggggaaaggaggtacacacagtcgcgcgcgcacggacacacacacacacgcacgcacgcacacacaccggtggcgagttcgagccccgcggcccctgtccgcccgcgtgcgcccctcgacacagctcgcctcccgccccctgattcctgctgctgccgcccagaggagaaaggaacctctgcctcgaatttccccactgcgccgggcgctgcggagagcggcgagggtgggcgcgaggcggagaacgcgatgaatgagttctcccctcgcctcggagttgtctgagttggcggcgctgcgcccaggcttccggctctcagcgccccacgcgcgcgtggctccccgggctgccacccacgcccgcggccggggccgagccagccacgcagggcagccgaggctccggagctcctgtcccggccccagtccgggtaaaaggagggttgtccccagcggaggcgcacagccgcgcgttctccctgcactctcttcgcggtcccatctgttccccatggcgtctcatccgcaaacccggatccaggcttacctggagaagaacaagatcggtcccctgtttgaggaattaatgaccaagttaataactgagacacctgaccagccaatcccatttctcattgaccatcttcagtctaaacaagggaaccgtggacaacttcaaagaactttgtctggatctgcagctctatgggcagaaagtgaaaaatcagaatccaaaggaacaagaagggatttcagaagctatgataaaccttggcaattaaatgcaaagaagcctaaaaaatcaaaaagtgaccttgctgtgtctaatatttctccaccatcaccggactccaaatcatgtaaggaagtctcttattcaaatgctattcaaagcatgtaagtttatgttgttaagaaaatgaagaaaaggtattaattgaagcccaacttttcatctgatatttctggcctttaatcttagtgaatttcacttttactccgcatttacattgatcttcattcatacgtatgtatttgcttgcttatattctcaaacatgtgtaattcacttggacccttttgagtataatattccttgaagaatataaactgcatggagcgggtctcttgtttctcatagccaattgtagcattacatcatattgaaagcagtagctacctatatttaatgaagtatgtaaaagcaaattaaatctcttagaatagaagcaaagaagatttctattcaaaacatttcataaaatttcttaaaaaatatttcatctgggattttcctgaagtcctactcattaatttgtgatggaagtccctatattctcttcactactactgtaatatctttgtttttatgttactacaaaggaatgactgaggttgggtattttataaagaaaaaaggtttatttggcttacggttctgcagactgtacaagaagcatgacactagcatctgcttcttgtgagagccgcaggaagcttccactcatggcagaaggtgaaggggtgcacgcatcatatggcgagaggaaggagaaagagatagcagagggaggtgccaggctctttttaacagtcagatcttgtaagaaccaacagagtgagaagtcactccttaccatgaggacagcaccaagccactcatgagggattgacccccataacccaaataccttccaccaggccccacctccgatattggtgatcaaatttaccatgtgatttggagaggacaaatatccaagctataccacctaagtatcccttctctctcaatggcctactgctttggtagctactgggattctccagtgctctgctatccccacatatgtataaacatgtcaaaaatctcaggagcctctagcaaatcacagctattcttggaagaaaagagaacttgcaagctgttcttcttatacatcaattccttgtgcttgttacagggtgagatgtttgattttagtttcaacagagaaaggagtaggcagaaaatatttatctttgtttgaaaatgtttgaaaaaccactatgtgctaactggaatctgcatctgggtcatttgtgaaagcaactaaatttaactttgtgagcagcttcatttacatagtggtactcataaaaagtattgcattaaccacaccaagttcttgtgagaattatatgaagtgttaacaacttaaaatgttcttcagaaattgtgattgtaaccaaattgtcctgcttcatcagtttggtatatagaattaggtcccaacattttaaaaaatatacaagtttaaaatttgcatgtcttttttacaacagtatagccagtaatatccagcacagtgcctgtttcaattaataaatgctaaatgataaaaatgaataaaggaagaaataaaaaatg

SEQ ID NO: 5565 - protein, 215 aa, Homo sapiens [sequence omitted]

SEQ ID NO: 5566 - DNA, 1087 bp, Homo sapiens
agcagcctcggggagcagcccgggctgtttgttccgtcaccggggaaaggaggtacacacagtcgcgcgcgcacggacacacacacacacgcacgcacgcacacacaccggtggcgagttcgagccccgcggcccctgtccgcccgcgtgcgcccctcgacacagctcgcctcccgccccctgattcctgctgctgccgcccagaggagaaaggaacctctgcctcgaatttccccactgcgccgggcgctgcggagagcggcgagggtgggcgcgaggcggagaacgcgatgaatgagttctcccctcgcctcggagttgtctgagttggcggcgctgcgcccaggcttccggctctcagcgccccacgcgcgcgtggctccccgggctgccacccacgcccgcggccggggccgagccagccacgcagggcagccgaggctccggagctcctgtcccggccccagtccgggtaaaaggagggttgtccccagcggaggcgcacagccgcgcgttctccctgcactctcttcgcggtcccatctgttccccatggcgtctcatccgcaaacccggatccaggcttacctggagaagaacaagatcggtcccctgtttgaggaattaatgaccaagttaataactgagacacctgaccagccaatcccatttctcattgaccatcttcagtctaaacaagggaaccgtggacaacttcaaagaactttgtctggatctgcagctctatgggcagaaagtgaaaaatcagaatccaaaggaacaagaagggatttcagaagctatgataaaccttggcaattaaatgcaaagaagcctaaaaaatcaaaaagtgaccttgctgtgtctaatatttctccaccatcaccggactccaaatcattgccaaggtcagtagagcatccaaagtggaactggaggactaaaccacaaagccgtgattttgatgaattgaatcacatccttcaggagagcaagaagctggggaaagcccttgagaatctctctcgaagtaagttcatttacttgattataattgaaacagtgacatttaattcttctcttctga

SEQ ID NO: 5567 - protein, 263 aa, Homo sapiens
MSSPLASELSELAALRPGFRLSAPHARVAPRAATHARGRGRASHAGQPRLRSSCPGPSPGKRRVVPSGGAQPRVLPALSSRSHLFPMASHPQTRIQAYLEKNKIGPLFEELMTKLITETPDQPIPFLIDHLQSKQGNRGQLQRTLSGSAALWAESEKSESKGTRRDFRSYDKPWQLNAKKPKKSKSDLAVSNISPPSPDSKSLPRSVEHPKWNWRTKPQSRDFDELNHILQESKKLGKALENLSRSKFIYLIIIETVTFNSSL

SEQ ID NO: 5568 - DNA, 1072 bp, Homo sapiens
agcagcctcggggagcagcccgggctgtttgttccgtcaccggggaaaggaggtacacacagtcgcgcgcgcacggacacacacacacacgcacgcacgcacacacaccggtggcgagttcgagccccgcggcccctgtccgcccgcgtgcgcccctcgacacagctcgcctcccgccccctgattcctgctgctgccgcccagaggagaaaggaacctctgcctcgaatttccccactgcgccgggcgctgcggagagcggcgagggtgggcgcgaggcggagaacgcgatgaatgagttctcccctcgcctcggagttgtctgagttggcggcgctgcgcccaggcttccggctctcagcgccccacgcgcgcgtggctccccgggctgccacccacgcccgcggccggggccgagccagccacgcagggcagccgaggctccggagctcctgtcccggccccagtccgggtaaaaggagggttgtccccagcggaggcgcacagccgcgcgttctccctgcactctcttcgcggtcccatctgttccccatggcgtctcatccgcaaacccggatccaggcttacctggagaagaacaagatcggtcccctgtttgaggaattaatgaccaagttaataactgagacacctgaccagccaatcccatttctcattgaccatcttcagtctaaacaagggaaccgtggacaacttcaaagaactttgtctggatctgcagctctatgggcagaaagtgaaaaatcagaatccaaaggaacaagaagggatttcagaagctatgataaaccttggcaattaaatgcaaagaagcctaaaaaatcaaaaagtgaccttgctgtgtctaatatttctccaccatcaccggactccaaatcatgtattgcaatttcagatgaactcgataaggaaacagtgacatttaattcttctcttctgaggccccgtgtgattggagaatggattggtagagaagaaaatgatgctgatcccctagctgctgaaatgctacagcctccaattccaagaagcaaaaatgaccaatgggaaa

SEQ ID NO: 5569 - protein, 258 aa, Homo sapiens
MSSPLASELSELAALRPGFRLSAPHARVAPRAATHARGRGRASHAGQPRLRSSCPGPSPGKRRVVPSGGAQPRVLPALSSRSHLFPMASHPQTRIQAYLEKNKIGPLFEELMTKLITETPDQPIPFLIDHLQSKQGNRGQLQRTLSGSAALWAESEKSESKGTRRDFRSYDKPWQLNAKKPKKSKSDLAVSNISPPSPDSKSCIAISDELDKETVTFNSSLLRPRVIGEWIGREENDADPLAAEMLQPPIPRSKNDQW

SEQ ID NO: 5570 - DNA, 4078 bp, Homo sapiens
agcagcctcggggagcagcccgggctgtttgttccgtcaccggggaaaggaggtacacacagtcgcgcgcgcacggacacacacacacacgcacgcacgcacacacaccggtggcgagttcgagccccgcggcccctgtccgcccgcgtgcgcccctcgacacagctcgcctcccgccccctgattcctgctgctgccgcccagaggagaaaggaacctctgcctcgaatttccccactgcgccgggcgctgcggagagcggcgagggtgggcgcgaggcggagaacgcgatgaatgagttctcccctcgcctcggagttgtctgagttggcggcgctgcgcccaggcttccggctctcagcgccccacgcgcgcgtggctccccgggctgccacccacgcccgcggccggggccgagccagccacgcagggcagccgaggctccggagctcctgtcccggccccagtccgggtaaaaggagggttgtccccagcggaggcgcacagccgcgcgttctccctgcactctcttcgcggtcccatctgttccccatggcgtctcatccgcaaacccggatccaggcttacctggagaagaacaagatcggtcccctgtttgaggaattaatgaccaagttaataactgagacacctgaccagccaatcccatttctcattgaccatcttcagtctaaacaagggaaccgtggacaacttcaaagaactttgtctggatctgcagctctatgggcagaaagtgaaaaatcagaatccaaaggaacaagaagggatttcagaagctatgataaaccttggcaattaaatgcaaagaagcctaaaaaatcaaaaagtgaccttgctgtgtctaatatttctccaccatcaccggactccaaatcattgccaaggtcagtagagcatccaaagtggaactggaggactaaaccacaaagccgtgattttgatgaattgaatcacatccttcaggagagcaagaagctggggaaagcccttgagaatctctctcgaagtattgcaatttcagatgaactcgataaggaaacagtgacatttaattcttctcttctgaggccccgtgtgattggagaatggattggtagagaagaaaatgatgctgatcccctagctgctgaaatgctacagcctccaattccaagaagcaaaaatgaccaatgggaaagtgaagatagtggctctagtcctgcaggaagcttaaagatggagcctaagaacaaaggattaaaacagcagcaacagcaacataagaaactcctggccgcaatgctctctcaagattcttttgagtccatccacagccctaccccatctgtaacagaagaagatattgataatgaagatgatgcaatggaattgctgggtaattttaaaaattaataatttctcattttcttctttgacattgtaaaaaaaacgtgtggtgattaagagattttaaaagttttgaatagccttgtcttagggaaaagaaaccatttagtacatattttatttacattagactcacataaagttgcatgtaagaactaaattgaaataccctaagcatatgaatatttattagactgtattttgtgctttgtgtatgctgcactttaccttctgactacgtaatgaagcgttattctgtgtgcaactgtgatcaaaattcaagtctgtctgctttattctctgataataattgccttgtttacatctattgtctataaaatatacccaaagtacatatttcagccctcactccaaaatgtctaccttttattttgaggatgctttagaaaaatagaataaagttgaaaggggcagatagtaaattcaggttttatgttttccgtaaatgacgggaaagtttgcagagatttcaaagtttcttcaggcctgttactttcatgaaaccttattaatcttgtatatgtaggatatctttttatattttttaatgtagtatatgtatgtttttgcttcatcagaaatctcttcatataaatttttaaactgaacttctctttggaacatcatttttctgaagaaagaaaatgaaatgttatttcagagtgatccacatataaaacaatgagttttgaagtcagtggtatcaattattctgctacaaataaagagtatgattttcaaatactttataacaatatgctgttgtattttatttagaaagagaataaataatataattatttgaaagccttaaacacgttttacatatagaatatggaatctcagaaaaatataggccattttctgaagtttttgttaaaaatgagattccttggttttaagtgtttatggcagtaaaatactatcattataaaaaatgatatattgcttatcatttttgcataggcctacaaaggtgttatttggtcaatggtgacaggtttgaaagatgttttctgatgctgtaaaaactgcattcatgctaacattaaggagattgtatcatggcgttttcattacatgctgttggtcccttccaattgggtcttttcctcacctccaaatcattaacatggcagacgtgccctatgtggcagtggtagcttcattcaacaaacatttactgagcacttactctatgctaagcacttggctggggtctgggaacataaaaataaaatcattgtgatctgtgtttgaaggaattttacattgtaatgttcaagatacaatacgtcactacctgtgctaactgcgctaattggatgaagcacacagttgtgtataggggtaacacctaaagcagaggtaagggacagtgacccaggaatgtttcctagagaagccgattactctggctagtcctgaaaagcaaatagatgtaagctcagcaggtggggtgtggtcattgtaggtttgctcacgtaggtatgggctgttttgcgattgtgctccataactatacctgtaaatggttcctctgctttggacagtaacagggaaggggcaactgagatccagggtttctttcaggagatgcagttgtccactccatgctggtactccctagatctcagctgccctgactgaaggttctagtctcccaagctgaagaccgaggattgagtcttggagactatctaatgatgagcaattaataactagtcctcattaattctttttttagacattttagcctgtggtctgagcaagtttaataataagagatagttgaaggtttggactttcttcatgtaattccacatatctcagcacaggtggcaagcagtgtaataatgttggtctctaggtcatgagattatcctcttatagcttggaatgttacaagtccactggactttatcttaaaataatgccatattcaatttcttgtttttgaaatggattccagcaaaatgtatgtgattgtgtctatttcagaaaaatataaatgctaagttcttggaaatttatgtgaaatctaattttatagagtttatatagaatcattgtaagatgcaatagagacatctggtatttaaaatctttttgaatctacattttgtagatgtgtgtgctatagcttatgtgtttgtaaatgtttaacttgtctttgttatctataccaagatataactggctgaaaaatatttattatgcatggaaagcactctgtaaaccttgtgaagtgataaataagtgaaaggtataattgttagttgacattaatataaaaaaggattattcttcaataaaattggttgatttgaagggaaaaaatccttttagttgaactagtagaagttagtaataactattgactcttgttttgtttattaaggaaactagcattgttaatatatactgattaatatttaattattcacagttgtttaattatatatttgtggatttcttttctaaatgttttaggcatatgaaaatattatagtacaacacctgtaatttttaagtagatcaaatattttctgtaagattgctttaaatgctccttataaattcacattgcaaaagtaacttaatatggaattaacacttgtcagataataaaacagccaaacttgtg

SEQ ID NO: 5571 - protein, 373 aa, Homo sapiens
MSSPLASELSELAALRPGFRLSAPHARVAPRAATHARGRGRASHAGQPRLRSSCPGPSPGKRRVVPSGGAQPRVLPALSSRSHLFPMASHPQTRIQAYLEKNKIGPLFEELMTKLITETPDQPIPFLIDHLQSKQGNRGQLQRTLSGSAALWAESEKSESKGTRRDFRSYDKPWQLNAKKPKKSKSDLAVSNISPPSPDSKSLPRSVEHPKWNWRTKPQSRDFDELNHILQESKKLGKALENLSRSIAISDELDKETVTFNSSLLRPRVIGEWIGREENDADPLAAEMLQPPIPRSKNDQWESEDSGSSPAGSLKMEPKNKGLKQQQQQHKKLLAAMLSQDSFESIHSPTPSVTEEDIDNEDDAMELLGNFKN

SEQ ID NO: 5572 - DNA, 2688 bp, Homo sapiens
agcagcctcggggagcagcccgggctgtttgttccgtcaccggggaaaggaggtacacacagtcgcgcgcgcacggacacacacacacacgcacgcacgcacacacaccggtggcgagttcgagccccgcggcccctgtccgcccgcgtgcgcccctcgacacagctcgcctcccgccccctgattcctgctgctgccgcccagaggagaaaggaacctctgcctcgaatttccccactgcgccgggcgctgcggagagcggcgagggtgggcgcgaggcggagaacgcgatgaatgagttctcccctcgcctcggagttgtctgagttggcggcgctgcgcccaggcttccggctctcagcgccccacgcgcgcgtggctccccgggctgccacccacgcccgcggccggggccgagccagccacgcagggcagccgaggctccggagctcctgtcccggccccagtccgggtaaaaggagggttgtccccagcggaggcgcacagccgcgcgttctccctgcactctcttcgcggtcccatctgttccccatggcgtctcatccgcaaacccggatccaggcttacctggagaagaacaagatcggtcccctgtttgaggaattaatgaccaagttaataactgagacacctgaccagccaatcccatttctcattgaccatcttcagtctaaacaagggaaccgtggacaacttcaaagaactttgtctggatctgcagctctatgggcagaaagtgaaaaatcagaatccaaaggaacaagaagggatttcagaagctatgataaaccttggcaattaaatgcaaagaagcctaaaaaatcaaaaagtgaccttgctgtgtctaatatttctccaccatcaccggactccaaatcattgccaaggtcagtagagcatccaaagtggaactggaggactaaaccacaaagccgtgattttgatgaattgaatcacatccttcaggagagcaagaagctggggaaagcccttgagaatctctctcgaagtattgcaatttcagatgaactcgataaggaaacagtgacatttaattcttctcttctgaggccccgtgtgattggagaatggattggtagagaagaaaatgatgctgatcccctagctgctgaaatgctacagcctccaattccaagaagcaaaaatgaccaatgggaaagtgaagatagtggctctagtcctgcaggaagcttaaagatggagcctaagaacaaaggattaaaacagcagcaacagcaacataagaaactcctggccgcaatgctctctcaagattcttttgagtccatccacagccctaccccatctgtaacagaagaagatattgataatgaagatgatgcaatggaattgctggaggatcttaatgatttaagaatggagggagtaacaaccctggtaccttctgggagcaaatttaaccaaggccgtcctacttaccctgctgagcctcaggccaaggtcacactgaacatctgttcaaggtgtgccaggcttcaaggagacaacctggaagaaaggacagaagagtcactaccaatactccattctccagatgaaaaaatcccagattcattcgattccttgcctgggactgaagaagcactaatggaggagggtgacgaatttgagaaagcatctaaactaacaggacctggagaagcctccagtggagtaggacactcactgaaaaactacatggaagaagatgaatccttaaagcaattgcaggtagttcatcaaccatggatcttgccaagtgacacagaaagtgaaggagtggaagcagaacaagagaaacgttccgctgatcttcttctttgcgttccatgctcttcttgtcctacgctggtctactctggtttgtgaaacagagagaagaagttgcaagtggtccttaaagaaatgcagttattcaaatccttatgtatagttctaattttatttactatgtgtaatcatttagagaatggttatttttataatctcaataataaacaagtactatcgtagccagggggtgcccaagtatgtaatcagagaacactaatcctggcaaaggattgtggggtggtcaggaggccggctgccttttgacatggttagagtcctgggtttagattactttataaatagttattaagattaatatttgatatattaaatattgcctgattcaaataactttgcttaaaatttttctgtattttaacttgtctagggttttctacttcttctatttttataatattttctcattttttagattactaaacattctacttatccacatgtgccaagatgtgccatttaggtctctgcagaaattagctgtttggtatcatcacctgccatacatgttgtgtgcagcagtgagaagtatattctctaccactgctctttctcatgattattttctctattcctattaaaatgaataattgatatgttaattaagtaaagcaaatcaataaggaatgaaatgcatggcccaaaacatagaaaatgaaaatcgtttgaccatttatccaattattgaacccaattaagatgatccattttaaatttaatatatgctcgcttttggaatgtgttatgcattgatgttaagtgaatggatctaagtaaatctattgatatctctac

SEQ ID NO: 5573 - protein, 538 aa, Homo sapiens
MSSPLASELSELAALRPGFRLSAPHARVAPRAATHARGRGRASHAGQPRLRSSCPGPSPGKRRVVPSGGAQPRVLPALSSRSHLFPMASHPQTRIQAYLEKNKIGPLFEELMTKLITETPDQPIPFLIDHLQSKQGNRGQLQRTLSGSAALWAESEKSESKGTRRDFRSYDKPWQLNAKKPKKSKSDLAVSNISPPSPDSKSLPRSVEHPKWNWRTKPQSRDFDELNHILQESKKLGKALENLSRSIAISDELDKETVTFNSSLLRPRVIGEWIGREENDADPLAAEMLQPPIPRSKNDQWESEDSGSSPAGSLKMEPKNKGLKQQQQQHKKLLAAMLSQDSFESIHSPTPSVTEEDIDNEDDAMELLEDLNDLRMEGVTTLVPSGSKFNQGRPTYPAEPQAKVTLNICSRCARLQGDNLEERTEESLPILHSPDEKIPDSFDSLPGTEEALMEEGDEFEKASKLTGPGEASSGVGHSLKNYMEEDESLKQLQVVHQPWILPSDTESEGVEAEQEKRSADLLLCVPCSSCPTLVYSGL

SEQ ID NO: 5574 - DNA, 3653 bp, Homo sapiens
gcccaggtaaagccatgttttcctacacttaaaaatgtaaataaatatcccttagataatctggacagcagtttcttatatagcatgtctgagcactatattttgctgggctataaaaggtttaattgttgtttattggtacaataagggattctagttactaatatctacctgtagtcaataaagcaaacattgattggttgatcgaatcattgattcattcaataggtattgattcagcaccagctatgagctaggcagagttctaggccctacagagaaaactgatatcaaactaagaaagtctttttccaagtgctacagtaggggtgggggaggagagagataacaaactggtgagcaaatgttaaacaaaatgattctagagagtgctaaatactgtgaggaagataaaatgataaaataataaagacttctgaagattggttagggtaacctcttgtagaagtatcattggagaccgaaggatgacacaccagccatctgaccatgagagaacatcattcaaggcaaaggaaacagaccaccaccaacaaaaaaagatgcactggggaatttccagtaacacttttgttagctctcttaatatctgattttttgagcactagaacactgcctctcacagaatcctagcttaaaacagcaatgaacagactagaattctaggctaaaaccaacaagatgaaatgtgactgatatgaatataaatggtgcacataagttcacaaacccaattacacagcacaaaatgatatccacgtggcttgacagctgttcatattagaaaaatctagggattctaatggactacatattggagattgctctttgctgttcctgactggaaaaaaaaatatgtagatattacccttgggcagatttcagcccaacttaaagtatcattagagctgtccaaaatggaacagcctgctttgcacatagagaactcacattgctcaactcaaaaaagagcagaaggaaggaagaaggaaggacacgtaacagggatttttacaaaaacagaattcggtatttcttggagactactttaagacagtttttggtttctgtaagtctgtgacttattacttgttcctttaattccaataaaattttcttcatttttgttatttttaaaacattaagaagaaaaaaatgatattgatataaggtagatggtgaagtttagcaaaagtttagtttataatgatatctctcaaaatagcaaactgaagtttaaaattcttaagctataattttaaaggaatttagattaaacttttaatatgttgttggctaagtataatacaaaataaaaactaaataaatcttggttttgccacatattagctgtgtaatatagacaatttacttctctgttattgtttcctcagaatgagggcagtaacttgtagccgtctgaaaagattgttataagcatggagttagttgctgtatataaagcagttagaccagtacctgacaatattacatgctaagtaagtgcttgctattactgttgctgttattattaattataattgtgtgctctattctgccttcaggaattaatgaccaagttaataactgagacacctgaccagccaatcccatttctcattgaccatcttcagtctaaacaagggaaccgtggacaacttcaaagaactttgtctggatctgcagctctatgggcagaaagtgaaaaatcagaatccaaaggaacaagaagggatttcagaagctatgataaaccttggcaattaaatgcaaagaagcctaaaaaatcaaaaagtgaccttgctgtgtctaatatttctccaccatcaccggactccaaatcattgccaaggtcagtagagcatccaaagtggaactggaggactaaaccacaaagccgtgattttgatgaattgaatcacatccttcaggagagcaagaagctggggaaagcccttgagaatctctctcgaagtattgcaatttcagatgaactcgataaggaaacagtgacatttaattcttctcttctgaggccccgtgtgattggagaatggattggtagagaagaaaatgatgctgatcccctagctgctgaaatgctacagcctccaattccaagaagcaaaaatgaccaatgggaaagtgaagatagtggctctagtcctgcaggaagcttaaagatggagcctaagaacaaaggattaaaacagcagcaacagcaacataagaaactcctggccgcaatgctctctcaagattcttttgagtccatccacagccctaccccatctgtaacagaagaagatattgataatgaagatgatgcaatggaattgctggaggatcttaatgatttaagaatggagggagtaacaaccctggtaccttctgggagcaaatttaaccaaggccgtcctacttaccctgctgagcctcaggccaaggtcacactgaacatctgttcaaggtgtgccaggcttcaaggagacaacctggaagaaaggacagaagagtcactaccaatactccattctccagatgaaaaaatcccagattcattcgattccttgcctgggactgaagaagcactaatggaggagggtgacgaatttgagaaagcatctaaactaacaggacctggagaagcctccagtggagtaggacactcactgaaaaactacatggaagaagatgaatccttaaagcaattgcaggtagttcatcaaccatggatcttgccaagtgacacagaaagtgaaggagtggaagcagaacaagagaaacgttccgctgatcttcttctttgcgttccatgctcttcttgtcctacgctggtctactctggtttgtgaaacagagagaagaagttgcaagtggtccttaaagaaatgcagttattcaaatccttatgtatagttctaattttatttactatgtgtaatcatttagagaatggttatttttataatctcaataataaacaagtactatcgtagccagggggtgcccaagtatgtaatcagagaacactaatcctggcaaaggattgtggggtggtcaggaggccggctgccttttgacatggttagagtcctgggtttagattactttataaatagttattaagattaatatttgatatattaaatattgcctgattcaaataactttgcttaaaatttttctgtattttaacttgtctagggttttctacttcttctatttttataatattttctcattttttagattactaaacattctacttatccacatgtgccaagatgtgccatttaggtctctgcagaaattagctgtttggtatcatcacctgccatacatgttgtgtgcagcagtgagaagtatattctctaccactgctctttctcatgattattttctctattcctattaaaatgaataattgatatgttaattaagtaaagcaaatcaataaggaatgaaatgcatggcccaaaacatagaaaatgaaaatcgtttgaccatttatccaattattgaacccaattaagatgatccattttaaatttaatatatgctcgcttttggaatgtgttatgcattgatgttaagtgaatggatctaagtaaatctattgatatctctac

SEQ ID NO: 5575 - protein, 427 aa, Homo sapiens; identical to SEQ ID NO: 530

SEQ ID NO: 5576 - DNA, 3268 bp, Homo sapiens
gggggcggggagcccgaggggtggaagccggcggcggccgagcggggtcagttctctgtagtgtttgccaatgttggagccgtctgcaaagtgtccccggcaagaagaggctgcctaccacaaggactttagcttactttttaaagattgaagaaaaaaaagaagacagaaaaagaagaactcaaagatacacaaagtaatttgaaccaaggctcagaagtttttggagccgtgagggatacagcagtttggtcaatattgtcttaacatgcttcaaataaatcagatgttctcagtgcagctgagtcttggtgagcagacatgggaatccgaaggcagcagtataaagaaggctcagcaggctgttgccaataaagctttgactgaatctacgcttcccaaaccagttcagaagccacccaaaagtaatgttaacaataacccaggcagtataactccaactgtggaactgaatgggcttgctatgaaaaggggagagcctgccatctacaggccattagatccaaagccattcccaaattatagagctaattacaactttcggggcatgtacaatcagaggtatcattgcccagtgcctaagatcttttatgttcagctcactgtaggaaataatgaattttttggggaaggaaagactcgacaagctgctagacacaatgctgcaatgaaagccctccaagcactgcagaatgaacctattccagaaagatctcctcagaatggtgaatcaggaaaggatgtggatgatgacaaagatgcaaataagtctgagatcagcttagtgtttgaaattgctctgaagcgaaatatgcctgtcagttttgaggttattaaagaaagtggaccaccacatatgaaaagctttgttactcgagtgtcagtaggagagttctctgcagaaggagaaggaaatagcaaaaaactctccaagaagcgcgctgcgaccaccgtcttacaggagcttaaaaaacttccacctcttcctgtggtggaaaagccaaaactattttttaaaaaacgccctaaaacaatagtaaaggccggaccagaatatggccaagggatgaaccctattagccgcctggcgcaaattcaacaggccaaaaaggaaaaggagccggattatgttttgctttcagaaagaggaatgcctcgacgtcgagaatttgtgatgcaggtgaaggtaggcaatgaagttgctacaggaacaggacctaataaaaagatagccaaaaaaaatgctgcagaagcaatgctgttacaacttggttataaagcatccactaatcttcaggatcaacttgagaagacaggggaaaacaaaggatggagtggtccaaagcctgggtttcctgaaccaacaaataatactccaaaaggaattcttcatttgtctcctgatgtttatcaagagatggaagccagccgccacaaagtaatctctggcactactctaggctatttgtcacccaaagatatgaaccaaccttcaagctctttcttcagtatatctcccacatcgaatagttcagctacaattgccagggaactccttatgaatggaacatcttctacagctgaagccataggtttaaaaggaagttctcctactcccccttgttctccagtacaaccttcaaaacaactggaatatttagcaaggattcaaggctttcaggcagccttaagtgccttgaaacaattttctgaacaaggactggatccaatcgatggagcaatgaatatcgaaaaaggttctcttgaaaaacaagccaagcatctgagagagaaagcggacaataaccaggcacccccgggctccatcgctcaggactgcaagaaatcaaactcggccgtctagcagctcccagaacccgcggctgccaccgcatccttataaacctgtcagcacgcatgagggtgtctgtgttcagggaaatgaatgactaataccattatttgagtcttatgtgaagacaacactattctaacacgagagataatatacatggtactgtttattcaactggggaaaaataaaactttgagcatttcccttggaactcgagatcagatcataactcatttgcctagaggcagcagaaatctgatcctgctactggagcttaaaataacaagtaaagaaaagtgttagaaacaaagctaaaattttaacatgattaataatagagaagttgggtttggttctgttgttatgattgttttgtcgtggtgcttgtgttcagttatattctctctctctctcatttcaaatactgcttgacaattcgaaaatgaaccaatgatgtgctgtggaatgtgatggttgtcttcatatagagtcacatggtttctctttttatgcagatatttataatcttcatcctatatcagtaggaataactataaggtgcactacaaaaagatgtatgcaaacaaacatgttttaaatcaggtcagatatctgatgaaaaatacgaactaatgttaagagcaagtagtttcaacatactccaggaactgagaaacaaaacaaagcaattgtgggttttgagctccatatactcttagcaagtaagggggcgtcttgcccctatatatcatcttcccggattccactccctgttgtgggaatcgcgcccacccccatccgtgtgttgtagccactcacggtttgcatcaagagtgttttttgtaactgcctctggacttgggacagtgagtaggatcaaaaataaataatgtacatgacggggaagggaaaaacctgttggagttgcttccagccagccacgctccgggccagcatgttggaatccagcgtggagcagatgcagtaaaaatgtggttggtttctgtgtgaagcgctgttgttgttcttttgttctctcactctcatcttttaaatatcacctccgtgaaacccatccgaaaggccaccacccggcctagtcactgcccagcagtgggattagagaatggataggctgtacctgagaaactgcagagccgcctcctgggtgactcgggccgggttcctggccaacgtcatcgcattgttcaggctttctccttattgatttgcaaacattgtgcaatgagaaaacactacatggtctaactgctcgacccaacatgacaataggaatataattatgtaagatttcacaagcaaaaccaccacaaatcatgatctggctgactcacacgcgactggagaataaacaaacagcaacataaggaa

SEQ ID NO: 5577 - protein, 538 aa, Homo sapiens
MLQINQMFSVQLSLGEQTWESEGSSIKKAQQAVANKALTESTLPKPVQKPPKSNVNNNPGSITPTVELNGLAMKRGEPAIYRPLDPKPFPNYRANYNFRGMYNQRYHCPVPKIFYVQLTVGNNEFFGEGKTRQAARHNAAMKALQALQNEPIPERSPQNGESGKDVDDDKDANKSEISLVFEIALKRNMPVSFEVIKESGPPHMKSFVTRVSVGEFSAEGEGNSKKLSKKRAATTVLQELKKLPPLPVVEKPKLFFKKRPKTIVKAGPEYGQGMNPISRLAQIQQAKKEKEPDYVLLSERGMPRRREFVMQVKVGNEVATGTGPNKKIAKKNAAEAMLLQLGYKASTNLQDQLEKTGENKGWSGPKPGFPEPTNNTPKGILHLSPDVYQEMEASRHKVISGTTLGYLSPKDMNQPSSSFFSISPTSNSSATIARELLMNGTSSTAEAIGLKGSSPTPPCSPVQPSKQLEYLARIQGFQAALSALKQFSEQGLDPIDGAMNIEKGSLEKQAKHLREKADNNQAPPGSIAQDCKKSNSAV

SEQ ID NO: 5578 - DNA, 3442 bp, Homo sapiens
gcggcgggagcgccggggaggcgggcggaggcgggcggaggcggggggcggggagcccgaggggtggaagccggcggcggccgagcggggtcagttctctgtagtgtttgccaatgttggagccgtctgcaaagtgtccccggcaagaagaggctgcctaccacaaggactttagcttactttttaaagattgaagaaaaaaaagaagacagaaaaagaagaactcaaagatacacaaagtaatttgaaccaaggctcagaagtttttggagccgtgagggatacagcagtttggtcaatattgtcttaacatgcttcaaataaatcagcttctctccaagataaaatggcaaacccaaaagagaaaactgcaatgtgtctggtaaatgagttagcccgtttcaatagagtccaaccccagtataaacttctgaatgaaagagggcctgctcattcaaagatgttctcagtgcagctgagtcttggtgagcagacatgggaatccgaaggcagcagtataaagaaggctcagcaggctgttgccaataaagctttgactgaatctacgcttcccaaaccagttcagaagccacccaaaagtaatgttaacaataacccaggcagtataactccaactgtggaactgaatgggcttgctatgaaaaggggagagcctgccatctacaggccattagatccaaagccattcccaaattatagagctaattacaactttcggggcatgtacaatcagaggtatcattgcccagtgcctaagatcttttatgttcagctcactgtaggaaataatgaattttttggggaaggaaagactcgacaagctgctagacacaatgctgcaatgaaagccctccaagcactgcagaatgaacctattccagaaagatctcctcagaatggtgaatcaggaaaggatgtggatgatgacaaagatgcaaataagtctgagatcagcttagtgtttgaaattgctctgaagcgaaatatgcctgtcagttttgaggttattaaagaaagtggaccaccacatatgaaaagctttgttactcgagtgtcagtaggagagttctctgcagaaggagaaggaaatagcaaaaaactctccaagaagcgcgctgcgaccaccgtcttacaggagcttaaaaaacttccacctcttcctgtggtggaaaagccaaaactattttttaaaaaacgccctaaaacaatagtaaaggccggaccagaatatggccaagggatgaaccctattagccgcctggcgcaaattcaacaggccaaaaaggaaaaggagccggattatgttttgctttcagaaagaggaatgcctcgacgtcgagaatttgtgatgcaggtgaaggtaggcaatgaagttgctacaggaacaggacctaataaaaagatagccaaaaaaaatgctgcagaagcaatgctgttacaacttggttataaagcatccactaatcttcaggatcaacttgagaagacaggggaaaacaaaggatggagtggtccaaagcctgggtttcctgaaccaacaaataatactccaaaaggaattcttcatttgtctcctgatgtttatcaagagatggaagccagccgccacaaagtaatctctggcactactctaggctatttgtcacccaaagatatgaaccaaccttcaagctctttcttcagtatatctcccacatcgaatagttcagctacaattgccagggaactccttatgaatggaacatcttctacagctgaagccataggtttaaaaggaagttctcctactcccccttgttctccagtacaaccttcaaaacaactggaatatttagcaaggattcaaggctttcaggcagccttaagtgccttgaaacaattttctgaacaaggactggatccaatcgatggagcaatgaatatcgaaaaaggttctcttgaaaaacaagccaagcatctgagagagaaagcggacaataaccaggcacccccgggctccatcgctcaggactgcaagaaatcaaactcggccgtctagcagctcccagaacccgcggctgccaccgcatccttataaacctgtcagcacgcatgagggtgtctgtgttcagggaaatgaatgactaataccattatttgagtcttatgtgaagacaacactattctaacacgagagataatatacatggtactgtttattcaactggggaaaaataaaactttgagcatttcccttggaactcgagatcagatcataactcatttgcctagaggcagcagaaatctgatcctgctactggagcttaaaataacaagtaaagaaaagtgttagaaacaaagctaaaattttaacatgattaataatagagaagttgggtttggttctgttgttatgattgttttgtcgtggtgcttgtgttcagttatattctctctctctctcatttcaaatactgcttgacaattcgaaaatgaaccaatgatgtgctgtggaatgtgatggttgtcttcatatagagtcacatggtttctctttttatgcagatatttataatcttcatcctatatcagtaggaataactataaggtgcactacaaaaagatgtatgcaaacaaacatgttttaaatcaggtcagatatctgatgaaaaatacgaactaatgttaagagcaagtagtttcaacatactccaggaactgagaaacaaaacaaagcaattgtgggttttgagctccatatactcttagcaagtaagggggcgtcttgcccctatatatcatcttcccggattccactccctgttgtgggaatcgcgcccacccccatccgtgtgttgtagccactcacggtttgcatcaagagtgttttttgtaactgcctctggacttgggacagtgagtaggatcaaaaataaataatgtacatgacggggaagggaaaaacctgttggagttgcttccagccagccacgctccgggccagcatgttggaatccagcgtggagcagatgcagtaaaaatgtggttggtttctgtgtgaagcgctgttgttgttcttttgttctctcactctcatcttttaaatatcacctccgtgaaacccatccgaaaggccaccacccggcctagtcactgcccagcagtgggattagagaatggataggctgtacctgagaaactgcagagccgcctcctgggtgactcgggccgggttcctggccaacgtcatcgcattgttcaggctttctccttattgatttgcaaacattgtgcaatgagaaaacactacatggtctaactgctcgacccaacatgacaataggaatataattatgtaagatttcacaagcaaaaccaccacaaatcatgatctggctgactcacacgcgactggagaataaacaaacagcaacataaggaa

SEQ ID NO: 5579 - protein, 570 aa, Homo sapiens
MANPKEKTAMCLVNELARFNRVQPQYKLLNERGPAHSKMFSVQLSLGEQTWESEGSSIKKAQQAVANKALTESTLPKPVQKPPKSNVNNNPGSITPTVELNGLAMKRGEPAIYRPLDPKPFPNYRANYNFRGMYNQRYHCPVPKIFYVQLTVGNNEFFGEGKTRQAARHNAAMKALQALQNEPIPERSPQNGESGKDVDDDKDANKSEISLVFEIALKRNMPVSFEVIKESGPPHMKSFVTRVSVGEFSAEGEGNSKKLSKKRAATTVLQELKKLPPLPVVEKPKLFFKKRPKTIVKAGPEYGQGMNPISRLAQIQQAKKEKEPDYVLLSERGMPRRREFVMQVKVGNEVATGTGPNKKIAKKNAAEAMLLQLGYKASTNLQDQLEKTGENKGWSGPKPGFPEPTNNTPKGILHLSPDVYQEMEASRHKVISGTTLGYLSPKDMNQPSSSFFSISPTSNSSATIARELLMNGTSSTAEAIGLKGSSPTPPCSPVQPSKQLEYLARIQGFQAALSALKQFSEQGLDPIDGAMNIEKGSLEKQAKHLREKADNNQAPPGSIAQDCKKSNSAV

SEQ ID NO: 5580 - DNA, 2886 bp, Homo sapiens
gggggcggggagcccgaggggtggaagccggcggcggccgagcggggtcagttctctgtagtgtttgccaatgttggagccgtctgcaaagtgtccccggcaagaagaggctgcctaccacaaggactttagcttactttttaaagattgaagaaaaaaaagaagacagaaaaagaagaactcaaagatacacaaagtaatttgaaccaaggctcagaagtttttggagccgtgagggatacagcagtttggtcaatattgtcttaacatgcttcaaataaatcagatgttctcagtgcagctgagtcttggtgagcagacatgggaatccgaaggcagcagtataaagaaggctcagcaggctgttgccaataaagctttgactgaatctacgcttcccaaaccagttcagaagccacccaaaagtaatgttaacaataacccaggcagtataactccaactgtggaactgaatgggcttgctatgaaaaggggagagcctgccatctacaggccattagatccaaagccattcccaaattatagagctaattacaactttcggggcatgtacaatcagaggtatcattgcccagtgcctaagatcttttatgttcagctcactgtaggaaataatgaattttttggggaaggaaagactcgacaagctgctagacacaatgctgcaatgaaagccctccaagcactgcagaatgaacctattccagaaagatctcctcagaatggtgaatcaggaaaggatgtggatgatgacaaagatgcaaataagtctgagatcagcttagtgtttgaaattgctctgaagcgaaatatgcctgtcagttttgaggttattaaagaaagtggaccaccacatatgaaaagctttgttactcgagtgtcagtaggagagttctctgcagaaggagaaggaaatagcaaaaaactctccaagaagcgcgctgcgaccaccgtcttacaggagcttaaaaaacttccacctcttcctgtggtggaaaagccaaaactattttttaaaaaacgccctaaaacaatagtaaaggccggaccagaatatggccaagggatgaaccctattagccgcctggcgcaaattcaacaggccaaaaaggaaaaggagccggattatgttttgctttcagaaagaggaatgcctcgacgtcgagaatttgtgatgcaggtgaaggtaggcaatgaagttgctacaggaacaggacctaataaaaagatagccaaaaaaaatgctgcagaagcaatgctgttacaacttggttataaagcatccactaatcttcaggatcaacttgagaagacaggggaaaacaaaggatggagtggtccaaagcctgggtttcctgaaccaacaaataatactccaaaaggaattcttcatttgtctcctgatgtttatcaagagatggaagccagccgccacaaagtaatctctggcactactctaggctatttgtcacccaaagatatgaaccaaccttcaagctctttcttcagtatatctcccacatcgaatagttcagctacaattgccagggaactccttatgaatggaacatcttctacagctgaagccataggtttaaaaggaagttctcctactcccccttgttctccagtacaaccttcaaaacaactggaatatttagcaaggattcaaggctttcaggcagccttaagtgccttgaaacaattttctgaacaaggactggatccaatcgatggagcaatgaatatcgaaaaaggttctcttgaaaaacaagccaagcatctgagagagaaagcggacaataaccaggcacccccgggctccatcgctcaggactgcaagaaatcaaactcggccgtctagcagctcccagaacccgcggctgccaccgcatccttataaacctgtcagcacgcatgagggtgtctgtgttcagggaaatgaatgactaataccattatttgagtcttatgtgaagacaacactattctaacacgagagataatatacatggtactgtttattcaactggggaaaaataaaactttgagcatttcccttggaactcgagatcagatcataactcatttgcctagaggcagcagaaatctgatcctgctactggagcttaaaataacaagtaaagaaaagtgttagaaacaaagctaaaattttaacatgattaataatagagaagttgggtttggttctgttgttatgattgttttgtcgtggtgcttgtgttcagttatattctctctctctctcatttcaaatactgcttgacaattcgaaaatgaaccaatgatgtgctgtggaatgtgatggttgtcttcatatagagtcacatggtttctctttttatgcagatatttataatcttcatcctatatcagtaggaataactataaggtgcactacaaaaagatgtatgcaaacaaacatgttttaaatcaggtcagatatctgatgaaaaatacgaactaatgttaagagcaagtagtttcaacatactccaggaactgagaaacaaaacaaagcaattgtgggttttgagctccatatactcttagcaagtaagggggcgtcttgcccctatatatcatcttcccggattccactccctgttgtgggaatcgcgcccacccccatccgtgtgttgtagccactcacggtttgcatcaagagtgttttttgtaactgcctctggacttgggacagtgagtaggatcaaaaataaataatgtacatgacggggaagggaaaaacctgttggagttgcttccagccagccacgctccgggccagcatgttggaatccagcgtggagcagatgcagtaaaaatgtggttggtttctgtgtg

SEQ ID NO: 5581 - protein, 538 aa, Homo sapiens; identical to SEQ ID NO: 5577

SEQ ID NO: 5582 - DNA, 3060 bp, Homo sapiens
gcggcgggagcgccggggaggcgggcggaggcgggcggaggcggggggcggggagcccgaggggtggaagccggcggcggccgagcggggtcagttctctgtagtgtttgccaatgttggagccgtctgcaaagtgtccccggcaagaagaggctgcctaccacaaggactttagcttactttttaaagattgaagaaaaaaaagaagacagaaaaagaagaactcaaagatacacaaagtaatttgaaccaaggctcagaagtttttggagccgtgagggatacagcagtttggtcaatattgtcttaacatgcttcaaataaatcagcttctctccaagataaaatggcaaacccaaaagagaaaactgcaatgtgtctggtaaatgagttagcccgtttcaatagagtccaaccccagtataaacttctgaatgaaagagggcctgctcattcaaagatgttctcagtgcagctgagtcttggtgagcagacatgggaatccgaaggcagcagtataaagaaggctcagcaggctgttgccaataaagctttgactgaatctacgcttcccaaaccagttcagaagccacccaaaagtaatgttaacaataacccaggcagtataactccaactgtggaactgaatgggcttgctatgaaaaggggagagcctgccatctacaggccattagatccaaagccattcccaaattatagagctaattacaactttcggggcatgtacaatcagaggtatcattgcccagtgcctaagatcttttatgttcagctcactgtaggaaataatgaattttttggggaaggaaagactcgacaagctgctagacacaatgctgcaatgaaagccctccaagcactgcagaatgaacctattccagaaagatctcctcagaatggtgaatcaggaaaggatgtggatgatgacaaagatgcaaataagtctgagatcagcttagtgtttgaaattgctctgaagcgaaatatgcctgtcagttttgaggttattaaagaaagtggaccaccacatatgaaaagctttgttactcgagtgtcagtaggagagttctctgcagaaggagaaggaaatagcaaaaaactctccaagaagcgcgctgcgaccaccgtcttacaggagcttaaaaaacttccacctcttcctgtggtggaaaagccaaaactattttttaaaaaacgccctaaaacaatagtaaaggccggaccagaatatggccaagggatgaaccctattagccgcctggcgcaaattcaacaggccaaaaaggaaaaggagccggattatgttttgctttcagaaagaggaatgcctcgacgtcgagaatttgtgatgcaggtgaaggtaggcaatgaagttgctacaggaacaggacctaataaaaagatagccaaaaaaaatgctgcagaagcaatgctgttacaacttggttataaagcatccactaatcttcaggatcaacttgagaagacaggggaaaacaaaggatggagtggtccaaagcctgggtttcctgaaccaacaaataatactccaaaaggaattcttcatttgtctcctgatgtttatcaagagatggaagccagccgccacaaagtaatctctggcactactctaggctatttgtcacccaaagatatgaaccaaccttcaagctctttcttcagtatatctcccacatcgaatagttcagctacaattgccagggaactccttatgaatggaacatcttctacagctgaagccataggtttaaaaggaagttctcctactcccccttgttctccagtacaaccttcaaaacaactggaatatttagcaaggattcaaggctttcaggcagccttaagtgccttgaaacaattttctgaacaaggactggatccaatcgatggagcaatgaatatcgaaaaaggttctcttgaaaaacaagccaagcatctgagagagaaagcggacaataaccaggcacccccgggctccatcgctcaggactgcaagaaatcaaactcggccgtctagcagctcccagaacccgcggctgccaccgcatccttataaacctgtcagcacgcatgagggtgtctgtgttcagggaaatgaatgactaataccattatttgagtcttatgtgaagacaacactattctaacacgagagataatatacatggtactgtttattcaactggggaaaaataaaactttgagcatttcccttggaactcgagatcagatcataactcatttgcctagaggcagcagaaatctgatcctgctactggagcttaaaataacaagtaaagaaaagtgttagaaacaaagctaaaattttaacatgattaataatagagaagttgggtttggttctgttgttatgattgttttgtcgtggtgcttgtgttcagttatattctctctctctctcatttcaaatactgcttgacaattcgaaaatgaaccaatgatgtgctgtggaatgtgatggttgtcttcatatagagtcacatggtttctctttttatgcagatatttataatcttcatcctatatcagtaggaataactataaggtgcactacaaaaagatgtatgcaaacaaacatgttttaaatcaggtcagatatctgatgaaaaatacgaactaatgttaagagcaagtagtttcaacatactccaggaactgagaaacaaaacaaagcaattgtgggttttgagctccatatactcttagcaagtaagggggcgtcttgcccctatatatcatcttcccggattccactccctgttgtgggaatcgcgcccacccccatccgtgtgttgtagccactcacggtttgcatcaagagtgttttttgtaactgcctctggacttgggacagtgagtaggatcaaaaataaataatgtacatgacggggaagggaaaaacctgttggagttgcttccagccagccacgctccgggccagcatgttggaatccagcgtggagcagatgcagtaaaaatgtggttggtttctgtgtg

SEQ ID NO: 5583 - protein, 570 aa, Homo sapiens; identical to SEQ ID NO: 5579

SEQ ID NO: 5584 - DNA, 5156 bp, Homo sapiens
gggggcggggagcccgaggggtggaagccggcggcggccgagcggggtcagttctctgtagtgtttgccaatgttggagccgtctgcaaagtgtccccggcaagaagaggctgcctaccacaaggactttagcttactttttaaagattgaagaaaaaaaagaagacagaaaaagaagaactcaaagatacacaaagtaatttgaaccaaggctcagaagtttttggagccgtgagggatacagcagtttggtcaatattgtcttaacatgcttcaaataaatcagatgttctcagtgcagctgagtcttggtgagcagacatgggaatccgaaggcagcagtataaagaaggctcagcaggctgttgccaataaagctttgactgaatctacgcttcccaaaccagttcagaagccacccaaaagtaatgttaacaataacccaggcagtataactccaactgtggaactgaatgggcttgctatgaaaaggggagagcctgccatctacaggccattagatccaaagccattcccaaattatagagctaattacaactttcggggcatgtacaatcagaggtatcattgcccagtgcctaagatcttttatgttcagctcactgtaggaaataatgaattttttggggaaggaaagactcgacaagctgctagacacaatgctgcaatgaaagccctccaagcactgcagaatgaacctattccagaaagatctcctcagaatggtgaatcaggaaaggatgtggatgatgacaaagatgcaaataagtctgagatcagcttagtgtttgaaattgctctgaagcgaaatatgcctgtcagttttgaggttattaaagaaagtggaccaccacatatgaaaagctttgttactcgagtgtcagtaggagagttctctgcagaaggagaaggaaatagcaaaaaactctccaagaagcgcgctgcgaccaccgtcttacaggagcttaaaaaacttccacctcttcctgtggtggaaaagccaaaactattttttaaaaaacgccctaaaacaatagtaaaggccggaccagaatatggccaagggatgaaccctattagccgcctggcgcaaattcaacaggccaaaaaggaaaaggagccggattatgttttgctttcagaaagaggaatgcctcgacgtcgagaatttgtgatgcaggtgaaggtaggcaatgaagttgctacaggaacaggacctaataaaaagatagccaaaaaaaatgctgcagaagcaatgctgttacaacttggttataaagcatccactaatcttcaggatcaacttgagaagacaggggaaaacaaaggatggagtggtccaaagcctgggtttcctgaaccaacaaataatactccaaaaggaattcttcatttgtctcctgatgtttatcaagagatggaagccagccgccacaaagtaatctctggcactactctaggctatttgtcacccaaagatatgaaccaaccttcaagctctttcttcagtatatctcccacatcgaatagttcagctacaattgccagggaactccttatgaatggaacatcttctacagctgaagccataggtttaaaaggaagttctcctactcccccttgttctccagtacaaccttcaaaacaactggaatatttagcaaggattcaaggctttcaggtatgaattaaaagcaaaaacaaaaaacaaaacaattcattagcctcagattcttcatctgtatacatcacaaggctcattcttgcctgctagtatggcctacatgccacttacgttttaagttatttaggaacacaaaggacagacaaaaaagccatatgcacatgcctcattttctcttatttttgatctatctagtaattcttttgctgcctgtctcttctccattttccttcttcttttttaagcatttttcatattcttcactgtcttctatttggtcttgattaggtgcatctatctcttcgctctgtcttccacaaacaaaaattctgccttcagacatttggtgttagtatttcacactcagttctccctttttttacataaggattgagtttctttttatgatgattttacctttatagcaattttgaattttgcattctattgctagtattgattcaggtacaccattaagatacaacattctagaagtctattaccttaggagttaattaaacatgatatttgaagaataatgaaatgctttatagttgtttgaggcataacaatgtgtatttgttttactggatcatgttttgaactgactagggagggtagcacctgcctcagatagtaccaacaattctgtttcactgggtagtctaaaactagcttatagtttaacttaacttgttgtgtatgtgaatttagggatggaaactttttttcccctatttattctttgtttccttctgggaaaaaaccccacaaaaatcagcactcctttatggatacattggagcttttgaaagaattgtaaactctaggaaggggaaatatctgtgtcttgatttcttagttgccttgaaaatcatgtactgaactgtaaccgctaacttgactggatgaactagtttgcttgtgtgtagagagtgtattgcttcctcagatttcactgttttcatctccttttccatcttagtctttattccttaagaccaaaaactgtaatatcctttagaaatgctctagaagatctgtattgtgtagaatgatcatgtatttataaatattttacaagtttagattataaaatgaaaaagaaggtcatgtgttttggggggtattttgcatgttcggatttttttttcacttcaccgaacccttctgattctttcaaactattgccaggtagttgttagtgtttctaattggactcttaatatgaacttcaagaagctgttaccagttatcggctctgtcatctgaaattttaaccacttaatttaaagttacaattttagaatttgtttttgttgttttaccttaagaaacacaataaatcactgtttaaaaaagatctcaatttatataaagtactggaaaaaagctaagtaatttttagttctatctataatctccgtaggatgaattagaaataaattgtgatgaaaagaaattaactgcttatttatgaatctaatcatttagaaatgtctgagagtaacactgcattcttatagaaacaaagcacaaattgcattcaagctctgaattgattttttgcttggagctgttgttacagtagctgtaattttgctaccagaatgtcttaattttttaaatttgtttttatttctaagctcttggcaatgacaataattataattttaacatatcttcactgtagtcaacatgtagagtctgcttccctcattattgcattgctaaggcctttttaaaaagcttatgcttacataatatactcttttttatggacacgttatatgtttccaaatctgtgtattgtgatttttacatactaatgaatataaacaggtgattttaaaatattactgtgcttctttggttgaatgagctggtattgatgtaaaatactctgtcattgatggaccactacctgcagctaagcagtgagcagaatctccgggaaatgacttagtctggccacatgcatagcccatcttcataatgtcgcagcagaaggttctttgtggttaaaagttttaaagcctatttctttataggtaaccctctcaggtatatttacctggtagaaaaacatgtagattgtttctattacttaaatgttttaattggactgtagtttagaaattacaggaccagcttgttacagattatacactattctgttacttttatttctgaaacttaaaaacaataaattctttttctgtgtttctaggttagaacttttttattttattgcacactgaacagatactgttgcttattgaatattgtgtaaacccttctttggctttccttgcccattgcaatttgatttaagcctactagagccattgtatgtgacagctatattgtattacaaagtaaaaatatatgagtgtattgaaaacaaagttgttttaacttttaattttgtttcatcacccagtctttaatttgaatttataaattacaaaaagctactttgatcaactgaatgtaggtatccaagctcaaattcttttaaacctacaaaataggtaaaattattatacaattaaagttattaataaaactgacttaagagagcagaatgtgaccgaacacttacacattctcagcagttctgttattcttgtttggtctcacctaaagtttttatcgtattttagaatcgaaccttttggatctctgtcagaaatgaatgtttatttctttcaagttttatcaagtattaatacgttttatttatattcttttaaatgttttattcagtagttctgtgaacttcagactttgttgttcagcctaatcgtatgcttctgtaacttctacacattttataagaactcattcaaagttgtagtcctaccatagtgtttcagggttccttgttgtgtacacttttactataatggcaaaatgtttcaaaatcattcagctttttaaagaaacttattatgcaaaagacactcttgaaatgctgtgcatttgagctgaagtgaaagaatttgtttcatgttgtactttgcattattttaagttttcacatctttaatatgcttttctatgctaattatattagaaatctataaatataagtggtttctttgtttaaactagtcattaaaaattaggttgaaaatgaaagtggattattttagcaaatcgtcccttctagatggatttcatttcagtttgctattctgtgcctctcctgtgagcatcatccactgtaacagtgttgtttgtgaaaccttccgagtatagtgtaacaaactaggttttttccctcacataaataatataaagaaacacttagttggtgttttagttaaactataattagtttattgtccaaaatcagggagtgttttatggaggggcatttcattattgatcataatcatgccatttccagcaagatgagattgtccacttaaattaaaatcttcct

SEQ ID NO: 5585 - protein, 479 aa, Homo sapiens
MLQINQMFSVQLSLGEQTWESEGSSIKKAQQAVANKALTESTLPKPVQKPPKSNVNNNPGSITPTVELNGLAMKRGEPAIYRPLDPKPFPNYRANYNFRGMYNQRYHCPVPKIFYVQLTVGNNEFFGEGKTRQAARHNAAMKALQALQNEPIPERSPQNGESGKDVDDDKDANKSEISLVFEIALKRNMPVSFEVIKESGPPHMKSFVTRVSVGEFSAEGEGNSKKLSKKRAATTVLQELKKLPPLPVVEKPKLFFKKRPKTIVKAGPEYGQGMNPISRLAQIQQAKKEKEPDYVLLSERGMPRRREFVMQVKVGNEVATGTGPNKKIAKKNAAEAMLLQLGYKASTNLQDQLEKTGENKGWSGPKPGFPEPTNNTPKGILHLSPDVYQEMEASRHKVISGTTLGYLSPKDMNQPSSSFFSISPTSNSSATIARELLMNGTSSTAEAIGLKGSSPTPPCSPVQPSKQLEYLARIQGFQV

SEQ ID NO: 5586 - DNA, 4105 bp, Homo sapiens
gggggcggggagcccgaggggtggaagccggcggcggccgagcggggtcagttctctgtagtgtttgccaatgttggagccgtctgcaaagtgtccccggcaagaagaggctgcctaccacaaggactttagcttactttttaaagattgaagaaaaaaaagaagacagaaaaagaagaactcaaagatacacaaagtaatttgaaccaaggctcagaagtttttggagccgtgagggatacagcagtttggtcaatattgtcttaacatgcttcaaataaatcagatgttctcagtgcagctgagtcttggtgagcagacatgggaatccgaaggcagcagtataaagaaggctcagcaggctgttgccaataaagctttgactgaatctacgcttcccaaaccagttcagaagccacccaaaagtaatgttaacaataacccaggcagtataactccaactgtggaactgaatgggcttgctatgaaaaggggagagcctgccatctacaggccattagatccaaagccattcccaaattatagagctaattacaactttcggggcatgtacaatcagaggtatcattgcccagtgcctaagatcttttatgttcagctcactgtaggaaataatgaattttttggggaaggaaagactcgacaagctgctagacacaatgctgcaatgaaagccctccaagcactgcagaatgaacctattccagaaagatctcctcagaatggtgaatcaggaaaggatgtggatgatgacaaagatgcaaataagtctgagatcagcttagtgtttgaaattgctctgaagcgaaatatgcctgtcagttttgaggttattaaagaaagtggaccaccacatatgaaaagctttgttactcgagtgtcagtaggagagttctctgcagaaggagaaggaaatagcaaaaaactctccaagaagcgcgctgcgaccaccgtcttacaggagcttaaaaaacttccacctcttcctgtggtggaaaagccaaaactattttttaaaaaacgccctaaaacaatagtaaaggccggaccagaatatggccaagggatgaaccctattagccgcctggcgcaaattcaacaggccaaaaaggaaaaggagccggattatgttttgctttcagaaagaggaatgcctcgacgtcgagaatttgtgatgcaggtgaaggtaggcaatgaagttgctacaggaacaggacctaataaaaagatagccaaaaaaaatgctgcagaagcaatgctgttacaacttggttataaagcatccactaatcttcaggatcaacttgagaagacaggggaaaacaaaggatggagtggtccaaagcctgggtttcctgaaccaacaaataatactccaaaaggaattcttcatttgtctcctgatgtttatcaagagatggaagccagccgccacaaagtaatctctggcactactctaggctatttgtcacccaaagatatgaaccaaccttcaagctctttcttcagtatatctcccacatcgaatagttcagctacaattgccagggaactccttatgaatggaacatcttctacagctgaagccataggtttaaaaggaagttctcctactcccccttgttctccagtacaaccttcaaaacaactggaatatttagcaaggattcaaggctttcaggtatgaattaaaagcaaaaacaaaaaacaaaacaattcattagcctcagattcttcatctgtatacatcacaaggctcattcttgcctgctagtatggcctacatgccacttacgttttaagttatttaggaacacaaaggacagacaaaaaagccatatgcacatgcctcattttctcttatttttgatctatctagtaattcttttgctgcctgtctcttctccattttccttcttcttttttaagcatttttcatattcttcactgtcttctatttggtcttgattaggtgcatctatctcttcgctctgtcttccacaaacaaaaattctgccttcagacatttggtgttagtatttcacactcagttctccctttttttacataaggattgagtttctttttatgatgattttacctttatagcaattttgaattttgcattctattgctagtattgattcaggtacaccattaagatacaacattctagaagtctattaccttaggagttaattaaacatgatatttgaagaataatgaaatgctttatagttgtttgaggcataacaatgtgtatttgttttactggatcatgttttgaactgactagggagggtagcacctgcctcagatagtaccaacaattctgtttcactgggtagtctaaaactagcttatagtttaacttaacttgttgtgtatgtgaatttagggatggaaactttttttcccctatttattctttgtttccttctgggaaaaaaccccacaaaaatcagcactcctttatggatacattggagcttttgaaagaattgtaaactctaggaaggggaaatatctgtgtcttgatttcttagttgccttgaaaatcatgtactgaactgtaaccgctaacttgactggatgaactagtttgcttgtgtgtagagagtgtattgcttcctcagatttcactgttttcatctccttttccatcttagtctttattccttaagaccaaaaactgtaatatcctttagaaatgctctagaagatctgtattgtgtagaatgatcatgtatttataaatattttacaagtttagattataaaatgaaaaagaaggtcatgtgttttggggggtattttgcatgttcggatttttttttcacttcaccgaacccttctgattctttcaaactattgccaggtagttgttagtgtttctaattggactcttaatatgaacttcaagaagctgttaccagttatcggctctgtcatctgaaattttaaccacttaatttaaagttacaattttagaatttgtttttgttgttttaccttaagaaacacaataaatcactgtttaaaaaagatctcaatttatataaagtactggaaaaaagctaagtaatttttagttctatctataatctccgtaggatgaattagaaataaattgtgatgaaaagaaattaactgcttatttatgaatctaatcatttagaaatgtctgagagtaacactgcattcttatagaaacaaagcacaaattgcattcaagctctgaattgattttttgcttggagctgttgttacagtagctgtaattttgctaccagaatgtcttaattttttaaatttgtttttatttctaagctcttggcaatgacaataattataattttaacatatcttcactgtagtcaacatgtagagtctgcttccctcattattgcattgctaaggcctttttaaaaagcttatgcttacataatatactcttttttatggacacgttatatgtttccaaatctgtgtattgtgatttttacatactaatgaatataaacaggtgattttaaaatattactgtgcttctttggttgaatgagctggtattgatgtaaaatactctgtcattgatggaccactacctgcagctaagcagtgagcagaatctccgggaaatgacttagtctggccacatgcatagcccatcttcataatgtcgcagcagaaggttctttgtggttaaaagttttaaagcctatttctttataggtaaccctctcaggtatatttacctggtagaaaaacatgtagattgtttctattacttaaatgttttaattggactgtagtttagaaattacaggaccagcttgttacagattatacactattctgttacttttatttctgaaacttaaaaacaataaattctttttctgtgtttctaggttagaacttttttattttattgcacactgaacagatactgttgcttattgaatattgtgtaaacccttctttggctttccttgcccattgcaatttgatttaagcctactagagccattgtatgtgacagctatattgtattacaaagtaaaaatatatgagtgtattg

SEQ ID NO: 5587 - protein, 479 aa, Homo sapiens; identical to SEQ ID NO: 5585

SEQ ID NO: 5588 - DNA, 2679 bp, Homo sapiens
cggggagcccgaggggtggaagccggcggcggccgagcggggtcagttctctgtagtgtttgccaatgttggagccgtctgcaaagtgtccccggcaagaaggtatcattgcccagtgcctaagatcttttatgttcagctcactgtaggaaataatgaattttttggggaaggaaagactcgacaagctgctagacacaatgctgcaatgaaagccctccaagcactgcagaatgaacctattccagaaagatctcctcagaatggtgaatcaggaaaggatgtggatgatgacaaagatgcaaataagtctgagatcagcttagtgtttgaaattgctctgaagcgaaatatgcctgtcagttttgaggttattaaagaaagtggaccaccacatatgaaaagctttgttactcgagtgtcagtaggagagttctctgcagaaggagaaggaaatagcaaaaaactctccaagaagcgcgctgcgaccaccgtcttacaggagcttaaaaaacttccacctcttcctgtggtggaaaagccaaaactattttttaaaaaacgccctaaaacaatagtaaaggccggaccagaatatggccaagggatgaaccctattagccgcctggcgcaaattcaacaggccaaaaaggaaaaggagccggattatgttttgctttcagaaagaggaatgcctcgacgtcgagaatttgtgatgcaggtgaaggtaggcaatgaagttgctacaggaacaggacctaataaaaagatagccaaaaaaaatgctgcagaagcaatgctgttacaacttggttataaagcatccactaatcttcaggatcaacttgagaagacaggggaaaacaaaggatggagtggtccaaagcctgggtttcctgaaccaacaaataatactccaaaaggaattcttcatttgtctcctgatgtttatcaagagatggaagccagccgccacaaagtaatctctggcactactctaggctatttgtcacccaaagatatgaaccaaccttcaagctctttcttcagtatatctcccacatcgaatagttcagctacaattgccagggaactccttatgaatggaacatcttctacagctgaagccataggtttaaaaggaagttctcctactcccccttgttctccagtacaaccttcaaaacaactggaatatttagcaaggattcaaggctttcaggtatgaattaaaagcaaaaacaaaaaacaaaacaattcattagcctcagattcttcatctgtatacatcacaaggctcattcttgcctgctagtatggcctacatgccacttacgttttaagttatttaggaacacaaaggacagacaaaaaagccatatgcacatgcctcattttctcttatttttgatctatctagtaattcttttgctgcctgtctcttctccattttccttcttcttttttaagcatttttcatattcttcactgtcttctatttggtcttgattaggtgcatctatctcttcgctctgtcttccacaaacaaaaattctgccttcagacatttggtgttagtatttcacactcagttctccctttttttacataaggattgagtttctttttatgatgattttacctttatagcaattttgaattttgcattctattgctagtattgattcaggtacaccattaagatacaacattctagaagtctattaccttaggagttaattaaacatgatatttgaagaataatgaaatgctttatagttgtttgaggcataacaatgtgtatttgttttactggatcatgttttgaactgactagggagggtagcacctgcctcagatagtaccaacaattctgtttcactgggtagtctaaaactagcttatagtttaacttaacttgttgtgtatgtgaatttagggatggaaactttttttcccctatttattctttgtttccttctgggaaaaaaccccacaaaaatcagcactcctttatggatacattggagcttttgaaagaattgtaaactctaggaaggggaaatatctgtgtcttgatttcttagttgccttgaaaatcatgtactgaactgtaaccgctaacttgactggatgaactagtttgcttgtgtgtagagagtgtattgcttcctcagatttcactgttttcatctccttttccatcttagtctttattccttaagaccaaaaactgtaatatcctttagaaatgctctagaagatctgtattgtgtagaatgatcatgtatttataaatattttacaagtttagattataaaatgaaaaagaaggtcatgtgttttggggggtattttgcatgttcggatttttttttcacttcaccgaacccttctgattctttcaaactattgccaggtagttgttagtgtttctaattggactcttaatatgaacttcaagaagctgttaccagttatcggctctgtcatctgaaattttaaccacttaatttaaagttacaattttagaatttgtttttgttgttttaccttaagaaacacaataaatcactgtttaaaaaagatctcaatttatataaagtactggaaaaaagctaagtaatttttagttctatctataatctccgtaggatgaattagaaataaattgtgatg

SEQ ID NO: 5589 - protein, 339 aa, Homo sapiens
MKALQALQNEPIPERSPQNGESGKDVDDDKDANKSEISLVFEIALKRNMPVSFEVIKESGPPHMKSFVTRVSVGEFSAEGEGNSKKLSKKRAATTVLQELKKLPPLPVVEKPKLFFKKRPKTIVKAGPEYGQGMNPISRLAQIQQAKKEKEPDYVLLSERGMPRRREFVMQVKVGNEVATGTGPNKKIAKKNAAEAMLLQLGYKASTNLQDQLEKTGENKGWSGPKPGFPEPTNNTPKGILHLSPDVYQEMEASRHKVISGTTLGYLSPKDMNQPSSSFFSISPTSNSSATIARELLMNGTSSTAEAIGLKGSSPTPPCSPVQPSKQLEYLARIQGFQV

SEQ ID NO: 5590 - DNA, 2204 bp, Homo sapiens
ggggagcccgaggggtggaagccggcggcggccgagcggggtcagttctctgtagtgtttgccaatgttggagccgtctgcaaagtgtccccggcaagaagaggctgcctaccacaaggactttagcttactttttaaagattgaagaaaaaaaagaagacagaaaaagaagaactcaaagatacacaaagtaatttgaaccaaggctcagaagtttttggagccgtgagggatacagcagtttggtcaatattgtcttaacatgcttcaaataaatcagatgttctcagtgcagctgagtcttggtgagcagacatgggaatccgaaggcagcagtataaagaaggctcagcaggctgttgccaataaagctttgactgaatctacgcttcccaaaccagttcagaagccacccaaaagtaatgttaacaataacccaggcagtataactccaactgtggaactgaatgggcttgctatgaaaaggggagagcctgccatctacaggccattagatccaaagccattcccaaattatagagctaattacaactttcggggcatgtacaatcagagatgaagagttacctaagtcagtgttataagatgttccatggtaaaagggatttgaagacaaattttggaaatgctgcatactgtatctctcttgaagactcctaaaggtgtcatgaagaaaactgtttacctaagtggttcctaacactgactgaacatcaggctttcctgggcagctttaaaaattctgatgcccagactttatgtggactaattaaatcagaatttctggttgcagagcttgaaccgcactgttttttaaaacttccccaagtaattctatgtccagtcatttaaatactggtccccacaacccaaaacacattaccctctattaacatcaaagattatgagatggtttgaatagtcatagaacttttgaaagaagtaaagaagaagggaagaattacagttaaccacactccttaaggataattgttctggacagctagcttccccacattgctgagggttcacttttttttggaacctaaaactttacttagttcagtaattttggatagaaatatttctaaaagttatggcatatattttttatatccttaaatagaaaatgccacaattcttagcatgaagaatccttgctgttgactcattatcaaccttataaacaataagtattacaagcctcatgagatatgtacatggtttgtccttataccagataatcctagacatctgtttctagagtacccaagtgtgcttttagttactttccaaatcattgttgtcagtcagattgtcatcttatttcttgtttttgtcagtgcacctttgcatattgcttgctcctttctttgatgcttttcaattgctattatcttgaaaaccgatattattgtttgaatttggggcaaagtaagagtagcagggctttaattacgccctaagatgtccccttaactgtggaaaacatcgagttttatctagttggtgaatttttttacttcagaatttatttttttctgtcataaattttgctaaggatctgcattttgagtagaatgaagtggccagatagttgaataatggtttggtgaatatctatatgtatatatgtatgtgtatgtgtgttacacatacatatttaatgacatgaagtactttggttgcttggaattggacagaaataacagtttttttttttttttgggacagagtcttgctctgtcacctaggctggagtgcaatggcgcgatctctgctcactgcaacttccacctcccaggttcaagtgattctcctgccgcagcctcccgagtagctgggattgcaggcgcctgccagcatgcccgccagcacgcctggctaatttttttttttgtatttttagtagagatggggtttcactatgttggccaggctggtcttggaactcctgatctcgtgatctgtgtgccttggcctcccaaagtgctgggattacaggcgtgagccaccgcgcctggccagaaataacagttttaataaatttcatgaaatcactttcttgtatgttaaaggaaacagaaagggttcatttgtgcatggtttagtctttcttttgaatgtggaagtttttcttcttatttgtgtgtctaaaaaaattaaaaagtgaaacattttcc

SEQ ID NO: 5591 - protein, 105 aa, Homo sapiens
MLQINQMFSVQLSLGEQTWESEGSSIKKAQQAVANKALTESTLPKPVQKPPKSNVNNNPGSITPTVELNGLAMKRGEPAIYRPLDPKPFPNYRANYNFRGMYNQR

SEQ ID NO: 5592 - DNA, 1110 bp, Homo sapiens
gcggcgggagcgccggggaggcgggcggaggcgggcggaggcggggggcggggagcccgaggggtggaagccggcggcggccgagcggggtcagttctctgtagtgtttgccaatgttggagccgtctgcaaagtgtccccggcaagaagaggctgcctaccacaaggactttagcttactttttaaagattgaagaaaaaaaagaagacagaaaaagaagaactcaaagatacacaaagtaatttgaaccaaggctcagaagtttttggagccgtgagggatacagcagtttggtcaatattgtcttaacatgcttcaaataaatcagcttctctccaagataaaatggcaaacccaaaagagaaaactgcaatgtgtctggtaaatgagttagcccgtttcaatagagtccaaccccagtataaacttctgaatgaaagagggcctgctcattcaaagatgttctcagtgcagctgagtcttggtgagcagacatgggaatccgaaggcagcagtataaagaaggctcagcaggctgttgccaataaagctttgactgaatctacgcttcccaaaccagttcagaagccacccaaaagtaatgttaacaataacccaggcagtataactccaactgtggaactgaatgggcttgctatgaaaaggggagagcctgccatctacaggccattagatccaaagccattcccaaattatagagctaattacaactttcggggcatgtacaatcagagatgaagagttacctaagtcagtgttataagatgttccatggtaaaagggatttgaagacaaattttggaaatgctgcatactgtatctctcttgaagactcctaaaggtgtcatgaagaaaactgtttacctaagtggttcctaacactgactgaacatcaggctttcctgggcagctttaaaaattctgatgcccagactttatgtggactaattaaatcagaatttctggttgcagagcttgaaccgcactgttttttaaaacttccccaagtaattctatgtccagtcatttaaatactggtccccacaacccaaaacacattaccctctattaacatcaaagattatgag

SEQ ID NO: 5593 - protein, 137 aa, Homo sapiens
MANPKEKTAMCLVNELARFNRVQPQYKLLNERGPAHSKMFSVQLSLGEQTWESEGSSIKKAQQAVANKALTESTLPKPVQKPPKSNVNNNPGSITPTVELNGLAMKRGEPAIYRPLDPKPFPNYRANYNFRGMYNQR

SEQ ID NO: 5594 - DNA, 814 bp, Homo sapiens
ggggagcccgaggggtggaagccggcggcggccgagcggggtcagttctctgtagtgtttgccaatgttggagccgtctgcaaagtgtccccggcaagaagaggctgcctaccacaaggactttagcttactttttaaagattgaagaaaaaaaagaagacagaaaaagaagaactcaaagatacacaaagtaatttgaaccaaggctcagaagtttttggagccgtgagggatacagcagtttggtcaatattgtcttaacatgcttcaaataaatcagatgttctcagtgcagctgagtcttggtgagcagacatgggaatccgaaggcagcagtataaagaaggctcagcaggctgttgccaataaagctttgactgaatctacgcttcccaaaccagttcagaagccacccaaaagtaatgttaacaataacccaggcagtataactccaactgtggaactgaatgggcttgctatgaaaaggggagagcctgccatctacaggccattagatccaaagccattcccaaattatagagctaattacaactttcggggcatgtacaatcagagatgaagagttacctaagtcagtgttataagatgttccatggtaaaagggatttgaagacaaattttggaaatgctgcatactgtatctctcttgaagactcctaaaggtgtcatgaagaaaactgtttacctaagtggttcctaacactgactgaacatcaggctttcctgggcagctttaaaaattctgatgcccagactttatgtggactaattaaatcagaatttctggttgcag

SEQ ID NO: 5595 - protein, 105 aa, Homo sapiens; identical to SEQ ID NO: 5591

SEQ ID NO: 5596 - DNA, 908 bp, Homo sapiens
gtttgccaatgttggagccgtctgcaaagtgtccccggcaagaagtttttggagccgtgagggatacagcagtttggtcaatattgtcttaacatgcttcaaataaatcagattgaagaactcccttcaggatttcttgtagaacaagtctggtgttgatgaaatccttcggcttttgtttgtctgggaaagactttatctctccttcataattaaaggatattttcaccagatatactattctagatgttctcagtgcagctgagtcttggtgagcagacatgggaatccgaaggcagcagtataaagaaggctcagcaggctgttgccaataaagctttgactgaatctacgcttcccaaaccagttcagaagccacccaaaagtaatgttaacaataacccaggcagtataactccaactgtggaactgaatgggcttgctatgaaaaggggagagcctgccatctacaggccattagatccaaagccattcccaaattatagagctaattacaactttcggggcatgtacaatcagagatggcaacacttgaatggattacagggactctggagccaaagatccaaggagatgtcttttccttgtcagaacccagattaatcattagcttcttaaggcagggaatgaaaggtgaagtccaagaaacagatgaagagttacctaagtcagtgttataagatgttccatggtaaaagggatttgaagacaaattttggaaatgctgcatactgtatctctcttgaagactcctaaaggtgtcatgaagaaaactgtttacctaagtggttcctaacactgactgaacatcaggctttcctgggcagctttaaaaattctgatgcccagactttatgtggactaattaaatcagaatttctggttgc

SEQ ID NO: 5597 - protein, 125 aa, Homo sapiens
MFSVQLSLGEQTWESEGSSIKKAQQAVANKALTESTLPKPVQKPPKSNVNNNPGSITPTVELNGLAMKRGEPAIYRPLDPKPFPNYRANYNFRGMYNQRWQHLNGLQGLWSQRSKEMSFPCQNPD

SEQ ID NO: 5598 - DNA, 539 bp, Homo sapiens
aaggaagccaagaaaagctgagggtttaggcccattagcaaggggaagatagtagatacactctggaagcattacctaagggagaaaaagacggactagatgccaccaactgcaagtttccacacctcgtggacaaggcacacgaccacaaagaaaagaggaactaaaggacaacacaagatgcctctacagagcaaagaagcctggcatactcctcaccgcatgacaaaagtcgtcactgatgggacaagtcaatctcaggcgtctcctcatagaaagcactaagaggctgaaccatttaacattcccaccagcaacatacgagggttccagtttctccacatcgtcctcaaaaccagttactgcccgtcttttgattctggccatcctagtaggtgagaagtggtatcttactgtggttttcatttgcatctccctgatcactaatgatgttgagtattaatgatgtgtttatcttctcagagtaactgtctattccaagtcctttgcccattttttagttgagcttttttttgctg

SEQ ID NO: 5599 - protein, 73 aa, Homo sapiens
MGQVNLRRLLIESTKRLNHLTFPPATYEGSSFSTSSSKPVTARLLILAILVGEKWYLTVVFICISLITNDVEY

SEQ ID NO: 5600 - DNA, 793 bp, Homo sapiens
gggagcccgaggggtggaagccggcggcggccgagcggggtcagttctctgtagtgtttgccaatgttggagccgtctgcaaagtgtccccggcaagaagaggctgcctaccacaaggactttagcttactttttaaagattgaagaaaaaaaagaagacagaaaaagaagaactcaaagatacacaaagtaatttgaaccaaggctcagaagtttttggagccgtgagggatacagcagtttggtcaatattgtcttaacatgcttcaaataaatcagcttctctccaagataaaatggcaaacccaaaagagaaaactgcaatgtgtctggtaaatgagttagcccgtttcaatagagtccaaccccagtataaacttctgaatgaaagagggcctgctcattcaaaggcagtataactccaactgtggaactgaatgggcttgctatgaaaaggggagagcctgccatctacaggccattagatccaaagccattcccaaattatagagctaattacaactttcggggcatgtacaatcagagcctcacgtgatcaccactcagatcgagatacagaatgttcccaatcacctctgagagtttcctcagacctctttgtctttgacacatccttctcccagaaataatcactattttattatcatagactagtttttgcctgttgttgaactttttatatctagactcatacagtatttatgtgcatctggcttcttttactttgtataatgattttcttgtttggggattcatccatgttgcttatatc

SEQ ID NO: 5601 - protein, 41 aa, Homo sapiens
MKEGLLIQRQYNSNCGTEWACYEKGRACHLQAIRSKAIPKL

SEQ ID NO: 5602 - DNA, 1171 bp, Homo sapiens
ggggagcccgaggggtggaagccggcggcggccgagcggggtcagttctctgtagtgtttgccaatgttggagccgtctgcaaagtgtccccggcaagaagaggctgcctaccacaaggactttagcttactttttaaagattgaagaaaaaaaagaagacagaaaaagaagaactcaaagatacacaaagtaatttgaaccaaggctcagaagtttttggagccgtgagggatacagcagtttggtcaatattgtcttaacatgcttcaaataaatcagatgttctcagtgcagctgagtcttggtgagcagacatgggaatccgaaggcagcagtataaagaaggctcagcaggctgttgccaataaagctttgactgaatctacgcttcccaaaccagttcagaagccacccaaaagtaatgttaacaataacccaggcagtataactccaactgtggaactgaatgggcttgctatgaaaaggggagagcctgccatctacaggccattagatccaaagccattcccaaattatagagctaattacaactttcggggcatgtacaatcagaggtttgtatgtcttttttggttttgttcttaattattattttatccatgttataaaagtttctcacactcaaaagagtattttcattgtaaatctaattgaccttgggcattgtgcatggaatttagataaagcaggttcacaaggaatatttaaattaataacttaaagaaacccagttttcaggaactagttttttttttttttcccctaccccacaaacgtaaaagatctgaaggaactagtttttattgtgtcatgagggccctgtatttgttgcagggaagaccaagtcttaaagtcatttcacagtttatagtgttgactttctcattcatttaccaagcagagctcagtttttttcttgatttgtctaaatacattagtgaacatgaatgtttgtaatttatagggaaaaaagaaaaaatgtaaataatgtaatcccagaatttgccaccttttatattttcatgtactttacattctttttttctttgcatttaaatatatttaaccaagttgaagttgtcctttatatgcagtttttgtagtactttatgaaggtatgatagacatacagtaaaatgtacaaatctt

SEQ ID NO: 5603 - protein, 114 aa, Homo sapiens
MLQINQMFSVQLSLGEQTWESEGSSIKKAQQAVANKALTESTLPKPVQKPPKSNVNNNPGSITPTVELNGLAMKRGEPAIYRPLDPKPFPNYRANYNFRGMYNQRFVCLFWFCS

SEQ ID NO: 5604 - DNA, 383 bp, Homo sapiens
agggttccagtttctccacatcgtcctcaaaaccagttactgcccgtcttttgattctggccatcctagtaggctatattctatggctacaagagacatgagcagattacagagctccacacccagtcttggaaagaaaagtaactactactaagtagcagcaacttttaagagaaaagaatagagttcctggtgcttgtggcaagaagcaggaggaccttgaagccaatctgggcttgagaaagtggttcattcccccaaatacttcactcaatgatctacctaaatgtctgccgtctgccctcctttcccaccaatttccagtcaggcagcaatagccaacagcaatattaatagtaaaattaatagcagtagtaccagca

SEQ ID NO: 5605 - protein, 31 aa, Homo sapiens
MSAVCPPFPPISSQAAIANSNINSKINSSST

SEQ ID NO: 5606 - DNA, 1919 bp, Homo sapiens
agttctctgtagtgtttgccaatgttggagccgtctgcaaagtgtccccggcaagaaggtaaataccctcatcgggggcgtccgggagaccccgacttccgcgccgccggcgaagaaggcagagggcgctggggagccctgcagttccgcagcacggggaacccggagaaaagcagcccccttcgcggcctcccctcccccgcgccttccctcccacatcgggctctcggggcagcagcggggaggggagaccggcgggggagggaggacagggaggcgaaggaattggggtggggggtgcgtgtgtggtggagggggtgggacgacacaggtgtcctgaggggaggagccgggaggaaggcgaggaggccgggccaagtgggggtgcggaggtcggggagacaggaacgcggctgcgggcgcgggaggctggggttctagggggccggggtggtagcggccggaagagaggacggcgagtgcagccacggtgtggctgcgagggagagggagcgcctagagtagggcaggggagggcggcccggggagggtctgcgggaaatgggcctgggggcgctggaggcggagcggcggggccggggcgcgccggagggtggcggcggcagctatttctgtagaatgggctagtggtaaagacgtaacttgccgaaatggggagggtaggtggggccgaggggacaaaatatatcctatgacaggcaagttctgctgtggctgttacgaactcctaccgtgatggctcggcttaaaggggtagttggcggtagtgaccttgccggggtgaagggagttgggcgaggagacaaagctcagttacggaatccgctgtgtgagagcaggaactctagtctcttcggggtcgagccgggggctgtggcttgggggctgggggtgctccgcagaggccattgagaagcacgccactctgggattcttagggaggcggtgggggtaatggccgtgggattctggaagtctttggaaatgtgtgtagaattttgcatttgtgaataattttctttggtaagggtccatatttgctgtgatgtccccttacccccatccccactccaaagggttaagaactgcttgagcagatagagagggaccattcaattagggtagacctgggaatttaccaaaggattttaaagtgggtggatcctgcagaaagaaaggctagagatgatcctttaaagatattttactgttaattgaaaacgttttttatttaatgtttgctttcacaattttggtgaacttttgctgagcattacttggcttctgatgcatcctgtgtttcagaccagcatcgtgaatacttgaaatcaaaattgtgatggacaggcagggtgatagtaaccttggaggagaaaagatttcaacatttctccaggatatttcttccccgtccttgctttctttagatgattcaagtacactgttgtgaactcagctgcggtggaaaaatcttatttaataaaactaccaaaaccaagacttactctccatctctgttttgtagtatggccagattttcattgttcagtttgtatcttactgcaaacaagagatatcacataacactttaattgtagattgctgcattttgcagcaggcctgtattaaatttgcgaagcagttatgccaaactatctggtgtgtttgtgttttcctgctatggtttcaagtcaagtcactattgccatattttattatatggtaggctagtctgaaatttattcctaagtgatgataagttggtaggatatggtacatacttgctcacaaattactgcatttttccccataaaaaccagtgttttgtatttgtaagaatgttgctgtgtaatccaagtatgtattgttaatttcaaataaaatgctgtgtaattttt

SEQ ID NO: 5607 - protein, 139 aa, Homo sapiens
MLEPSAKCPRQEGKYPHRGRPGDPDFRAAGEEGRGRWGALQFRSTGNPEKSSPLRGLPSPAPSLPHRALGAAAGRGDRRGREDREAKELGWGVRVWWRGWDDTGVLRGGAGRKARRPGQVGVRRSGRQERGCGRGRLGF

SEQ ID NO: 5608 - DNA, 3901 bp, Homo sapiens
agctcctccccctgcgtctctggcctcgccggtcttggggggatggttccatcatggcgtcaatgcagaaacgactacagaaagaactgttggctttgcaaaatgacccacctcctggaatgaccttaaatgagaagagtgttcaaaattcaattacacagtcatgtttactggtgaaaatattcctgttcatcctcatgtttatagcaatggtcatatctgtttatccattctaacagaagactggtccccagcgctctcagtccaatcagtttgtcttagcattattagcatgctttccagctgcaaggaaaagagacgaccaccggataattctttttatgtgcgaacatgtaacaagaatccaaagaaaacaaaatggtggtatcatgatgatacttgttgatgccactgttatcatcctcctagcagaagatagtcctactgagaaaatgagcactttgatcattcagtctttgaactttaacctttgactggaagtgacctataggcaatgaagactacttccttttactgcatttttactcgtgtgcattctgggcgcatgttgatcgctggttcagtccaggcaactgacatgcttttattagtcatacagtattaatgcaggtgtcaggaaatgtcaaatataattccattttttatttttatttttttaagcttttggaaaagctccaggtcctcatgtattgtgcaataacaatgacttccttggcggttttggtacgttcattgccggcaatgggcgttgtaacaggaaaagttttcattaactcctgccattcaatgattaatgcatgatagggcctatgaaatgaacttactggttatagtgggaatataaataaagtgagggatccaacattactttaaaagtcaccccaactgtttatatttggattctatgcactgtgatcctaaggttaacagcatgaattaacatgcgtctttaaaggactgtaatgaaagatcattgcatatttattgaattgtttatatctactgtcaagttgttttgacatggaagattttcaagtaacattggcagagaggtacagtatgttatccctatggtgaaaataaattaatttgttgtatatagttcctcaatctctgaagtaaaggtatgagtaatatagggtatgaatggtttaatcaaggctttattttggaagtaagaaaaatggcagtgatgattaaattgctgcagtccataatttgggcttgttatttgtacattaaagattttttccaagtaagttacactctgttaacttcctgctagccatcagcatgagccctactgcctaaacactatttcatttatttatgtttggaaaccccgtaaacatttttgtttgcaatcttgtttcttttgttataagtcaagtttgaatgttacaatacttttattgaaacttttgttaagttttttcttgtaaattttctttacttgtgagtatcatcttgtcctttaatcctgtaccctaaaataagaaatacatttttgacagaggcttaatgttttaacaaaagagtgtggacatttttattttaaaatttaggcaaaagtcactatcaaatggttgcttatttgtctcacacagccatatagtttttcctggagggttttgttttgttgttgttgaaaagactttgcttacagctagatgaaactttctatagaaaaaaaaaattgttgaaaggtccagttctcagtaccatgtgagttaatgatactacaactaagttctttttaaaaagtgattaatgtattttataaattaccttttcacatatgcaaaatctgtttctactacaatgttatttttactaatgccttattgttgcactctttttgaaatatcctgcagtgaatatatgaatcaatttgggcttaaaactgaaagccagttggctgaaaggtttgaaatacgtaccccagtaaaaccattcaatcaataattggtaaataatattttaaaattgtttttaatctgtatagatgacattttgtagctttgtacatgttgttaattaagggcatataattttacactcaaagtataattgctgaactcaggggtgggtagacttcaaaaatatgtctgctatagaaataacttgaaaaaaaaaattaaaaccgtggccagccaccaaattgtggacactgtttatatactgctagttaacaattaccacttttaaaaaattataaccgtttttgttctatcttgactagataaattctcacaatgatctctgtcagttttattagttggcctgtttaaccaagacagaaagtctttgaattactcatagttttaaactgcttttaatatgaaaattgcagctgtaaattatgtattttcatattttgcgtaactgctctacactactgtttgacttgatcttcttctgggggttagggagaaatctgtctccatattgctggttctcttaccaaaatgcttttataaagaaatgaccggtgacatttattcaccaaaggaattaatatactgagtcaaagattaacaatgctatactatagagtaataggtcatatatagcctcaattgagttttttatgacaatattttaacatacctctctctctacatataaataccataaagtaaactaaaatgacacagaggaaagtagaggaaaatgaaataatttcggtacatcttatggtttaaagagtagaaaataagatgaaatatcctaaaatataggagcacagacatttaaaattcataatcaggctaacaacactctcttgaatttaggaatcattgaaaactccttgcacttagatttaatttatatgttagttacattattaaaagtcataaggcatttatctgagtcattgctctacagagagcaattaatggcttgtaataataaaaagaatatttctctgtaatgcattgttgaaagacaaccagaatatcaagaaaatgtatataggaatatgctacttgcctcctccctgcatttcctcgtggggcactatttgcgacataggcctacagaattagactttcatacttagaagataaggtacactcttcttcttttatttatttatttatttatttttaggccattcttctggtttgccaaattctattaagacagtgatacatttgcttccttatttatgcatgcttagatcatgaacatgatgcccttcttttttttttttttctttggtcaagtagggattaatgccataggtttagagagaaggattgttttcagtttttaagagaattttttaaaaatacattttatggttctcttaaggaattaatattcacttctgaaggacttacttgtaatatataatttatcattttagccagcagggaaataaatcatttttaatccccagaagaaagtgctggaaatagcttctatatagtcagcagttcacctggagaaagatcttaattccttgttgttttgactaggaatatcaatatttggtataaaataactagaatagtttattaccttttccctcatgaaattttaaatatatgcaaatatatatatcattagattcctgtggtggataataatttcttcagattctaaaacaggtgtctagtgactgcttaattgtttccaagttgcatcaaagatgaattggtaaataatggaaatgagtagtgatatgaaaatggttatgtaactacatattacttgtttctggtaatcaagtcttattttttaaaagcctattgtttttcagaattgagatatttaaaacttgttataacttcttcctaaaaatagaagagaagaggaggtactgtgtgttacaaaaatttttttaaataaagaattcagtgtcactagttct

SEQ ID NO: 5609 - protein, 80 aa, Homo sapiens
MFTGENIPVHPHVYSNGHICLSILTEDWSPALSVQSVCLSIISMLSSCKEKRRPPDNSFYVRTCNKNPKKTKWWYHDDTC

SEQ ID NO: 5610 - DNA, 4004 bp, Homo sapiens
agctcctccccctgcgtctctggcctcgccggtcttggggggatggttccatcatggcgtcaatgcagaaacgactacagaaagaactgttggctttgcaaaatgacccacctcctggaatgaccttaaatgagaagagtgttcaaaattcaattacacagtggattgtagacatggaaggtgcaccaggtaccttatatgaaggggaaaaatttcaacttctatttaaatttagtagtcgatatccttttgactctcctcaggtcatgtttactggtgaaaatattcctgttcatcctcatgtttatagcaatggtcatatctgtttatccattctaacagaagactggtccccagcgctctcagtccaatcagtttgtcttagcattattagcatgctttccagctgcaaggaaaagagacgaccaccggataattctttttatgtgcgaacatgtaacaagaatccaaagaaaacaaaatggtggtatcatgatgatacttgttgatgccactgttatcatcctcctagcagaagatagtcctactgagaaaatgagcactttgatcattcagtctttgaactttaacctttgactggaagtgacctataggcaatgaagactacttccttttactgcatttttactcgtgtgcattctgggcgcatgttgatcgctggttcagtccaggcaactgacatgcttttattagtcatacagtattaatgcaggtgtcaggaaatgtcaaatataattccattttttatttttatttttttaagcttttggaaaagctccaggtcctcatgtattgtgcaataacaatgacttccttggcggttttggtacgttcattgccggcaatgggcgttgtaacaggaaaagttttcattaactcctgccattcaatgattaatgcatgatagggcctatgaaatgaacttactggttatagtgggaatataaataaagtgagggatccaacattactttaaaagtcaccccaactgtttatatttggattctatgcactgtgatcctaaggttaacagcatgaattaacatgcgtctttaaaggactgtaatgaaagatcattgcatatttattgaattgtttatatctactgtcaagttgttttgacatggaagattttcaagtaacattggcagagaggtacagtatgttatccctatggtgaaaataaattaatttgttgtatatagttcctcaatctctgaagtaaaggtatgagtaatatagggtatgaatggtttaatcaaggctttattttggaagtaagaaaaatggcagtgatgattaaattgctgcagtccataatttgggcttgttatttgtacattaaagattttttccaagtaagttacactctgttaacttcctgctagccatcagcatgagccctactgcctaaacactatttcatttatttatgtttggaaaccccgtaaacatttttgtttgcaatcttgtttcttttgttataagtcaagtttgaatgttacaatacttttattgaaacttttgttaagttttttcttgtaaattttctttacttgtgagtatcatcttgtcctttaatcctgtaccctaaaataagaaatacatttttgacagaggcttaatgttttaacaaaagagtgtggacatttttattttaaaatttaggcaaaagtcactatcaaatggttgcttatttgtctcacacagccatatagtttttcctggagggttttgttttgttgttgttgaaaagactttgcttacagctagatgaaactttctatagaaaaaaaaaattgttgaaaggtccagttctcagtaccatgtgagttaatgatactacaactaagttctttttaaaaagtgattaatgtattttataaattaccttttcacatatgcaaaatctgtttctactacaatgttatttttactaatgccttattgttgcactctttttgaaatatcctgcagtgaatatatgaatcaatttgggcttaaaactgaaagccagttggctgaaaggtttgaaatacgtaccccagtaaaaccattcaatcaataattggtaaataatattttaaaattgtttttaatctgtatagatgacattttgtagctttgtacatgttgttaattaagggcatataattttacactcaaagtataattgctgaactcaggggtgggtagacttcaaaaatatgtctgctatagaaataacttgaaaaaaaaaattaaaaccgtggccagccaccaaattgtggacactgtttatatactgctagttaacaattaccacttttaaaaaattataaccgtttttgttctatcttgactagataaattctcacaatgatctctgtcagttttattagttggcctgtttaaccaagacagaaagtctttgaattactcatagttttaaactgcttttaatatgaaaattgcagctgtaaattatgtattttcatattttgcgtaactgctctacactactgtttgacttgatcttcttctgggggttagggagaaatctgtctccatattgctggttctcttaccaaaatgcttttataaagaaatgaccggtgacatttattcaccaaaggaattaatatactgagtcaaagattaacaatgctatactatagagtaataggtcatatatagcctcaattgagttttttatgacaatattttaacatacctctctctctacatataaataccataaagtaaactaaaatgacacagaggaaagtagaggaaaatgaaataatttcggtacatcttatggtttaaagagtagaaaataagatgaaatatcctaaaatataggagcacagacatttaaaattcataatcaggctaacaacactctcttgaatttaggaatcattgaaaactccttgcacttagatttaatttatatgttagttacattattaaaagtcataaggcatttatctgagtcattgctctacagagagcaattaatggcttgtaataataaaaagaatatttctctgtaatgcattgttgaaagacaaccagaatatcaagaaaatgtatataggaatatgctacttgcctcctccctgcatttcctcgtggggcactatttgcgacataggcctacagaattagactttcatacttagaagataaggtacactcttcttcttttatttatttatttatttatttttaggccattcttctggtttgccaaattctattaagacagtgatacatttgcttccttatttatgcatgcttagatcatgaacatgatgcccttcttttttttttttttctttggtcaagtagggattaatgccataggtttagagagaaggattgttttcagtttttaagagaattttttaaaaatacattttatggttctcttaaggaattaatattcacttctgaaggacttacttgtaatatataatttatcattttagccagcagggaaataaatcatttttaatccccagaagaaagtgctggaaatagcttctatatagtcagcagttcacctggagaaagatcttaattccttgttgttttgactaggaatatcaatatttggtataaaataactagaatagtttattaccttttccctcatgaaattttaaatatatgcaaatatatatatcattagattcctgtggtggataataatttcttcagattctaaaacaggtgtctagtgactgcttaattgtttccaagttgcatcaaagatgaattggtaaataatggaaatgagtagtgatatgaaaatggttatgtaactacatattacttgtttctggtaatcaagtcttattttttaaaagcctattgtttttcagaattgagatatttaaaacttgttataacttcttcctaaaaatagaagagaagaggaggtactgtgtgttacaaaaatttttttaaataaagaattcagtgtcactagttct

SEQ ID NO: 5611 - protein, 151 aa, Homo sapiens; identical to SEQ ID NO: 540

SEQ ID NO: 5612 - DNA, 4037 bp, Homo sapiens
agctcctccccctgcgtctctggcctcgccggtcttggggggatggttccatcatggcgtcaatgcagaccacaggaaggagggtggaagtatggtttccaaaacgactacagaaagaactgttggctttgcaaaatgacccacctcctggaatgaccttaaatgagaagagtgttcaaaattcaattacacagtggattgtagacatggaaggtgcaccaggtaccttatatgaaggggaaaaatttcaacttctatttaaatttagtagtcgatatccttttgactctcctcaggtcatgtttactggtgaaaatattcctgttcatcctcatgtttatagcaatggtcatatctgtttatccattctaacagaagactggtccccagcgctctcagtccaatcagtttgtcttagcattattagcatgctttccagctgcaaggaaaagagacgaccaccggataattctttttatgtgcgaacatgtaacaagaatccaaagaaaacaaaatggtggtatcatgatgatacttgttgatgccactgttatcatcctcctagcagaagatagtcctactgagaaaatgagcactttgatcattcagtctttgaactttaacctttgactggaagtgacctataggcaatgaagactacttccttttactgcatttttactcgtgtgcattctgggcgcatgttgatcgctggttcagtccaggcaactgacatgcttttattagtcatacagtattaatgcaggtgtcaggaaatgtcaaatataattccattttttatttttatttttttaagcttttggaaaagctccaggtcctcatgtattgtgcaataacaatgacttccttggcggttttggtacgttcattgccggcaatgggcgttgtaacaggaaaagttttcattaactcctgccattcaatgattaatgcatgatagggcctatgaaatgaacttactggttatagtgggaatataaataaagtgagggatccaacattactttaaaagtcaccccaactgtttatatttggattctatgcactgtgatcctaaggttaacagcatgaattaacatgcgtctttaaaggactgtaatgaaagatcattgcatatttattgaattgtttatatctactgtcaagttgttttgacatggaagattttcaagtaacattggcagagaggtacagtatgttatccctatggtgaaaataaattaatttgttgtatatagttcctcaatctctgaagtaaaggtatgagtaatatagggtatgaatggtttaatcaaggctttattttggaagtaagaaaaatggcagtgatgattaaattgctgcagtccataatttgggcttgttatttgtacattaaagattttttccaagtaagttacactctgttaacttcctgctagccatcagcatgagccctactgcctaaacactatttcatttatttatgtttggaaaccccgtaaacatttttgtttgcaatcttgtttcttttgttataagtcaagtttgaatgttacaatacttttattgaaacttttgttaagttttttcttgtaaattttctttacttgtgagtatcatcttgtcctttaatcctgtaccctaaaataagaaatacatttttgacagaggcttaatgttttaacaaaagagtgtggacatttttattttaaaatttaggcaaaagtcactatcaaatggttgcttatttgtctcacacagccatatagtttttcctggagggttttgttttgttgttgttgaaaagactttgcttacagctagatgaaactttctatagaaaaaaaaaattgttgaaaggtccagttctcagtaccatgtgagttaatgatactacaactaagttctttttaaaaagtgattaatgtattttataaattaccttttcacatatgcaaaatctgtttctactacaatgttatttttactaatgccttattgttgcactctttttgaaatatcctgcagtgaatatatgaatcaatttgggcttaaaactgaaagccagttggctgaaaggtttgaaatacgtaccccagtaaaaccattcaatcaataattggtaaataatattttaaaattgtttttaatctgtatagatgacattttgtagctttgtacatgttgttaattaagggcatataattttacactcaaagtataattgctgaactcaggggtgggtagacttcaaaaatatgtctgctatagaaataacttgaaaaaaaaaattaaaaccgtggccagccaccaaattgtggacactgtttatatactgctagttaacaattaccacttttaaaaaattataaccgtttttgttctatcttgactagataaattctcacaatgatctctgtcagttttattagttggcctgtttaaccaagacagaaagtctttgaattactcatagttttaaactgcttttaatatgaaaattgcagctgtaaattatgtattttcatattttgcgtaactgctctacactactgtttgacttgatcttcttctgggggttagggagaaatctgtctccatattgctggttctcttaccaaaatgcttttataaagaaatgaccggtgacatttattcaccaaaggaattaatatactgagtcaaagattaacaatgctatactatagagtaataggtcatatatagcctcaattgagttttttatgacaatattttaacatacctctctctctacatataaataccataaagtaaactaaaatgacacagaggaaagtagaggaaaatgaaataatttcggtacatcttatggtttaaagagtagaaaataagatgaaatatcctaaaatataggagcacagacatttaaaattcataatcaggctaacaacactctcttgaatttaggaatcattgaaaactccttgcacttagatttaatttatatgttagttacattattaaaagtcataaggcatttatctgagtcattgctctacagagagcaattaatggcttgtaataataaaaagaatatttctctgtaatgcattgttgaaagacaaccagaatatcaagaaaatgtatataggaatatgctacttgcctcctccctgcatttcctcgtggggcactatttgcgacataggcctacagaattagactttcatacttagaagataaggtacactcttcttcttttatttatttatttatttatttttaggccattcttctggtttgccaaattctattaagacagtgatacatttgcttccttatttatgcatgcttagatcatgaacatgatgcccttcttttttttttttttctttggtcaagtagggattaatgccataggtttagagagaaggattgttttcagtttttaagagaattttttaaaaatacattttatggttctcttaaggaattaatattcacttctgaaggacttacttgtaatatataatttatcattttagccagcagggaaataaatcatttttaatccccagaagaaagtgctggaaatagcttctatatagtcagcagttcacctggagaaagatcttaattccttgttgttttgactaggaatatcaatatttggtataaaataactagaatagtttattaccttttccctcatgaaattttaaatatatgcaaatatatatatcattagattcctgtggtggataataatttcttcagattctaaaacaggtgtctagtgactgcttaattgtttccaagttgcatcaaagatgaattggtaaataatggaaatgagtagtgatatgaaaatggttatgtaactacatattacttgtttctggtaatcaagtcttattttttaaaagcctattgtttttcagaattgagatatttaaaacttgttataacttcttcctaaaaatagaagagaagaggaggtactgtgtgttacaaaaatttttttaaataaagaattcagtgtcactagttct

SEQ ID NO: 5613 - protein, 162 aa, Homo sapiens; identical to SEQ ID NO: 538

SEQ ID NO: 5614 - DNA, 3534 bp, Homo sapiens
agaaacgactacagaaagaactgttggctttgcaaaatgacccacctcctggaatgaccttaaatgagaagagtgttcaaaattcaattacacagtcatgtttactggtgaaaatattcctgttcatcctcatgtttatagcaatggtcatatctgtttatccattctaacagaagactggtccccagcgctctcagtccaatcagtttgtcttagcattattagcatgctttccagctgcaaggaaaagggcaaagcagtttgtgggtacaaggccttctatgttcctgttacgcttaaagactatagaaagagacgaccaccggataattctttttatgtgcgaacatgtaacaagaatccaaagaaaacaaaatggtggtatcatgatgatacttgttgatgccactgttatcatcctcctagcagaagatagtcctactgagaaaatgagcactttgatcattcagtctttgaacttactggttatagtgggaatataaataaagtgagggatccaacattactttaaaagtcaccccaactgtttatatttggattctatgcactgtgatcctaaggttaacagcatgaattaacatgcgtctttaaaggactgtaatgaaagatcattgcatatttattgaattgtttatatctactgtcaagttgttttgacatggaagattttcaagtaacattggcagagaggtacagtatgttatccctatggtgaaaataaattaatttgttgtatatagttcctcaatctctgaagtaaaggtatgagtaatatagggtatgaatggtttaatcaaggctttattttggaagtaagaaaaatggcagtgatgattaaattgctgcagtccataatttgggcttgttatttgtacattaaagattttttccaagtaagttacactctgttaacttcctgctagccatcagcatgagccctactgcctaaacactatttcatttatttatgtttggaaaccccgtaaacatttttgtttgcaatcttgtttcttttgttataagtcaagtttgaatgttacaatacttttattgaaacttttgttaagttttttcttgtaaattttctttacttgtgagtatcatcttgtcctttaatcctgtaccctaaaataagaaatacatttttgacagaggcttaatgttttaacaaaagagtgtggacatttttattttaaaatttaggcaaaagtcactatcaaatggttgcttatttgtctcacacagccatatagtttttcctggagggttttgttttgttgttgttgaaaagactttgcttacagctagatgaaactttctatagaaaaaaaaaattgttgaaaggtccagttctcagtaccatgtgagttaatgatactacaactaagttctttttaaaaagtgattaatgtattttataaattaccttttcacatatgcaaaatctgtttctactacaatgttatttttactaatgccttattgttgcactctttttgaaatatcctgcagtgaatatatgaatcaatttgggcttaaaactgaaagccagttggctgaaaggtttgaaatacgtaccccagtaaaaccattcaatcaataattggtaaataatattttaaaattgtttttaatctgtatagatgacattttgtagctttgtacatgttgttaattaagggcatataattttacactcaaagtataattgctgaactcaggggtgggtagacttcaaaaatatgtctgctatagaaataacttgaaaaaaaaaattaaaaccgtggccagccaccaaattgtggacactgtttatatactgctagttaacaattaccacttttaaaaaattataaccgtttttgttctatcttgactagataaattctcacaatgatctctgtcagttttattagttggcctgtttaaccaagacagaaagtctttgaattactcatagttttaaactgcttttaatatgaaaattgcagctgtaaattatgtattttcatattttgcgtaactgctctacactactgtttgacttgatcttcttctgggggttagggagaaatctgtctccatattgctggttctcttaccaaaatgcttttataaagaaatgaccggtgacatttattcaccaaaggaattaatatactgagtcaaagattaacaatgctatactatagagtaataggtcatatatagcctcaattgagttttttatgacaatattttaacatacctctctctctacatataaataccataaagtaaactaaaatgacacagaggaaagtagaggaaaatgaaataatttcggtacatcttatggtttaaagagtagaaaataagatgaaatatcctaaaatataggagcacagacatttaaaattcataatcaggctaacaacactctcttgaatttaggaatcattgaaaactccttgcacttagatttaatttatatgttagttacattattaaaagtcataaggcatttatctgagtcattgctctacagagagcaattaatggcttgtaataataaaaagaatatttctctgtaatgcattgttgaaagacaaccagaatatcaagaaaatgtatataggaatatgctacttgcctcctccctgcatttcctcgtggggcactatttgcgacataggcctacagaattagactttcatacttagaagataaggtacactcttcttcttttatttatttatttatttatttttaggccattcttctggtttgccaaattctattaagacagtgatacatttgcttccttatttatgcatgcttagatcatgaacatgatgcccttcttttttttttttttctttggtcaagtagggattaatgccataggtttagagagaaggattgttttcagtttttaagagaattttttaaaaatacattttatggttctcttaaggaattaatattcacttctgaaggacttacttgtaatatataatttatcattttagccagcagggaaataaatcatttttaatccccagaagaaagtgctggaaatagcttctatatagtcagcagttcacctggagaaagatcttaattccttgttgttttgactaggaatatcaatatttggtataaaataactagaatagtttattaccttttccctcatgaaattttaaatatatgcaaatatatatatcattagattcctgtggtggataataatttcttcagattctaaaacaggtgtctagtgactgcttaattgtttccaagttgcatcaaagatgaattggtaaataatggaaatgagtagtgatatgaaaatggttatgtaactacatattacttgtttctggtaatcaagtcttattttttaaaagcctattgtttttcagaattgagatatttaaaacttgttataacttcttcctaaaaatagaagagaagaggaggtactgtgtgttacaaaaatttttttaaataaagaattcagtgtcacta

SEQ ID NO: 5615 - protein, 101 aa, Homo sapiens
MFTGENIPVHPHVYSNGHICLSILTEDWSPALSVQSVCLSIISMLSSCKEKGKAVCGYKAFYVPVTLKDYRKRRPPDNSFYVRTCNKNPKKTKWWYHDDTC

SEQ ID NO: 5616 - DNA, 3959 bp, Homo sapiens
ggcctcgccggtcttggggggatggttccatcatggcgtcaatgcagaaacgactacagaaagaactgttggctttgcaaaatgacccacctcctggaatgaccttaaatgagaagagtgttcaaaattcaattacacagtcatgtttactggtgaaaatattcctgttcatcctcatgtttatagcaatggtcatatctgtttatccattctaacagaagactggtccccagcgctctcagtccaatcagtttgtcttagcattattagcatgctttccagctgcaaggaaaagagacgaccaccggataattctttttatgtgcgaacatgtaacaagaatccaaagaaaacaaaatggtggtatcatgccatcatggattcgtagtcccgcaagtccctgttgatctagctgttacagatcatttgtttcttcaaaacgagggtattcaaagatgatacttgttgatgccactgttatcatcctcctagcagaagatagtcctactgagaaaatgagcactttgatcattcagtctttgaactttaacctttgactggaagtgacctataggcaatgaagactacttccttttactgcatttttactcgtgtgcattctgggcgcatgttgatcgctggttcagtccaggcaactgacatgcttttattagtcatacagtattaatgcaggtgtcaggaaatgtcaaatataattccattttttatttttatttttttaagcttttggaaaagctccaggtcctcatgtattgtgcaataacaatgacttccttggcggttttggtacgttcattgccggcaatgggcgttgtaacaggaaaagttttcattaactcctgccattcaatgattaatgcatgatagggcctatgaaatgaacttactggttatagtgggaatataaataaagtgagggatccaacattactttaaaagtcaccccaactgtttatatttggattctatgcactgtgatcctaaggttaacagcatgaattaacatgcgtctttaaaggactgtaatgaaagatcattgcatatttattgaattgtttatatctactgtcaagttgttttgacatggaagattttcaagtaacattggcagagaggtacagtatgttatccctatggtgaaaataaattaatttgttgtatatagttcctcaatctctgaagtaaaggtatgagtaatatagggtatgaatggtttaatcaaggctttattttggaagtaagaaaaatggcagtgatgattaaattgctgcagtccataatttgggcttgttatttgtacattaaagattttttccaagtaagttacactctgttaacttcctgctagccatcagcatgagccctactgcctaaacactatttcatttatttatgtttggaaaccccgtaaacatttttgtttgcaatcttgtttcttttgttataagtcaagtttgaatgttacaatacttttattgaaacttttgttaagttttttcttgtaaattttctttacttgtgagtatcatcttgtcctttaatcctgtaccctaaaataagaaatacatttttgacagaggcttaatgttttaacaaaagagtgtggacatttttattttaaaatttaggcaaaagtcactatcaaatggttgcttatttgtctcacacagccatatagtttttcctggagggttttgttttgttgttgttgaaaagactttgcttacagctagatgaaactttctatagaaaaaaaaaattgttgaaaggtccagttctcagtaccatgtgagttaatgatactacaactaagttctttttaaaaagtgattaatgtattttataaattaccttttcacatatgcaaaatctgtttctactacaatgttatttttactaatgccttattgttgcactctttttgaaatatcctgcagtgaatatatgaatcaatttgggcttaaaactgaaagccagttggctgaaaggtttgaaatacgtaccccagtaaaaccattcaatcaataattggtaaataatattttaaaattgtttttaatctgtatagatgacattttgtagctttgtacatgttgttaattaagggcatataattttacactcaaagtataattgctgaactcaggggtgggtagacttcaaaaatatgtctgctatagaaataacttgaaaaaaaaaattaaaaccgtggccagccaccaaattgtggacactgtttatatactgctagttaacaattaccacttttaaaaaattataaccgtttttgttctatcttgactagataaattctcacaatgatctctgtcagttttattagttggcctgtttaaccaagacagaaagtctttgaattactcatagttttaaactgcttttaatatgaaaattgcagctgtaaattatgtattttcatattttgcgtaactgctctacactactgtttgacttgatcttcttctgggggttagggagaaatctgtctccatattgctggttctcttaccaaaatgcttttataaagaaatgaccggtgacatttattcaccaaaggaattaatatactgagtcaaagattaacaatgctatactatagagtaataggtcatatatagcctcaattgagttttttatgacaatattttaacatacctctctctctacatataaataccataaagtaaactaaaatgacacagaggaaagtagaggaaaatgaaataatttcggtacatcttatggtttaaagagtagaaaataagatgaaatatcctaaaatataggagcacagacatttaaaattcataatcaggctaacaacactctcttgaatttaggaatcattgaaaactccttgcacttagatttaatttatatgttagttacattattaaaagtcataaggcatttatctgagtcattgctctacagagagcaattaatggcttgtaataataaaaagaatatttctctgtaatgcattgttgaaagacaaccagaatatcaagaaaatgtatataggaatatgctacttgcctcctccctgcatttcctcgtggggcactatttgcgacataggcctacagaattagactttcatacttagaagataaggtacactcttcttcttttatttatttatttatttatttttaggccattcttctggtttgccaaattctattaagacagtgatacatttgcttccttatttatgcatgcttagatcatgaacatgatgcccttcttttttttttttttctttggtcaagtagggattaatgccataggtttagagagaaggattgttttcagtttttaagagaattttttaaaaatacattttatggttctcttaaggaattaatattcacttctgaaggacttacttgtaatatataatttatcattttagccagcagggaaataaatcatttttaatccccagaagaaagtgctggaaatagcttctatatagtcagcagttcacctggagaaagatcttaattccttgttgttttgactaggaatatcaatatttggtataaaataactagaatagtttattaccttttccctcatgaaattttaaatatatgcaaatatatatatcattagattcctgtggtggataataatttcttcagattctaaaacaggtgtctagtgactgcttaattgtttccaagttgcatcaaagatgaattggtaaataatggaaatgagtagtgatatgaaaatggttatgtaactacatattacttgtttctggtaatcaagtcttattttttaaaagcctattgtttttcagaattgagatatttaaaacttgttataacttcttcctaaaaatagaagagaagaggaggtactgtgtgttacaaaaatttttttaaataaagaattcagtgtcacta

SEQ ID NO: 5617 - protein, 81 aa, Homo sapiens
MFTGENIPVHPHVYSNGHICLSILTEDWSPALSVQSVCLSIISMLSSCKEKRRPPDNSFYVRTCNKNPKKTKWWYHAIMDS

SEQ ID NO: 5618 - DNA, 4005 bp, Homo sapiens
gtctctggcctcgccggtcttggggggatggttccatcatggcgtcaatgcagaaacgactacagaaagaactgttggctttgcaaaatgacccacctcctggaatgaccttaaatgagaagagtgttcaaaattcaattacacagtcatgtttactggtgaaaatattcctgttcatcctcatgtttatagcaatggtcatatctgtttatccattctaacagaagactggtccccagcgctctcagtccaatcagtttgtcttagcattattagcatgctttccagctgcaaggaaaagagacgaccaccggataattctttttatgtgcgaacatgtaacaagaatccaaagaaaacaaaatggtggtatcatgaggcaacattttgccgtattgcctaggctggtcttgaactcctgggcccaagcagtccatccacctcagcctccccaaatgctggaattacaggcgtgagccactttgcattgccaagaaaattatgatacttgttgatgccactgttatcatcctcctagcagaagatagtcctactgagaaaatgagcactttgatcattcagtctttgaactttaacctttgactggaagtgacctataggcaatgaagactacttccttttactgcatttttactcgtgtgcattctgggcgcatgttgatcgctggttcagtccaggcaactgacatgcttttattagtcatacagtattaatgcaggtgtcaggaaatgtcaaatataattccattttttatttttatttttttaagcttttggaaaagctccaggtcctcatgtattgtgcaataacaatgacttccttggcggttttggtacgttcattgccggcaatgggcgttgtaacaggaaaagttttcattaactcctgccattcaatgattaatgcatgatagggcctatgaaatgaacttactggttatagtgggaatataaataaagtgagggatccaacattactttaaaagtcaccccaactgtttatatttggattctatgcactgtgatcctaaggttaacagcatgaattaacatgcgtctttaaaggactgtaatgaaagatcattgcatatttattgaattgtttatatctactgtcaagttgttttgacatggaagattttcaagtaacattggcagagaggtacagtatgttatccctatggtgaaaataaattaatttgttgtatatagttcctcaatctctgaagtaaaggtatgagtaatatagggtatgaatggtttaatcaaggctttattttggaagtaagaaaaatggcagtgatgattaaattgctgcagtccataatttgggcttgttatttgtacattaaagattttttccaagtaagttacactctgttaacttcctgctagccatcagcatgagccctactgcctaaacactatttcatttatttatgtttggaaaccccgtaaacatttttgtttgcaatcttgtttcttttgttataagtcaagtttgaatgttacaatacttttattgaaacttttgttaagttttttcttgtaaattttctttacttgtgagtatcatcttgtcctttaatcctgtaccctaaaataagaaatacatttttgacagaggcttaatgttttaacaaaagagtgtggacatttttattttaaaatttaggcaaaagtcactatcaaatggttgcttatttgtctcacacagccatatagtttttcctggagggttttgttttgttgttgttgaaaagactttgcttacagctagatgaaactttctatagaaaaaaaaaattgttgaaaggtccagttctcagtaccatgtgagttaatgatactacaactaagttctttttaaaaagtgattaatgtattttataaattaccttttcacatatgcaaaatctgtttctactacaatgttatttttactaatgccttattgttgcactctttttgaaatatcctgcagtgaatatatgaatcaatttgggcttaaaactgaaagccagttggctgaaaggtttgaaatacgtaccccagtaaaaccattcaatcaataattggtaaataatattttaaaattgtttttaatctgtatagatgacattttgtagctttgtacatgttgttaattaagggcatataattttacactcaaagtataattgctgaactcaggggtgggtagacttcaaaaatatgtctgctatagaaataacttgaaaaaaaaaattaaaaccgtggccagccaccaaattgtggacactgtttatatactgctagttaacaattaccacttttaaaaaattataaccgtttttgttctatcttgactagataaattctcacaatgatctctgtcagttttattagttggcctgtttaaccaagacagaaagtctttgaattactcatagttttaaactgcttttaatatgaaaattgcagctgtaaattatgtattttcatattttgcgtaactgctctacactactgtttgacttgatcttcttctgggggttagggagaaatctgtctccatattgctggttctcttaccaaaatgcttttataaagaaatgaccggtgacatttattcaccaaaggaattaatatactgagtcaaagattaacaatgctatactatagagtaataggtcatatatagcctcaattgagttttttatgacaatattttaacatacctctctctctacatataaataccataaagtaaactaaaatgacacagaggaaagtagaggaaaatgaaataatttcggtacatcttatggtttaaagagtagaaaataagatgaaatatcctaaaatataggagcacagacatttaaaattcataatcaggctaacaacactctcttgaatttaggaatcattgaaaactccttgcacttagatttaatttatatgttagttacattattaaaagtcataaggcatttatctgagtcattgctctacagagagcaattaatggcttgtaataataaaaagaatatttctctgtaatgcattgttgaaagacaaccagaatatcaagaaaatgtatataggaatatgctacttgcctcctccctgcatttcctcgtggggcactatttgcgacataggcctacagaattagactttcatacttagaagataaggtacactcttcttcttttatttatttatttatttatttttaggccattcttctggtttgccaaattctattaagacagtgatacatttgcttccttatttatgcatgcttagatcatgaacatgatgcccttcttttttttttttttctttggtcaagtagggattaatgccataggtttagagagaaggattgttttcagtttttaagagaattttttaaaaatacattttatggttctcttaaggaattaatattcacttctgaaggacttacttgtaatatataatttatcattttagccagcagggaaataaatcatttttaatccccagaagaaagtgctggaaatagcttctatatagtcagcagttcacctggagaaagatcttaattccttgttgttttgactaggaatatcaatatttggtataaaataactagaatagtttattaccttttccctcatgaaattttaaatatatgcaaatatatatatcattagattcctgtggtggataataatttcttcagattctaaaacaggtgtctagtgactgcttaattgtttccaagttgcatcaaagatgaattggtaaataatggaaatgagtagtgatatgaaaatggttatgtaactacatattacttgtttctggtaatcaagtcttattttttaaaagcctattgtttttcagaattgagatatttaaaacttgttataacttcttcctaaaaatagaagagaagaggaggtactgtgtgttacaaaaatttttttaaataaagaattcagtgtcacta

SEQ ID NO: 5619 - protein, 84 aa, Homo sapiens
MFTGENIPVHPHVYSNGHICLSILTEDWSPALSVQSVCLSIISMLSSCKEKRRPPDNSFYVRTCNKNPKKTKWWYHEATFCRIA

SEQ ID NO: 5620 - DNA, 1190 bp, Homo sapiens
agaaacgactacagaaagaactgttggctttgcaaaatgacccacctcctggaatgaccttaaatgagaagagtgttcaaaattcaattacacagtcatgtttactggtgaaaatattcctgttcatcctcatgtttatagcaatggtcatatctgtttatccattctaacagaagactggtccccagcgctctcagtccaatcagtttgtcttagcattattagcatgctttccagctgcaaggaaaagggcaaagcagtttgtgggtacaaggccttctatgttcctgttacgcttaaagactatagaaagagacgaccaccggataattctttttatgtgcgaacatgtaacaagaatccaaagaaaacaaaatggtggtatcatgatgatacttgttgatgccactgttatcatcctcctagcagaagatagtcctactgagaaaatgagcactttgatcattcagtctttgaacttactggttatagtgggaatataaataaagtgagggatccaacattactttaaaagtcaccccaactgtttatatttggattctatgcactgtgatcctaaggttaacagcatgaattaacatgcgtctttaaaggactgtaatgaaagatcattgcatatttattgaattgtttatatctactgtcaagttgttttgacatggaagattttcaagtaacattggcagagaggtacagtatgttatccctatggtgaaaataaattaatttgttgtatatagttcctcaatctctgaagtaaaggtatgagtaatatagggtatgaatggtttaatcaaggctttattttggaagtaagaaaaatggcagtgatgattaaattgctgcagtccataatttgggcttgttatttgtacattaaagattttttccaagtaagttacactctgttaacttcctgctagccatcagcatgagccctactgcctaaacactatttcatttatttatgtttggaaaccccgtaaacatttttgtttgcaatcttgtttcttttgttataagtcaagtttgaatgttacaatacttttattgaaacttttgttaagttttttcttgtaaattttctttacttgtgagtatcatcttgtcctttaatcctgtaccctaaaataagaaatacatttttgacagaggcttaatgttttaac

SEQ ID NO: 5621 - protein, 101 aa, Homo sapiens; identical to SEQ ID NO: 5615

SEQ ID NO: 5622 - DNA, 1615 bp, Homo sapiens
ggcctcgccggtcttggggggatggttccatcatggcgtcaatgcagaaacgactacagaaagaactgttggctttgcaaaatgacccacctcctggaatgaccttaaatgagaagagtgttcaaaattcaattacacagtcatgtttactggtgaaaatattcctgttcatcctcatgtttatagcaatggtcatatctgtttatccattctaacagaagactggtccccagcgctctcagtccaatcagtttgtcttagcattattagcatgctttccagctgcaaggaaaagagacgaccaccggataattctttttatgtgcgaacatgtaacaagaatccaaagaaaacaaaatggtggtatcatgccatcatggattcgtagtcccgcaagtccctgttgatctagctgttacagatcatttgtttcttcaaaacgagggtattcaaagatgatacttgttgatgccactgttatcatcctcctagcagaagatagtcctactgagaaaatgagcactttgatcattcagtctttgaactttaacctttgactggaagtgacctataggcaatgaagactacttccttttactgcatttttactcgtgtgcattctgggcgcatgttgatcgctggttcagtccaggcaactgacatgcttttattagtcatacagtattaatgcaggtgtcaggaaatgtcaaatataattccattttttatttttatttttttaagcttttggaaaagctccaggtcctcatgtattgtgcaataacaatgacttccttggcggttttggtacgttcattgccggcaatgggcgttgtaacaggaaaagttttcattaactcctgccattcaatgattaatgcatgatagggcctatgaaatgaacttactggttatagtgggaatataaataaagtgagggatccaacattactttaaaagtcaccccaactgtttatatttggattctatgcactgtgatcctaaggttaacagcatgaattaacatgcgtctttaaaggactgtaatgaaagatcattgcatatttattgaattgtttatatctactgtcaagttgttttgacatggaagattttcaagtaacattggcagagaggtacagtatgttatccctatggtgaaaataaattaatttgttgtatatagttcctcaatctctgaagtaaaggtatgagtaatatagggtatgaatggtttaatcaaggctttattttggaagtaagaaaaatggcagtgatgattaaattgctgcagtccataatttgggcttgttatttgtacattaaagattttttccaagtaagttacactctgttaacttcctgctagccatcagcatgagccctactgcctaaacactatttcatttatttatgtttggaaaccccgtaaacatttttgtttgcaatcttgtttcttttgttataagtcaagtttgaatgttacaatacttttattgaaacttttgttaagttttttcttgtaaattttctttacttgtgagtatcatcttgtcctttaatcctgtaccctaaaataagaaatacatttttgacagaggcttaatgttttaac

SEQ ID NO: 5623 - protein, 81 aa, Homo sapiens; identical to SEQ ID NO: 5617

SEQ ID NO: 5624 - DNA, 1661 bp, Homo sapiens
gtctctggcctcgccggtcttggggggatggttccatcatggcgtcaatgcagaaacgactacagaaagaactgttggctttgcaaaatgacccacctcctggaatgaccttaaatgagaagagtgttcaaaattcaattacacagtcatgtttactggtgaaaatattcctgttcatcctcatgtttatagcaatggtcatatctgtttatccattctaacagaagactggtccccagcgctctcagtccaatcagtttgtcttagcattattagcatgctttccagctgcaaggaaaagagacgaccaccggataattctttttatgtgcgaacatgtaacaagaatccaaagaaaacaaaatggtggtatcatgaggcaacattttgccgtattgcctaggctggtcttgaactcctgggcccaagcagtccatccacctcagcctccccaaatgctggaattacaggcgtgagccactttgcattgccaagaaaattatgatacttgttgatgccactgttatcatcctcctagcagaagatagtcctactgagaaaatgagcactttgatcattcagtctttgaactttaacctttgactggaagtgacctataggcaatgaagactacttccttttactgcatttttactcgtgtgcattctgggcgcatgttgatcgctggttcagtccaggcaactgacatgcttttattagtcatacagtattaatgcaggtgtcaggaaatgtcaaatataattccattttttatttttatttttttaagcttttggaaaagctccaggtcctcatgtattgtgcaataacaatgacttccttggcggttttggtacgttcattgccggcaatgggcgttgtaacaggaaaagttttcattaactcctgccattcaatgattaatgcatgatagggcctatgaaatgaacttactggttatagtgggaatataaataaagtgagggatccaacattactttaaaagtcaccccaactgtttatatttggattctatgcactgtgatcctaaggttaacagcatgaattaacatgcgtctttaaaggactgtaatgaaagatcattgcatatttattgaattgtttatatctactgtcaagttgttttgacatggaagattttcaagtaacattggcagagaggtacagtatgttatccctatggtgaaaataaattaatttgttgtatatagttcctcaatctctgaagtaaaggtatgagtaatatagggtatgaatggtttaatcaaggctttattttggaagtaagaaaaatggcagtgatgattaaattgctgcagtccataatttgggcttgttatttgtacattaaagattttttccaagtaagttacactctgttaacttcctgctagccatcagcatgagccctactgcctaaacactatttcatttatttatgtttggaaaccccgtaaacatttttgtttgcaatcttgtttcttttgttataagtcaagtttgaatgttacaatacttttattgaaacttttgttaagttttttcttgtaaattttctttacttgtgagtatcatcttgtcctttaatcctgtaccctaaaataagaaatacatttttgacagaggcttaatgttttaac

SEQ ID NO: 5625 - protein, 84 aa, Homo sapiens; identical to SEQ ID NO: 5619

SEQ ID NO: 5626 - DNA, 1552 bp, Homo sapiens
agctcctccccctgcgtctctggcctcgccggtcttggggggatggttccatcatggcgtcaatgcagaaacgactacagaaagaactgttggctttgcaaaatgacccacctcctggaatgaccttaaatgagaagagtgttcaaaattcaattacacagtcatgtttactggtgaaaatattcctgttcatcctcatgtttatagcaatggtcatatctgtttatccattctaacagaagactggtccccagcgctctcagtccaatcagtttgtcttagcattattagcatgctttccagctgcaaggaaaagagacgaccaccggataattctttttatgtgcgaacatgtaacaagaatccaaagaaaacaaaatggtggtatcatgatgatacttgttgatgccactgttatcatcctcctagcagaagatagtcctactgagaaaatgagcactttgatcattcagtctttgaactttaacctttgactggaagtgacctataggcaatgaagactacttccttttactgcatttttactcgtgtgcattctgggcgcatgttgatcgctggttcagtccaggcaactgacatgcttttattagtcatacagtattaatgcaggtgtcaggaaatgtcaaatataattccattttttatttttatttttttaagcttttggaaaagctccaggtcctcatgtattgtgcaataacaatgacttccttggcggttttggtacgttcattgccggcaatgggcgttgtaacaggaaaagttttcattaactcctgccattcaatgattaatgcatgatagggcctatgaaatgaacttactggttatagtgggaatataaataaagtgagggatccaacattactttaaaagtcaccccaactgtttatatttggattctatgcactgtgatcctaaggttaacagcatgaattaacatgcgtctttaaaggactgtaatgaaagatcattgcatatttattgaattgtttatatctactgtcaagttgttttgacatggaagattttcaagtaacattggcagagaggtacagtatgttatccctatggtgaaaataaattaatttgttgtatatagttcctcaatctctgaagtaaaggtatgagtaatatagggtatgaatggtttaatcaaggctttattttggaagtaagaaaaatggcagtgatgattaaattgctgcagtccataatttgggcttgttatttgtacattaaagattttttccaagtaagttacactctgttaacttcctgctagccatcagcatgagccctactgcctaaacactatttcatttatttatgtttggaaaccccgtaaacatttttgtttgcaatcttgtttcttttgttataagtcaagtttgaatgttacaatacttttattgaaacttttgttaagttttttcttgtaaattttctttacttgtgagtatcatcttgtcctttaatcctgtaccctaaaataagaaatacatttttgacagaggcttaatgttttaac

SEQ ID NO: 5627 - protein, 80 aa, Homo sapiens; identical to SEQ ID NO: 5609

SEQ ID NO: 5628 - DNA, 1655 bp, Homo sapiens
agctcctccccctgcgtctctggcctcgccggtcttggggggatggttccatcatggcgtcaatgcagaaacgactacagaaagaactgttggctttgcaaaatgacccacctcctggaatgaccttaaatgagaagagtgttcaaaattcaattacacagtggattgtagacatggaaggtgcaccaggtaccttatatgaaggggaaaaatttcaacttctatttaaatttagtagtcgatatccttttgactctcctcaggtcatgtttactggtgaaaatattcctgttcatcctcatgtttatagcaatggtcatatctgtttatccattctaacagaagactggtccccagcgctctcagtccaatcagtttgtcttagcattattagcatgctttccagctgcaaggaaaagagacgaccaccggataattctttttatgtgcgaacatgtaacaagaatccaaagaaaacaaaatggtggtatcatgatgatacttgttgatgccactgttatcatcctcctagcagaagatagtcctactgagaaaatgagcactttgatcattcagtctttgaactttaacctttgactggaagtgacctataggcaatgaagactacttccttttactgcatttttactcgtgtgcattctgggcgcatgttgatcgctggttcagtccaggcaactgacatgcttttattagtcatacagtattaatgcaggtgtcaggaaatgtcaaatataattccattttttatttttatttttttaagcttttggaaaagctccaggtcctcatgtattgtgcaataacaatgacttccttggcggttttggtacgttcattgccggcaatgggcgttgtaacaggaaaagttttcattaactcctgccattcaatgattaatgcatgatagggcctatgaaatgaacttactggttatagtgggaatataaataaagtgagggatccaacattactttaaaagtcaccccaactgtttatatttggattctatgcactgtgatcctaaggttaacagcatgaattaacatgcgtctttaaaggactgtaatgaaagatcattgcatatttattgaattgtttatatctactgtcaagttgttttgacatggaagattttcaagtaacattggcagagaggtacagtatgttatccctatggtgaaaataaattaatttgttgtatatagttcctcaatctctgaagtaaaggtatgagtaatatagggtatgaatggtttaatcaaggctttattttggaagtaagaaaaatggcagtgatgattaaattgctgcagtccataatttgggcttgttatttgtacattaaagattttttccaagtaagttacactctgttaacttcctgctagccatcagcatgagccctactgcctaaacactatttcatttatttatgtttggaaaccccgtaaacatttttgtttgcaatcttgtttcttttgttataagtcaagtttgaatgttacaatacttttattgaaacttttgttaagttttttcttgtaaattttctttacttgtgagtatcatcttgtcctttaatcctgtaccctaaaataagaaatacatttttgacagaggcttaatgttttaac

SEQ ID NO: 5629 - protein, 151 aa, Homo sapiens; identical to SEQ ID NO: 540

SEQ ID NO: 5630 - DNA, 1688 bp, Homo sapiens
agctcctccccctgcgtctctggcctcgccggtcttggggggatggttccatcatggcgtcaatgcagaccacaggaaggagggtggaagtatggtttccaaaacgactacagaaagaactgttggctttgcaaaatgacccacctcctggaatgaccttaaatgagaagagtgttcaaaattcaattacacagtggattgtagacatggaaggtgcaccaggtaccttatatgaaggggaaaaatttcaacttctatttaaatttagtagtcgatatccttttgactctcctcaggtcatgtttactggtgaaaatattcctgttcatcctcatgtttatagcaatggtcatatctgtttatccattctaacagaagactggtccccagcgctctcagtccaatcagtttgtcttagcattattagcatgctttccagctgcaaggaaaagagacgaccaccggataattctttttatgtgcgaacatgtaacaagaatccaaagaaaacaaaatggtggtatcatgatgatacttgttgatgccactgttatcatcctcctagcagaagatagtcctactgagaaaatgagcactttgatcattcagtctttgaactttaacctttgactggaagtgacctataggcaatgaagactacttccttttactgcatttttactcgtgtgcattctgggcgcatgttgatcgctggttcagtccaggcaactgacatgcttttattagtcatacagtattaatgcaggtgtcaggaaatgtcaaatataattccattttttatttttatttttttaagcttttggaaaagctccaggtcctcatgtattgtgcaataacaatgacttccttggcggttttggtacgttcattgccggcaatgggcgttgtaacaggaaaagttttcattaactcctgccattcaatgattaatgcatgatagggcctatgaaatgaacttactggttatagtgggaatataaataaagtgagggatccaacattactttaaaagtcaccccaactgtttatatttggattctatgcactgtgatcctaaggttaacagcatgaattaacatgcgtctttaaaggactgtaatgaaagatcattgcatatttattgaattgtttatatctactgtcaagttgttttgacatggaagattttcaagtaacattggcagagaggtacagtatgttatccctatggtgaaaataaattaatttgttgtatatagttcctcaatctctgaagtaaaggtatgagtaatatagggtatgaatggtttaatcaaggctttattttggaagtaagaaaaatggcagtgatgattaaattgctgcagtccataatttgggcttgttatttgtacattaaagattttttccaagtaagttacactctgttaacttcctgctagccatcagcatgagccctactgcctaaacactatttcatttatttatgtttggaaaccccgtaaacatttttgtttgcaatcttgtttcttttgttataagtcaagtttgaatgttacaatacttttattgaaacttttgttaagttttttcttgtaaattttctttacttgtgagtatcatcttgtcctttaatcctgtaccctaaaataagaaatacatttttgacagaggcttaatgttttaac

SEQ ID NO: 5631 - protein, 162 aa, Homo sapiens; identical to SEQ ID NO: 538

SEQ ID NO: 5632 - DNA, 380 bp, Homo sapiens
aaaaaaaaaatctggacatacccaagctgtgtatgtgcctgagatcttcccttccaagtgatttattaaactgggaagtcagaagcagtcctgtgaacatttgtttgttgaagcatgaaaaggcagaattgatgagtccttgcttgagtctatgcctccacccagtagtttgttcttagtctcctaggggctgatctcagcagagaaatggagacagttcagtcaccaacagtttgttactggattttggaaaaggtaccaaagtaagaatccaaggcttgtattcttatcttagctctgtgattaacaagcttaggtaaggcttctaatctttctgggtttctttccttatcaataaaatgcgcaagtcagactgcata

SEQ ID NO: 5633 - protein, 48 aa, Homo sapiens
MCLRSSLPSDLLNWEVRSSPVNICLLKHEKAELMSPCLSLCLHPVVCS

SEQ ID NO: 5634 - DNA, 2075 bp, Homo sapiens
cacactctgcgtcctcgcctcaccaggtacggatctcccgcgcgtcgccgaaagcggctctgacccagcggaagtaattctttcgactgccccggaacccaccggagcaggcagctgggggtgggggggcggccctgggataggggctgtggcagtacgcggggacccggctgcggtggctgcgggactgacgagaaactactaaagttcctggggaagcaaagtagaatttcataagaacaaaatggatggagaggagaaaacctatggtggctgtgaaggacctgatgccatgtatgtcaaattgatatcatctgatggccatgaatttattgtaaaaagagaacatgcattaacatcaggcacgataaaagccatgttgagtggcccaggtcagtttgctgagaacgaaaccaatgaggtcaattttagagagataccttcacatgtgctatcgaaagtatgcatgtattttacgtacaaggttcgctacactaacagctccaccgagattcctgaattcccaattgcacctgaaattgcactggaactgctgatggctgcgaacttcttagattgttaaataaaataaattataataaactgttaactcttttcagtatttaatacctgtagttcagttagtaactttttcatatatagcatgttgcctgtatgcagttgaactatataaagttcattgcaaagcagattatcttgtttttttgcatagcaatcaaagttgaaatttgtttgctacatcaacaaattaaggacattttcacaaactgagaaataaacaaatatgccaattcgtaggtggttttgccttatcctttgaatgtgacttaaaatcagcaatgatgatatagtaaatactgaaatttaggtgtaaatcaatacgttctacagggaaataatgaggctaagtatttttatgtttttagtggttttttagaaacctaatcttatagccgccattagcattactagagttatgcaaataattgcattataaacatgtttataacttagccaaaacattgatttttataactctccaagtatgagttgaaatttcttatgtcttttgataaactgcagtattctttaagtgtactttgtccttttgtttattgctacaatttaagaactttatttaaaaacaattttggaaggttactaggtacagcttttgcagaagaaactgaactgtagccagatggtcagcaagtaaactacatgacttagagttcttgtgcattatacattttgggtaattcaaagtactgtatttgcattgactataaagcgtcgtttgcaatatttattcttccttcatagtcccttgttgtgattatacttccagttgtttaaatgtattttaaaagactcactattaactttattcagatcttaaaagctacacctttttgaactattccagtctttctccatccaattagaatgttatggaataacatgtgaagagatacagtgaaaatcatattataatgcattgaagatatcctacatgaattatcttctattaaaatatgtcccaataaatatacccataatcagtgggtcttctactgaaatcaagctcattcagcttttctattaagcagccaaaaaattttttgaaaaaatatgacagcatcattccttatgcatggggaaagaagcactggagatgggtttagtattgtctttatctcagaggtggaacaaagttgtcattatagggtctataaacttaagtctccagcttatttgagactggcttaatatggctgagcccggtggctcatgcctgtaatcccagcactttcagaggacgaggcgggtagatcacttgaggccaggagtttgagaccagcctggccaccatggcaaaaccccatctctaccaaaaatgcaaaaattagctaggccatggtggcacacgcctgtaatcccagctacttgtgaggctgaggcatgagaatcgcttgaacctgggaggtggaggtggcagtgagccgagatcgcaccactgcactccagcctgggtgacagagcgagactgtctc

SEQ ID NO: 5635 - protein, 112 aa, Homo sapiens; identical to SEQ ID NO: 542

SEQ ID NO: 5636 - DNA, 1923 bp, Homo sapiens
cagacggaagtgagcgacacactctgcgtcctcgcctcaccaggaaactactaaagttcctggggaagcaaagtagaatttcataagaacaaaatggatggagaggagaaaacctatggtggctgtgaaggacctgatgccatgtatgtcaaattgatatcatctgatggccatgaatttattgtaaaaagagaacatgcattaacatcaggcacgataaaagccatgttgagtggcccaggtcagtttgctgagaacgaaaccaatgaggtcaattttagagagataccttcacatgtgctatcgaaagtatgcatgtattttacgtacaaggttcgctacactaacagctccaccgagattcctgaattcccaattgcacctgaaattgcactggaactgctgatggctgcgaacttcttagattgttaaataaaataaattataataaactgttaactcttttcagtatttaatacctgtagttcagttagtaactttttcatatatagcatgttgcctgtatgcagttgaactatataaagttcattgcaaagcagattatcttgtttttttgcatagcaatcaaagttgaaatttgtttgctacatcaacaaattaaggacattttcacaaactgagaaataaacaaatatgccaattcgtaggtggttttgccttatcctttgaatgtgacttaaaatcagcaatgatgatatagtaaatactgaaatttaggtgtaaatcaatacgttctacagggaaataatgaggctaagtatttttatgtttttagtggttttttagaaacctaatcttatagccgccattagcattactagagttatgcaaataattgcattataaacatgtttataacttagccaaaacattgatttttataactctccaagtatgagttgaaatttcttatgtcttttgataaactgcagtattctttaagtgtactttgtccttttgtttattgctacaatttaagaactttatttaaaaacaattttggaaggttactaggtacagcttttgcagaagaaactgaactgtagccagatggtcagcaagtaaactacatgacttagagttcttgtgcattatacattttgggtaattcaaagtactgtatttgcattgactataaagcgtcgtttgcaatatttattcttccttcatagtcccttgttgtgattatacttccagttgtttaaatgtattttaaaagactcactattaactttattcagatcttaaaagctacacctttttgaactattccagtctttctccatccaattagaatgttatggaataacatgtgaagagatacagtgaaaatcatattataatgcattgaagatatcctacatgaattatcttctattaaaatatgtcccaataaatatacccataatcagtgggtcttctactgaaatcaagctcattcagcttttctattaagcagccaaaaaattttttgaaaaaatatgacagcatcattccttatgcatggggaaagaagcactggagatgggtttagtattgtctttatctcagaggtggaacaaagttgtcattatagggtctataaacttaagtctccagcttatttgagactggcttaatatggctgagcccggtggctcatgcctgtaatcccagcactttcagaggacgaggcgggtagatcacttgaggccaggagtttgagaccagcctggccaccatggcaaaaccccatctctaccaaaaatgcaaaaattagctaggccatggtggcacacgcctgtaatcccagctacttgtgaggctgaggcatgagaatcgcttgaacctgggaggtggaggtggcagtgagccgagatcgcaccactgcactccagcctgggtgacagagcgagactgtct

SEQ ID NO: 5637 - protein, 112 aa, Homo sapiens; identical to SEQ ID NO: 542

SEQ ID NO: 5638 - DNA, 1325 bp, Homo sapiens
agagacagagtctcattctgttgcccaggctggagtgcaatggtgcggtctcagctcactgcaatctccgcctgctgggttcaggcaattctcctgcctcagagtagctggaattacaggtcagtttgctgagaacgaaaccaatgaggtcaattttagagagataccttcacatgtgctatcgaaagtatgcatgtattttacgtacaaggttcgctacactaacagctccaccgagattcctgaattcccaattgcacctgaaattgcactggaactgctgatggctgcgaacttcttagattgttaaataaaataaattataataaactgttaactcttttcagtatttaatacctgtagttcagttagtaactttttcatatatagcatgttgcctgtatgcagttgaactatataaagttcattgcaaagcagattatcttgtttttttgcatagcaatcaaagttgaaatttgtttgctacatcaacaaattaaggacattttcacaaactgagaaataaacaaatatgccaattcgtaggtggttttgccttatcctttgaatgtgacttaaaatcagcaatgatgatatagtaaatactgaaatttaggtgtaaatcaatacgttctacagggaaataatgaggctaagtatttttatgtttttagtggttttttagaaacctaatcttatagccgccattagcattactagagttatgcaaataattgcattataaacatgtttataacttagccaaaacattgatttttataactctccaagtatgagttgaaatttcttatgtcttttgataaactgcagtattctttaagtgtactttgtccttttgtttattgctacaatttaagaactttatttaaaaacaattttggaaggttactaggtacagcttttgcagaagaaactgaactgtagccagatggtcagcaagtaaactacatgacttagagttcttgtgcattatacattttgggtaattcaaagtactgtatttgcattgactataaagcgtcgtttgcaatatttattcttccttcatagtcccttgttgtgattatacttccagttgtttaaatgtattttaaaagactcactattaactttattcagatcttaaaagctacacctttttgaactattccagtctttctccatccaattagaatgttatggaataacatgtgaagagatacagtgaaaatcatattataatgcattgaagatatcctacatgaattatcttctattaaaatatgtcccaataaatatacccataatcagtgggtcttctactg

SEQ ID NO: 5639 - protein, 30 aa, Homo sapiens
MVRSQLTAISACWVQAILLPQSSWNYRSVC

SEQ ID NO: 5640 - DNA, 1516 bp, Homo sapiens
tgttagcatttgcatagctagaaaatttgggttaattttattaccgatgtcactttcaaaagcttaattaggcagaaaaccatcctagagtgatgatatctttggagttaaggaaactactaaagttcctggggaagcaaagtagaatttcataagaacaaaatggatggagaggagaaaacctatggtggctgtgaaggacctgatgccatgtatgtcaaattgatatcatctgatggccatgaatttattgtaaaaagagaacatgcattaacatcaggcacgataaaagccatgttgagtggcccaggtcagtttgctgagaacgaaaccaatgaggtcaattttagagagataccttcacatgtgctatcgaaagtatgcatgtattttacgtacaaggttcgctacactaacagctccaccgagattcctgaattcccaattgcacctgaaattgcactggaactgctgatggctgcgaacttcttagattgttaaataaaataaattataataaactgttaactcttttcagtatttaatacctgtagttcagttagtaactttttcatatatagcatgttgcctgtatgcagttgaactatataaagttcattgcaaagcagattatcttgtttttttgcatagcaatcaaagttgaaatttgtttgctacatcaacaaattaaggacattttcacaaactgagaaataaacaaatatgccaattcgtaggtggttttgccttatcctttgaatgtgacttaaaatcagcaatgatgatatagtaaatactgaaatttaggtgtaaatcaatacgttctacagggaaataatgaggctaagtatttttatgtttttagtggttttttagaaacctaatcttatagccgccattagcattactagagttatgcaaataattgcattataaacatgtttataacttagccaaaacattgatttttataactctccaagtatgagttgaaatttcttatgtcttttgataaactgcagtattctttaagtgtactttgtccttttgtttattgctacaatttaagaactttatttaaaaacaattttggaaggttactaggtacagcttttgcagaagaaactgaactgtagccagatggtcagcaagtaaactacatgacttagagttcttgtgcattatacattttgggtaattcaaagtactgtatttgcattgactataaagcgtcgtttgcaatatttattcttccttcatagtcccttgttgtgattatacttccagttgtttaaatgtattttaaaagactcactattaactttattcagatcttaaaagctacacctttttgaactattccagtctttctccatccaattagaatgttatggaataacatgtgaagagatacagtgaaaatcatattataatgcattgaagatatcctacatgaattatcttctattaaaatatgtcccaataaatatacccataatcagtgggtcttctactg

SEQ ID NO: 5641 - protein, 112 aa, Homo sapiens; identical to SEQ ID NO: 542

SEQ ID NO: 5642 - DNA, 1461 bp, Homo sapiens
gcagtttacatgtggatttattcattctggagatacaatggcaaggaaacagctgtggaaactactaaagttcctggggaagcaaagtagaatttcataagaacaaaatggatggagaggagaaaacctatggtggctgtgaaggacctgatgccatgtatgtcaaattgatatcatctgatggccatgaatttattgtaaaaagagaacatgcattaacatcaggcacgataaaagccatgttgagtggcccaggtcagtttgctgagaacgaaaccaatgaggtcaattttagagagataccttcacatgtgctatcgaaagtatgcatgtattttacgtacaaggttcgctacactaacagctccaccgagattcctgaattcccaattgcacctgaaattgcactggaactgctgatggctgcgaacttcttagattgttaaataaaataaattataataaactgttaactcttttcagtatttaatacctgtagttcagttagtaactttttcatatatagcatgttgcctgtatgcagttgaactatataaagttcattgcaaagcagattatcttgtttttttgcatagcaatcaaagttgaaatttgtttgctacatcaacaaattaaggacattttcacaaactgagaaataaacaaatatgccaattcgtaggtggttttgccttatcctttgaatgtgacttaaaatcagcaatgatgatatagtaaatactgaaatttaggtgtaaatcaatacgttctacagggaaataatgaggctaagtatttttatgtttttagtggttttttagaaacctaatcttatagccgccattagcattactagagttatgcaaataattgcattataaacatgtttataacttagccaaaacattgatttttataactctccaagtatgagttgaaatttcttatgtcttttgataaactgcagtattctttaagtgtactttgtccttttgtttattgctacaatttaagaactttatttaaaaacaattttggaaggttactaggtacagcttttgcagaagaaactgaactgtagccagatggtcagcaagtaaactacatgacttagagttcttgtgcattatacattttgggtaattcaaagtactgtatttgcattgactataaagcgtcgtttgcaatatttattcttccttcatagtcccttgttgtgattatacttccagttgtttaaatgtattttaaaagactcactattaactttattcagatcttaaaagctacacctttttgaactattccagtctttctccatccaattagaatgttatggaataacatgtgaagagatacagtgaaaatcatattataatgcattgaagatatcctacatgaattatcttctattaaaatatgtcccaataaatatacccataatcagtgggtcttctactg

SEQ ID NO: 5643 - protein, 112 aa, Homo sapiens; identical to SEQ ID NO: 542

SEQ ID NO: 5644 - DNA, 1638 bp, Homo sapiens
gggagaagagggcggcgggacctttcctggcgccgctcgcagtttacatgtggatttattcattctggagatacaatggcaaggaaacagctgtgagtcttgctgtgtggcccaggctggagtgcccggctggtctcaaattcctgacctcaagtgatctccctcccaaagtgttgcgattgcaggtgtgagccactgcacctggctgctgagaaatctttgcctacagtgagggaaactactaaagttcctggggaagcaaagtagaatttcataagaacaaaatggatggagaggagaaaacctatggtggctgtgaaggacctgatgccatgtatgtcaaattgatatcatctgatggccatgaatttattgtaaaaagagaacatgcattaacatcaggcacgataaaagccatgttgagtggcccaggtcagtttgctgagaacgaaaccaatgaggtcaattttagagagataccttcacatgtgctatcgaaagtatgcatgtattttacgtacaaggttcgctacactaacagctccaccgagattcctgaattcccaattgcacctgaaattgcactggaactgctgatggctgcgaacttcttagattgttaaataaaataaattataataaactgttaactcttttcagtatttaatacctgtagttcagttagtaactttttcatatatagcatgttgcctgtatgcagttgaactatataaagttcattgcaaagcagattatcttgtttttttgcatagcaatcaaagttgaaatttgtttgctacatcaacaaattaaggacattttcacaaactgagaaataaacaaatatgccaattcgtaggtggttttgccttatcctttgaatgtgacttaaaatcagcaatgatgatatagtaaatactgaaatttaggtgtaaatcaatacgttctacagggaaataatgaggctaagtatttttatgtttttagtggttttttagaaacctaatcttatagccgccattagcattactagagttatgcaaataattgcattataaacatgtttataacttagccaaaacattgatttttataactctccaagtatgagttgaaatttcttatgtcttttgataaactgcagtattctttaagtgtactttgtccttttgtttattgctacaatttaagaactttatttaaaaacaattttggaaggttactaggtacagcttttgcagaagaaactgaactgtagccagatggtcagcaagtaaactacatgacttagagttcttgtgcattatacattttgggtaattcaaagtactgtatttgcattgactataaagcgtcgtttgcaatatttattcttccttcatagtcccttgttgtgattatacttccagttgtttaaatgtattttaaaagactcactattaactttattcagatcttaaaagctacacctttttgaactattccagtctttctccatccaattagaatgttatggaataacatgtgaagagatacagtgaaaatcatattataatgcattgaagatatcctacatgaattatcttctattaaaatatgtcccaataaatatacccataatcagtgggtcttctactg

SEQ ID NO: 5645 - protein, 112 aa, Homo sapiens; identical to SEQ ID NO: 542

SEQ ID NO: 5646 - DNA, 1469 bp, Homo sapiens
acccggctgcggtggctgcgggactgacgagtgagtctcgggctggggcggaaacggagctccgggaaactactaaagttcctggggaagcaaagtagaatttcataagaacaaaatggatggagaggagaaaacctatggtggctgtgaaggacctgatgccatgtatgtcaaattgatatcatctgatggccatgaatttattgtaaaaagagaacatgcattaacatcaggcacgataaaagccatgttgagtggcccaggtcagtttgctgagaacgaaaccaatgaggtcaattttagagagataccttcacatgtgctatcgaaagtatgcatgtattttacgtacaaggttcgctacactaacagctccaccgagattcctgaattcccaattgcacctgaaattgcactggaactgctgatggctgcgaacttcttagattgttaaataaaataaattataataaactgttaactcttttcagtatttaatacctgtagttcagttagtaactttttcatatatagcatgttgcctgtatgcagttgaactatataaagttcattgcaaagcagattatcttgtttttttgcatagcaatcaaagttgaaatttgtttgctacatcaacaaattaaggacattttcacaaactgagaaataaacaaatatgccaattcgtaggtggttttgccttatcctttgaatgtgacttaaaatcagcaatgatgatatagtaaatactgaaatttaggtgtaaatcaatacgttctacagggaaataatgaggctaagtatttttatgtttttagtggttttttagaaacctaatcttatagccgccattagcattactagagttatgcaaataattgcattataaacatgtttataacttagccaaaacattgatttttataactctccaagtatgagttgaaatttcttatgtcttttgataaactgcagtattctttaagtgtactttgtccttttgtttattgctacaatttaagaactttatttaaaaacaattttggaaggttactaggtacagcttttgcagaagaaactgaactgtagccagatggtcagcaagtaaactacatgacttagagttcttgtgcattatacattttgggtaattcaaagtactgtatttgcattgactataaagcgtcgtttgcaatatttattcttccttcatagtcccttgttgtgattatacttccagttgtttaaatgtattttaaaagactcactattaactttattcagatcttaaaagctacacctttttgaactattccagtctttctccatccaattagaatgttatggaataacatgtgaagagatacagtgaaaatcatattataatgcattgaagatatcctacatgaattatcttctattaaaatatgtcccaataaatatacccataatcagtgggtcttctactg

SEQ ID NO: 5647 - protein, 112 aa, Homo sapiens; identical to SEQ ID NO: 542

SEQ ID NO: 5648 - DNA, 1674 bp, Homo sapiens
cgcgcgtcgccgaaagcggctctgacccagcggaagtaattctttcgactgccccggaacccaccggagcaggcagctgggggtgggggggcggccctgggataggggctgtggcagtacgcggggacccggctgcggtggctgcgggactgacgagatcatcagggaaggaagacctctctgaggagttgatgttttacctggagacctaaatgatgaggatttaaaagcttttcggacaacagcaattacaaatgcaaagaccttgaggaaactactaaagttcctggggaagcaaagtagaatttcataagaacaaaatggatggagaggagaaaacctatggtggctgtgaaggacctgatgccatgtatgtcaaattgatatcatctgatggccatgaatttattgtaaaaagagaacatgcattaacatcaggcacgataaaagccatgttgagtggcccaggtcagtttgctgagaacgaaaccaatgaggtcaattttagagagataccttcacatgtgctatcgaaagtatgcatgtattttacgtacaaggttcgctacactaacagctccaccgagattcctgaattcccaattgcacctgaaattgcactggaactgctgatggctgcgaacttcttagattgttaaataaaataaattataataaactgttaactcttttcagtatttaatacctgtagttcagttagtaactttttcatatatagcatgttgcctgtatgcagttgaactatataaagttcattgcaaagcagattatcttgtttttttgcatagcaatcaaagttgaaatttgtttgctacatcaacaaattaaggacattttcacaaactgagaaataaacaaatatgccaattcgtaggtggttttgccttatcctttgaatgtgacttaaaatcagcaatgatgatatagtaaatactgaaatttaggtgtaaatcaatacgttctacagggaaataatgaggctaagtatttttatgtttttagtggttttttagaaacctaatcttatagccgccattagcattactagagttatgcaaataattgcattataaacatgtttataacttagccaaaacattgatttttataactctccaagtatgagttgaaatttcttatgtcttttgataaactgcagtattctttaagtgtactttgtccttttgtttattgctacaatttaagaactttatttaaaaacaattttggaaggttactaggtacagcttttgcagaagaaactgaactgtagccagatggtcagcaagtaaactacatgacttagagttcttgtgcattatacattttgggtaattcaaagtactgtatttgcattgactataaagcgtcgtttgcaatatttattcttccttcatagtcccttgttgtgattatacttccagttgtttaaatgtattttaaaagactcactattaactttattcagatcttaaaagctacacctttttgaactattccagtctttctccatccaattagaatgttatggaataacatgtgaagagatacagtgaaaatcatattataatgcattgaagatatcctacatgaattatcttctattaaaatatgtcccaataaatatacccataatcagtgggtcttctactg

SEQ ID NO: 5649 - protein, 112 aa, Homo sapiens; identical to SEQ ID NO: 542

SEQ ID NO: 5650 - DNA, 1719 bp, Homo sapiens
ctcaccaggtacggatctcccgcgcgtcgccgaaagcggctctgacccagcggaagtaattctttcgactgccccggaacccaccggagcaggcagctgggggtgggggggcggccctgggataggggctgtggcagtacgcggggacccggctgcggtggctgcgggactgacgaagtcttgctgtgtggcccaggctggagtgcccggctggtctcaaattcctgacctcaagtgatctccctcccaaagtgttgcgattgcaggtgtgagccactgcacctggctgctgagaaatctttgcctacagtgagggaaactactaaagttcctggggaagcaaagtagaatttcataagaacaaaatggatggagaggagaaaacctatggtggctgtgaaggacctgatgccatgtatgtcaaattgatatcatctgatggccatgaatttattgtaaaaagagaacatgcattaacatcaggcacgataaaagccatgttgagtggcccaggtcagtttgctgagaacgaaaccaatgaggtcaattttagagagataccttcacatgtgctatcgaaagtatgcatgtattttacgtacaaggttcgctacactaacagctccaccgagattcctgaattcccaattgcacctgaaattgcactggaactgctgatggctgcgaacttcttagattgttaaataaaataaattataataaactgttaactcttttcagtatttaatacctgtagttcagttagtaactttttcatatatagcatgttgcctgtatgcagttgaactatataaagttcattgcaaagcagattatcttgtttttttgcatagcaatcaaagttgaaatttgtttgctacatcaacaaattaaggacattttcacaaactgagaaataaacaaatatgccaattcgtaggtggttttgccttatcctttgaatgtgacttaaaatcagcaatgatgatatagtaaatactgaaatttaggtgtaaatcaatacgttctacagggaaataatgaggctaagtatttttatgtttttagtggttttttagaaacctaatcttatagccgccattagcattactagagttatgcaaataattgcattataaacatgtttataacttagccaaaacattgatttttataactctccaagtatgagttgaaatttcttatgtcttttgataaactgcagtattctttaagtgtactttgtccttttgtttattgctacaatttaagaactttatttaaaaacaattttggaaggttactaggtacagcttttgcagaagaaactgaactgtagccagatggtcagcaagtaaactacatgacttagagttcttgtgcattatacattttgggtaattcaaagtactgtatttgcattgactataaagcgtcgtttgcaatatttattcttccttcatagtcccttgttgtgattatacttccagttgtttaaatgtattttaaaagactcactattaactttattcagatcttaaaagctacacctttttgaactattccagtctttctccatccaattagaatgttatggaataacatgtgaagagatacagtgaaaatcatattataatgcattgaagatatcctacatgaattatcttctattaaaatatgtcccaataaatatacccataatcagtgggtcttctactg

SEQ ID NO: 5651 - protein, 112 aa, Homo sapiens; identical to SEQ ID NO: 542

SEQ ID NO: 5652 - DNA, 1531 bp, Homo sapiens
ctcgcctcaccaggtacggatctcccgcgcgtcgccgaaagcggctctgacccagcggaagtaattctttcgactgccccggaacccaccggagcaggcagctgggggtgggggggcggccctgggataggggctgtggcagtacgcggggacccggctgcggtggctgcgggactgacgaatggagaggagaaaacctatggtggctgtgaaggacctgatgccatgtatgtcaaattgatatcatctgatggccatgaatttattgtaaaaagagaacatgcattaacatcaggcacgataaaagccatgttgagtggcccaggtcagtttgctgagaacgaaaccaatgaggtcaattttagagagataccttcacatgtgctatcgaaagtatgcatgtattttacgtacaaggttcgctacactaacagctccaccgagattcctgaattcccaattgcacctgaaattgcactggaactgctgatggctgcgaacttcttagattgttaaataaaataaattataataaactgttaactcttttcagtatttaatacctgtagttcagttagtaactttttcatatatagcatgttgcctgtatgcagttgaactatataaagttcattgcaaagcagattatcttgtttttttgcatagcaatcaaagttgaaatttgtttgctacatcaacaaattaaggacattttcacaaactgagaaataaacaaatatgccaattcgtaggtggttttgccttatcctttgaatgtgacttaaaatcagcaatgatgatatagtaaatactgaaatttaggtgtaaatcaatacgttctacagggaaataatgaggctaagtatttttatgtttttagtggttttttagaaacctaatcttatagccgccattagcattactagagttatgcaaataattgcattataaacatgtttataacttagccaaaacattgatttttataactctccaagtatgagttgaaatttcttatgtcttttgataaactgcagtattctttaagtgtactttgtccttttgtttattgctacaatttaagaactttatttaaaaacaattttggaaggttactaggtacagcttttgcagaagaaactgaactgtagccagatggtcagcaagtaaactacatgacttagagttcttgtgcattatacattttgggtaattcaaagtactgtatttgcattgactataaagcgtcgtttgcaatatttattcttccttcatagtcccttgttgtgattatacttccagttgtttaaatgtattttaaaagactcactattaactttattcagatcttaaaagctacacctttttgaactattccagtctttctccatccaattagaatgttatggaataacatgtgaagagatacagtgaaaatcatattataatgcattgaagatatcctacatgaattatcttctattaaaatatgtcccaataaatatacccataatcagtgggtcttctactg

SEQ ID NO: 5653 - protein, 96 aa, Homo sapiens
MYVKLISSDGHEFIVKREHALTSGTIKAMLSGPGQFAENETNEVNFREIPSHVLSKVCMYFTYKVRYTNSSTEIPEFPIAPEIALELLMAANFLDC

SEQ ID NO: 5654 - DNA, 1598 bp, Homo sapiens
cacactctgcgtcctcgcctcaccaggtacggatctcccgcgcgtcgccgaaagcggctctgacccagcggaagtaattctttcgactgccccggaacccaccggagcaggcagctgggggtgggggggcggccctgggataggggctgtggcagtacgcggggacccggctgcggtggctgcgggactgacgagaaactactaaagttcctggggaagcaaagtagaatttcataagaacaaaatggatggagaggagaaaacctatggtggctgtgaaggacctgatgccatgtatgtcaaattgatatcatctgatggccatgaatttattgtaaaaagagaacatgcattaacatcaggcacgataaaagccatgttgagtggcccaggtcagtttgctgagaacgaaaccaatgaggtcaattttagagagataccttcacatgtgctatcgaaagtatgcatgtattttacgtacaaggttcgctacactaacagctccaccgagattcctgaattcccaattgcacctgaaattgcactggaactgctgatggctgcgaacttcttagattgttaaataaaataaattataataaactgttaactcttttcagtatttaatacctgtagttcagttagtaactttttcatatatagcatgttgcctgtatgcagttgaactatataaagttcattgcaaagcagattatcttgtttttttgcatagcaatcaaagttgaaatttgtttgctacatcaacaaattaaggacattttcacaaactgagaaataaacaaatatgccaattcgtaggtggttttgccttatcctttgaatgtgacttaaaatcagcaatgatgatatagtaaatactgaaatttaggtgtaaatcaatacgttctacagggaaataatgaggctaagtatttttatgtttttagtggttttttagaaacctaatcttatagccgccattagcattactagagttatgcaaataattgcattataaacatgtttataacttagccaaaacattgatttttataactctccaagtatgagttgaaatttcttatgtcttttgataaactgcagtattctttaagtgtactttgtccttttgtttattgctacaatttaagaactttatttaaaaacaattttggaaggttactaggtacagcttttgcagaagaaactgaactgtagccagatggtcagcaagtaaactacatgacttagagttcttgtgcattatacattttgggtaattcaaagtactgtatttgcattgactataaagcgtcgtttgcaatatttattcttccttcatagtcccttgttgtgattatacttccagttgtttaaatgtattttaaaagactcactattaactttattcagatcttaaaagctacacctttttgaactattccagtctttctccatccaattagaatgttatggaataacatgtgaagagatacagtgaaaatcatattataatgcattgaagatatcctacatgaattatcttctattaaaatatgtcccaataaatatacccataatcagtgggtcttctactg

SEQ ID NO: 5655 - protein, 112 aa, Homo sapiens; identical to SEQ ID NO: 542

SEQ ID NO: 5656 - DNA, 1392 bp, Homo sapiens
agacggaagtgagcgacacactctgcgtcctcgcctcaccagatggagaggagaaaacctatggtggctgtgaaggacctgatgccatgtatgtcaaattgatatcatctgatggccatgaatttattgtaaaaagagaacatgcattaacatcaggcacgataaaagccatgttgagtggcccaggtcagtttgctgagaacgaaaccaatgaggtcaattttagagagataccttcacatgtgctatcgaaagtatgcatgtattttacgtacaaggttcgctacactaacagctccaccgagattcctgaattcccaattgcacctgaaattgcactggaactgctgatggctgcgaacttcttagattgttaaataaaataaattataataaactgttaactcttttcagtatttaatacctgtagttcagttagtaactttttcatatatagcatgttgcctgtatgcagttgaactatataaagttcattgcaaagcagattatcttgtttttttgcatagcaatcaaagttgaaatttgtttgctacatcaacaaattaaggacattttcacaaactgagaaataaacaaatatgccaattcgtaggtggttttgccttatcctttgaatgtgacttaaaatcagcaatgatgatatagtaaatactgaaatttaggtgtaaatcaatacgttctacagggaaataatgaggctaagtatttttatgtttttagtggttttttagaaacctaatcttatagccgccattagcattactagagttatgcaaataattgcattataaacatgtttataacttagccaaaacattgatttttataactctccaagtatgagttgaaatttcttatgtcttttgataaactgcagtattctttaagtgtactttgtccttttgtttattgctacaatttaagaactttatttaaaaacaattttggaaggttactaggtacagcttttgcagaagaaactgaactgtagccagatggtcagcaagtaaactacatgacttagagttcttgtgcattatacattttgggtaattcaaagtactgtatttgcattgactataaagcgtcgtttgcaatatttattcttccttcatagtcccttgttgtgattatacttccagttgtttaaatgtattttaaaagactcactattaactttattcagatcttaaaagctacacctttttgaactattccagtctttctccatccaattagaatgttatggaataacatgtgaagagatacagtgaaaatcatattataatgcattgaagatatcctacatgaattatcttctattaaaatatgtcccaataaatatacccataatcagtgggtcttctactg

SEQ ID NO: 5657 - protein, 96 aa, Homo sapiens; identical to SEQ ID NO: 5653

SEQ ID NO: 5658 - DNA, 1585 bp, Homo sapiens
agacggaagtgagcgacacactctgcgtcctcgcctcaccagagtcttgctgtgtggcccaggctggagtgcccggctggtctcaaattcctgacctcaagtgatctccctcccaaagtgttgcgattgcaggtgtgagccactgcacctggctgctgagaaatctttgcctacagtgagggaaactactaaagttcctggggaagcaaagtagaatttcataagaacaaaatggatggagaggagaaaacctatggtggctgtgaaggacctgatgccatgtatgtcaaattgatatcatctgatggccatgaatttattgtaaaaagagaacatgcattaacatcaggcacgataaaagccatgttgagtggcccaggtcagtttgctgagaacgaaaccaatgaggtcaattttagagagataccttcacatgtgctatcgaaagtatgcatgtattttacgtacaaggttcgctacactaacagctccaccgagattcctgaattcccaattgcacctgaaattgcactggaactgctgatggctgcgaacttcttagattgttaaataaaataaattataataaactgttaactcttttcagtatttaatacctgtagttcagttagtaactttttcatatatagcatgttgcctgtatgcagttgaactatataaagttcattgcaaagcagattatcttgtttttttgcatagcaatcaaagttgaaatttgtttgctacatcaacaaattaaggacattttcacaaactgagaaataaacaaatatgccaattcgtaggtggttttgccttatcctttgaatgtgacttaaaatcagcaatgatgatatagtaaatactgaaatttaggtgtaaatcaatacgttctacagggaaataatgaggctaagtatttttatgtttttagtggttttttagaaacctaatcttatagccgccattagcattactagagttatgcaaataattgcattataaacatgtttataacttagccaaaacattgatttttataactctccaagtatgagttgaaatttcttatgtcttttgataaactgcagtattctttaagtgtactttgtccttttgtttattgctacaatttaagaactttatttaaaaacaattttggaaggttactaggtacagcttttgcagaagaaactgaactgtagccagatggtcagcaagtaaactacatgacttagagttcttgtgcattatacattttgggtaattcaaagtactgtatttgcattgactataaagcgtcgtttgcaatatttattcttccttcatagtcccttgttgtgattatacttccagttgtttaaatgtattttaaaagactcactattaactttattcagatcttaaaagctacacctttttgaactattccagtctttctccatccaattagaatgttatggaataacatgtgaagagatacagtgaaaatcatattataatgcattgaagatatcctacatgaattatcttctattaaaatatgtcccaataaatatacccataatcagtgggtcttctactg

SEQ ID NO: 5659 - protein, 112 aa, Homo sapiens; identical to SEQ ID NO: 542

SEQ ID NO: 5660 - DNA, 1446 bp, Homo sapiens
agacggaagtgagcgacacactctgcgtcctcgcctcaccaggaaactactaaagttcctggggaagcaaagtagaatttcataagaacaaaatggatggagaggagaaaacctatggtggctgtgaaggacctgatgccatgtatgtcaaattgatatcatctgatggccatgaatttattgtaaaaagagaacatgcattaacatcaggcacgataaaagccatgttgagtggcccaggtcagtttgctgagaacgaaaccaatgaggtcaattttagagagataccttcacatgtgctatcgaaagtatgcatgtattttacgtacaaggttcgctacactaacagctccaccgagattcctgaattcccaattgcacctgaaattgcactggaactgctgatggctgcgaacttcttagattgttaaataaaataaattataataaactgttaactcttttcagtatttaatacctgtagttcagttagtaactttttcatatatagcatgttgcctgtatgcagttgaactatataaagttcattgcaaagcagattatcttgtttttttgcatagcaatcaaagttgaaatttgtttgctacatcaacaaattaaggacattttcacaaactgagaaataaacaaatatgccaattcgtaggtggttttgccttatcctttgaatgtgacttaaaatcagcaatgatgatatagtaaatactgaaatttaggtgtaaatcaatacgttctacagggaaataatgaggctaagtatttttatgtttttagtggttttttagaaacctaatcttatagccgccattagcattactagagttatgcaaataattgcattataaacatgtttataacttagccaaaacattgatttttataactctccaagtatgagttgaaatttcttatgtcttttgataaactgcagtattctttaagtgtactttgtccttttgtttattgctacaatttaagaactttatttaaaaacaattttggaaggttactaggtacagcttttgcagaagaaactgaactgtagccagatggtcagcaagtaaactacatgacttagagttcttgtgcattatacattttgggtaattcaaagtactgtatttgcattgactataaagcgtcgtttgcaatatttattcttccttcatagtcccttgttgtgattatacttccagttgtttaaatgtattttaaaagactcactattaactttattcagatcttaaaagctacacctttttgaactattccagtctttctccatccaattagaatgttatggaataacatgtgaagagatacagtgaaaatcatattataatgcattgaagatatcctacatgaattatcttctattaaaatatgtcccaataaatatacccataatcagtgggtcttctactg

SEQ ID NO: 5661 - protein, 112 aa, Homo sapiens; identical to SEQ ID NO: 542

SEQ ID NO: 5662 - DNA, 1064 bp, Homo sapiens
agagacagagtctcattctgttgcccaggctggagtgcaatggtgcggtctcagctcactgcaatctccgcctgctgggttcaggcaattctcctgcctcagagtagctggaattacaggtcagtttgctgagaacgaaaccaatgaggtcaattttagagagataccttcacatgtgctatcgaaagtatgcatgtattttacgtacaaggttcgctacactaacagctccaccgagattcctgaattcccaattgcacctgaaattgcactggaactgctgatggctgcgaacttcttagattgttaaataaaataaattataataaactgttaactcttttcagtatttaatacctgtagttcagttagtaactttttcatatatagcatgttgcctgtatgcagttgaactatataaagttcattgcaaagcagattatcttgtttttttgcatagcaatcaaagttgaaatttgtttgctacatcaacaaattaaggacattttcacaaactgagaaataaacaaatatgccaattcgtaggtggttttgccttatcctttgaatgtgacttaaaatcagcaatgatgatatagtaaatactgaaatttaggtgtaaatcaatacgttctacagggaaataatgaggctaagtatttttatgtttttagtggttttttagaaacctaatcttatagccgccattagcattactagagttatgcaaataattgcattataaacatgtttataacttagccaaaacattgatttttataactctccaagtatgagttgaaatttcttatgtcttttgataaactgcagtattctttaagtgtactttgtccttttgtttattgctacaatttaagaactttatttaaaaacaattttggaaggttactaggtacagcttttgcagaagaaactgaactgtagccagatggtcagcaagtaaactacatgacttagagttcttgtgcattatacattttgggtaattcaaagtactgtatttgcattgactataaagcgtcgtttgcaatatttattcttcc

SEQ ID NO: 5663 - protein, 30 aa, Homo sapiens; identical to SEQ ID NO: 5639

SEQ ID NO: 5664 - DNA, 1255 bp, Homo sapiens
tgttagcatttgcatagctagaaaatttgggttaattttattaccgatgtcactttcaaaagcttaattaggcagaaaaccatcctagagtgatgatatctttggagttaaggaaactactaaagttcctggggaagcaaagtagaatttcataagaacaaaatggatggagaggagaaaacctatggtggctgtgaaggacctgatgccatgtatgtcaaattgatatcatctgatggccatgaatttattgtaaaaagagaacatgcattaacatcaggcacgataaaagccatgttgagtggcccaggtcagtttgctgagaacgaaaccaatgaggtcaattttagagagataccttcacatgtgctatcgaaagtatgcatgtattttacgtacaaggttcgctacactaacagctccaccgagattcctgaattcccaattgcacctgaaattgcactggaactgctgatggctgcgaacttcttagattgttaaataaaataaattataataaactgttaactcttttcagtatttaatacctgtagttcagttagtaactttttcatatatagcatgttgcctgtatgcagttgaactatataaagttcattgcaaagcagattatcttgtttttttgcatagcaatcaaagttgaaatttgtttgctacatcaacaaattaaggacattttcacaaactgagaaataaacaaatatgccaattcgtaggtggttttgccttatcctttgaatgtgacttaaaatcagcaatgatgatatagtaaatactgaaatttaggtgtaaatcaatacgttctacagggaaataatgaggctaagtatttttatgtttttagtggttttttagaaacctaatcttatagccgccattagcattactagagttatgcaaataattgcattataaacatgtttataacttagccaaaacattgatttttataactctccaagtatgagttgaaatttcttatgtcttttgataaactgcagtattctttaagtgtactttgtccttttgtttattgctacaatttaagaactttatttaaaaacaattttggaaggttactaggtacagcttttgcagaagaaactgaactgtagccagatggtcagcaagtaaactacatgacttagagttcttgtgcattatacattttgggtaattcaaagtactgtatttgcattgactataaagcgtcgtttgcaatatttattcttcc

SEQ ID NO: 5665 - protein, 112 aa, Homo sapiens; identical to SEQ ID NO: 542

SEQ ID NO: 5666 - DNA, 1200 bp, Homo sapiens
gcagtttacatgtggatttattcattctggagatacaatggcaaggaaacagctgtggaaactactaaagttcctggggaagcaaagtagaatttcataagaacaaaatggatggagaggagaaaacctatggtggctgtgaaggacctgatgccatgtatgtcaaattgatatcatctgatggccatgaatttattgtaaaaagagaacatgcattaacatcaggcacgataaaagccatgttgagtggcccaggtcagtttgctgagaacgaaaccaatgaggtcaattttagagagataccttcacatgtgctatcgaaagtatgcatgtattttacgtacaaggttcgctacactaacagctccaccgagattcctgaattcccaattgcacctgaaattgcactggaactgctgatggctgcgaacttcttagattgttaaataaaataaattataataaactgttaactcttttcagtatttaatacctgtagttcagttagtaactttttcatatatagcatgttgcctgtatgcagttgaactatataaagttcattgcaaagcagattatcttgtttttttgcatagcaatcaaagttgaaatttgtttgctacatcaacaaattaaggacattttcacaaactgagaaataaacaaatatgccaattcgtaggtggttttgccttatcctttgaatgtgacttaaaatcagcaatgatgatatagtaaatactgaaatttaggtgtaaatcaatacgttctacagggaaataatgaggctaagtatttttatgtttttagtggttttttagaaacctaatcttatagccgccattagcattactagagttatgcaaataattgcattataaacatgtttataacttagccaaaacattgatttttataactctccaagtatgagttgaaatttcttatgtcttttgataaactgcagtattctttaagtgtactttgtccttttgtttattgctacaatttaagaactttatttaaaaacaattttggaaggttactaggtacagcttttgcagaagaaactgaactgtagccagatggtcagcaagtaaactacatgacttagagttcttgtgcattatacattttgggtaattcaaagtactgtatttgcattgactataaagcgtcgtttgcaatatttattcttcc

SEQ ID NO: 5667 - protein, 112 aa, Homo sapiens; identical to SEQ ID NO: 542

SEQ ID NO: 5668 - DNA, 1377 bp, Homo sapiens
gggagaagagggcggcgggacctttcctggcgccgctcgcagtttacatgtggatttattcattctggagatacaatggcaaggaaacagctgtgagtcttgctgtgtggcccaggctggagtgcccggctggtctcaaattcctgacctcaagtgatctccctcccaaagtgttgcgattgcaggtgtgagccactgcacctggctgctgagaaatctttgcctacagtgagggaaactactaaagttcctggggaagcaaagtagaatttcataagaacaaaatggatggagaggagaaaacctatggtggctgtgaaggacctgatgccatgtatgtcaaattgatatcatctgatggccatgaatttattgtaaaaagagaacatgcattaacatcaggcacgataaaagccatgttgagtggcccaggtcagtttgctgagaacgaaaccaatgaggtcaattttagagagataccttcacatgtgctatcgaaagtatgcatgtattttacgtacaaggttcgctacactaacagctccaccgagattcctgaattcccaattgcacctgaaattgcactggaactgctgatggctgcgaacttcttagattgttaaataaaataaattataataaactgttaactcttttcagtatttaatacctgtagttcagttagtaactttttcatatatagcatgttgcctgtatgcagttgaactatataaagttcattgcaaagcagattatcttgtttttttgcatagcaatcaaagttgaaatttgtttgctacatcaacaaattaaggacattttcacaaactgagaaataaacaaatatgccaattcgtaggtggttttgccttatcctttgaatgtgacttaaaatcagcaatgatgatatagtaaatactgaaatttaggtgtaaatcaatacgttctacagggaaataatgaggctaagtatttttatgtttttagtggttttttagaaacctaatcttatagccgccattagcattactagagttatgcaaataattgcattataaacatgtttataacttagccaaaacattgatttttataactctccaagtatgagttgaaatttcttatgtcttttgataaactgcagtattctttaagtgtactttgtccttttgtttattgctacaatttaagaactttatttaaaaacaattttggaaggttactaggtacagcttttgcagaagaaactgaactgtagccagatggtcagcaagtaaactacatgacttagagttcttgtgcattatacattttgggtaattcaaagtactgtatttgcattgactataaagcgtcgtttgcaatatttattcttcc

SEQ ID NO: 5669 - protein, 112 aa, Homo sapiens; identical to SEQ ID NO: 542

SEQ ID NO: 5670 - DNA, 1208 bp, Homo sapiens
acccggctgcggtggctgcgggactgacgagtgagtctcgggctggggcggaaacggagctccgggaaactactaaagttcctggggaagcaaagtagaatttcataagaacaaaatggatggagaggagaaaacctatggtggctgtgaaggacctgatgccatgtatgtcaaattgatatcatctgatggccatgaatttattgtaaaaagagaacatgcattaacatcaggcacgataaaagccatgttgagtggcccaggtcagtttgctgagaacgaaaccaatgaggtcaattttagagagataccttcacatgtgctatcgaaagtatgcatgtattttacgtacaaggttcgctacactaacagctccaccgagattcctgaattcccaattgcacctgaaattgcactggaactgctgatggctgcgaacttcttagattgttaaataaaataaattataataaactgttaactcttttcagtatttaatacctgtagttcagttagtaactttttcatatatagcatgttgcctgtatgcagttgaactatataaagttcattgcaaagcagattatcttgtttttttgcatagcaatcaaagttgaaatttgtttgctacatcaacaaattaaggacattttcacaaactgagaaataaacaaatatgccaattcgtaggtggttttgccttatcctttgaatgtgacttaaaatcagcaatgatgatatagtaaatactgaaatttaggtgtaaatcaatacgttctacagggaaataatgaggctaagtatttttatgtttttagtggttttttagaaacctaatcttatagccgccattagcattactagagttatgcaaataattgcattataaacatgtttataacttagccaaaacattgatttttataactctccaagtatgagttgaaatttcttatgtcttttgataaactgcagtattctttaagtgtactttgtccttttgtttattgctacaatttaagaactttatttaaaaacaattttggaaggttactaggtacagcttttgcagaagaaactgaactgtagccagatggtcagcaagtaaactacatgacttagagttcttgtgcattatacattttgggtaattcaaagtactgtatttgcattgactataaagcgtcgtttgcaatatttattcttcc

SEQ ID NO: 5671 - protein, 112 aa, Homo sapiens; identical to SEQ ID NO: 542

SEQ ID NO: 5672 - DNA, 1413 bp, Homo sapiens
cgcgcgtcgccgaaagcggctctgacccagcggaagtaattctttcgactgccccggaacccaccggagcaggcagctgggggtgggggggcggccctgggataggggctgtggcagtacgcggggacccggctgcggtggctgcgggactgacgagatcatcagggaaggaagacctctctgaggagttgatgttttacctggagacctaaatgatgaggatttaaaagcttttcggacaacagcaattacaaatgcaaagaccttgaggaaactactaaagttcctggggaagcaaagtagaatttcataagaacaaaatggatggagaggagaaaacctatggtggctgtgaaggacctgatgccatgtatgtcaaattgatatcatctgatggccatgaatttattgtaaaaagagaacatgcattaacatcaggcacgataaaagccatgttgagtggcccaggtcagtttgctgagaacgaaaccaatgaggtcaattttagagagataccttcacatgtgctatcgaaagtatgcatgtattttacgtacaaggttcgctacactaacagctccaccgagattcctgaattcccaattgcacctgaaattgcactggaactgctgatggctgcgaacttcttagattgttaaataaaataaattataataaactgttaactcttttcagtatttaatacctgtagttcagttagtaactttttcatatatagcatgttgcctgtatgcagttgaactatataaagttcattgcaaagcagattatcttgtttttttgcatagcaatcaaagttgaaatttgtttgctacatcaacaaattaaggacattttcacaaactgagaaataaacaaatatgccaattcgtaggtggttttgccttatcctttgaatgtgacttaaaatcagcaatgatgatatagtaaatactgaaatttaggtgtaaatcaatacgttctacagggaaataatgaggctaagtatttttatgtttttagtggttttttagaaacctaatcttatagccgccattagcattactagagttatgcaaataattgcattataaacatgtttataacttagccaaaacattgatttttataactctccaagtatgagttgaaatttcttatgtcttttgataaactgcagtattctttaagtgtactttgtccttttgtttattgctacaatttaagaactttatttaaaaacaattttggaaggttactaggtacagcttttgcagaagaaactgaactgtagccagatggtcagcaagtaaactacatgacttagagttcttgtgcattatacattttgggtaattcaaagtactgtatttgcattgactataaagcgtcgtttgcaatatttattcttcc

SEQ ID NO: 5673 - protein, 112 aa, Homo sapiens; identical to SEQ ID NO: 542

SEQ ID NO: 5674 - DNA, 1458 bp, Homo sapiens
ctcaccaggtacggatctcccgcgcgtcgccgaaagcggctctgacccagcggaagtaattctttcgactgccccggaacccaccggagcaggcagctgggggtgggggggcggccctgggataggggctgtggcagtacgcggggacccggctgcggtggctgcgggactgacgaagtcttgctgtgtggcccaggctggagtgcccggctggtctcaaattcctgacctcaagtgatctccctcccaaagtgttgcgattgcaggtgtgagccactgcacctggctgctgagaaatctttgcctacagtgagggaaactactaaagttcctggggaagcaaagtagaatttcataagaacaaaatggatggagaggagaaaacctatggtggctgtgaaggacctgatgccatgtatgtcaaattgatatcatctgatggccatgaatttattgtaaaaagagaacatgcattaacatcaggcacgataaaagccatgttgagtggcccaggtcagtttgctgagaacgaaaccaatgaggtcaattttagagagataccttcacatgtgctatcgaaagtatgcatgtattttacgtacaaggttcgctacactaacagctccaccgagattcctgaattcccaattgcacctgaaattgcactggaactgctgatggctgcgaacttcttagattgttaaataaaataaattataataaactgttaactcttttcagtatttaatacctgtagttcagttagtaactttttcatatatagcatgttgcctgtatgcagttgaactatataaagttcattgcaaagcagattatcttgtttttttgcatagcaatcaaagttgaaatttgtttgctacatcaacaaattaaggacattttcacaaactgagaaataaacaaatatgccaattcgtaggtggttttgccttatcctttgaatgtgacttaaaatcagcaatgatgatatagtaaatactgaaatttaggtgtaaatcaatacgttctacagggaaataatgaggctaagtatttttatgtttttagtggttttttagaaacctaatcttatagccgccattagcattactagagttatgcaaataattgcattataaacatgtttataacttagccaaaacattgatttttataactctccaagtatgagttgaaatttcttatgtcttttgataaactgcagtattctttaagtgtactttgtccttttgtttattgctacaatttaagaactttatttaaaaacaattttggaaggttactaggtacagcttttgcagaagaaactgaactgtagccagatggtcagcaagtaaactacatgacttagagttcttgtgcattatacattttgggtaattcaaagtactgtatttgcattgactataaagcgtcgtttgcaatatttattcttcc

SEQ ID NO: 5675 - protein, 112 aa, Homo sapiens; identical to SEQ ID NO: 542

SEQ ID NO: 5676 - DNA, 1270 bp, Homo sapiens
ctcgcctcaccaggtacggatctcccgcgcgtcgccgaaagcggctctgacccagcggaagtaattctttcgactgccccggaacccaccggagcaggcagctgggggtgggggggcggccctgggataggggctgtggcagtacgcggggacccggctgcggtggctgcgggactgacgaatggagaggagaaaacctatggtggctgtgaaggacctgatgccatgtatgtcaaattgatatcatctgatggccatgaatttattgtaaaaagagaacatgcattaacatcaggcacgataaaagccatgttgagtggcccaggtcagtttgctgagaacgaaaccaatgaggtcaattttagagagataccttcacatgtgctatcgaaagtatgcatgtattttacgtacaaggttcgctacactaacagctccaccgagattcctgaattcccaattgcacctgaaattgcactggaactgctgatggctgcgaacttcttagattgttaaataaaataaattataataaactgttaactcttttcagtatttaatacctgtagttcagttagtaactttttcatatatagcatgttgcctgtatgcagttgaactatataaagttcattgcaaagcagattatcttgtttttttgcatagcaatcaaagttgaaatttgtttgctacatcaacaaattaaggacattttcacaaactgagaaataaacaaatatgccaattcgtaggtggttttgccttatcctttgaatgtgacttaaaatcagcaatgatgatatagtaaatactgaaatttaggtgtaaatcaatacgttctacagggaaataatgaggctaagtatttttatgtttttagtggttttttagaaacctaatcttatagccgccattagcattactagagttatgcaaataattgcattataaacatgtttataacttagccaaaacattgatttttataactctccaagtatgagttgaaatttcttatgtcttttgataaactgcagtattctttaagtgtactttgtccttttgtttattgctacaatttaagaactttatttaaaaacaattttggaaggttactaggtacagcttttgcagaagaaactgaactgtagccagatggtcagcaagtaaactacatgacttagagttcttgtgcattatacattttgggtaattcaaagtactgtatttgcattgactataaagcgtcgtttgcaatatttattcttcc

SEQ ID NO: 5677 - protein, 96 aa, Homo sapiens; identical to SEQ ID NO: 5653

SEQ ID NO: 5678 - DNA, 1337 bp, Homo sapiens
cacactctgcgtcctcgcctcaccaggtacggatctcccgcgcgtcgccgaaagcggctctgacccagcggaagtaattctttcgactgccccggaacccaccggagcaggcagctgggggtgggggggcggccctgggataggggctgtggcagtacgcggggacccggctgcggtggctgcgggactgacgagaaactactaaagttcctggggaagcaaagtagaatttcataagaacaaaatggatggagaggagaaaacctatggtggctgtgaaggacctgatgccatgtatgtcaaattgatatcatctgatggccatgaatttattgtaaaaagagaacatgcattaacatcaggcacgataaaagccatgttgagtggcccaggtcagtttgctgagaacgaaaccaatgaggtcaattttagagagataccttcacatgtgctatcgaaagtatgcatgtattttacgtacaaggttcgctacactaacagctccaccgagattcctgaattcccaattgcacctgaaattgcactggaactgctgatggctgcgaacttcttagattgttaaataaaataaattataataaactgttaactcttttcagtatttaatacctgtagttcagttagtaactttttcatatatagcatgttgcctgtatgcagttgaactatataaagttcattgcaaagcagattatcttgtttttttgcatagcaatcaaagttgaaatttgtttgctacatcaacaaattaaggacattttcacaaactgagaaataaacaaatatgccaattcgtaggtggttttgccttatcctttgaatgtgacttaaaatcagcaatgatgatatagtaaatactgaaatttaggtgtaaatcaatacgttctacagggaaataatgaggctaagtatttttatgtttttagtggttttttagaaacctaatcttatagccgccattagcattactagagttatgcaaataattgcattataaacatgtttataacttagccaaaacattgatttttataactctccaagtatgagttgaaatttcttatgtcttttgataaactgcagtattctttaagtgtactttgtccttttgtttattgctacaatttaagaactttatttaaaaacaattttggaaggttactaggtacagcttttgcagaagaaactgaactgtagccagatggtcagcaagtaaactacatgacttagagttcttgtgcattatacattttgggtaattcaaagtactgtatttgcattgactataaagcgtcgtttgcaatatttattcttcc

SEQ ID NO: 5679 - protein, 112 aa, Homo sapiens; identical to SEQ ID NO: 542

SEQ ID NO: 5680 - DNA, 1324 bp, Homo sapiens
agacggaagtgagcgacacactctgcgtcctcgcctcaccagagtcttgctgtgtggcccaggctggagtgcccggctggtctcaaattcctgacctcaagtgatctccctcccaaagtgttgcgattgcaggtgtgagccactgcacctggctgctgagaaatctttgcctacagtgagggaaactactaaagttcctggggaagcaaagtagaatttcataagaacaaaatggatggagaggagaaaacctatggtggctgtgaaggacctgatgccatgtatgtcaaattgatatcatctgatggccatgaatttattgtaaaaagagaacatgcattaacatcaggcacgataaaagccatgttgagtggcccaggtcagtttgctgagaacgaaaccaatgaggtcaattttagagagataccttcacatgtgctatcgaaagtatgcatgtattttacgtacaaggttcgctacactaacagctccaccgagattcctgaattcccaattgcacctgaaattgcactggaactgctgatggctgcgaacttcttagattgttaaataaaataaattataataaactgttaactcttttcagtatttaatacctgtagttcagttagtaactttttcatatatagcatgttgcctgtatgcagttgaactatataaagttcattgcaaagcagattatcttgtttttttgcatagcaatcaaagttgaaatttgtttgctacatcaacaaattaaggacattttcacaaactgagaaataaacaaatatgccaattcgtaggtggttttgccttatcctttgaatgtgacttaaaatcagcaatgatgatatagtaaatactgaaatttaggtgtaaatcaatacgttctacagggaaataatgaggctaagtatttttatgtttttagtggttttttagaaacctaatcttatagccgccattagcattactagagttatgcaaataattgcattataaacatgtttataacttagccaaaacattgatttttataactctccaagtatgagttgaaatttcttatgtcttttgataaactgcagtattctttaagtgtactttgtccttttgtttattgctacaatttaagaactttatttaaaaacaattttggaaggttactaggtacagcttttgcagaagaaactgaactgtagccagatggtcagcaagtaaactacatgacttagagttcttgtgcattatacattttgggtaattcaaagtactgtatttgcattgactataaagcgtcgtttgcaatatttattcttcc

SEQ ID NO: 5681 - protein, 112 aa, Homo sapiens; identical to SEQ ID NO: 542

SEQ ID NO: 5682 - DNA, 1185 bp, Homo sapiens
agacggaagtgagcgacacactctgcgtcctcgcctcaccaggaaactactaaagttcctggggaagcaaagtagaatttcataagaacaaaatggatggagaggagaaaacctatggtggctgtgaaggacctgatgccatgtatgtcaaattgatatcatctgatggccatgaatttattgtaaaaagagaacatgcattaacatcaggcacgataaaagccatgttgagtggcccaggtcagtttgctgagaacgaaaccaatgaggtcaattttagagagataccttcacatgtgctatcgaaagtatgcatgtattttacgtacaaggttcgctacactaacagctccaccgagattcctgaattcccaattgcacctgaaattgcactggaactgctgatggctgcgaacttcttagattgttaaataaaataaattataataaactgttaactcttttcagtatttaatacctgtagttcagttagtaactttttcatatatagcatgttgcctgtatgcagttgaactatataaagttcattgcaaagcagattatcttgtttttttgcatagcaatcaaagttgaaatttgtttgctacatcaacaaattaaggacattttcacaaactgagaaataaacaaatatgccaattcgtaggtggttttgccttatcctttgaatgtgacttaaaatcagcaatgatgatatagtaaatactgaaatttaggtgtaaatcaatacgttctacagggaaataatgaggctaagtatttttatgtttttagtggttttttagaaacctaatcttatagccgccattagcattactagagttatgcaaataattgcattataaacatgtttataacttagccaaaacattgatttttataactctccaagtatgagttgaaatttcttatgtcttttgataaactgcagtattctttaagtgtactttgtccttttgtttattgctacaatttaagaactttatttaaaaacaattttggaaggttactaggtacagcttttgcagaagaaactgaactgtagccagatggtcagcaagtaaactacatgacttagagttcttgtgcattatacattttgggtaattcaaagtactgtatttgcattgactataaagcgtcgtttgcaatatttattcttcc

SEQ ID NO: 5683 - protein, 112 aa, Homo sapiens; identical to SEQ ID NO: 542

SEQ ID NO: 5684 - DNA, 1131 bp, Homo sapiens
agacggaagtgagcgacacactctgcgtcctcgcctcaccagatggagaggagaaaacctatggtggctgtgaaggacctgatgccatgtatgtcaaattgatatcatctgatggccatgaatttattgtaaaaagagaacatgcattaacatcaggcacgataaaagccatgttgagtggcccaggtcagtttgctgagaacgaaaccaatgaggtcaattttagagagataccttcacatgtgctatcgaaagtatgcatgtattttacgtacaaggttcgctacactaacagctccaccgagattcctgaattcccaattgcacctgaaattgcactggaactgctgatggctgcgaacttcttagattgttaaataaaataaattataataaactgttaactcttttcagtatttaatacctgtagttcagttagtaactttttcatatatagcatgttgcctgtatgcagttgaactatataaagttcattgcaaagcagattatcttgtttttttgcatagcaatcaaagttgaaatttgtttgctacatcaacaaattaaggacattttcacaaactgagaaataaacaaatatgccaattcgtaggtggttttgccttatcctttgaatgtgacttaaaatcagcaatgatgatatagtaaatactgaaatttaggtgtaaatcaatacgttctacagggaaataatgaggctaagtatttttatgtttttagtggttttttagaaacctaatcttatagccgccattagcattactagagttatgcaaataattgcattataaacatgtttataacttagccaaaacattgatttttataactctccaagtatgagttgaaatttcttatgtcttttgataaactgcagtattctttaagtgtactttgtccttttgtttattgctacaatttaagaactttatttaaaaacaattttggaaggttactaggtacagcttttgcagaagaaactgaactgtagccagatggtcagcaagtaaactacatgacttagagttcttgtgcattatacattttgggtaattcaaagtactgtatttgcattgactataaagcgtcgtttgcaatatttattcttcc

SEQ ID NO: 5685 - protein, 96 aa, Homo sapiens; identical to SEQ ID NO: 5653

SEQ ID NO: 5686 - DNA, 839 bp, Homo sapiens
agagacagagtctcattctgttgcccaggctggagtgcaatggtgcggtctcagctcactgcaatctccgcctgctgggttcaggcaattctcctgcctcagagtagctggaattacaggtcagtttgctgagaacgaaaccaatgaggtcaattttagagagataccttcacatgtgctatcgaaagtatgcatgtattttacgtacaaggttcgctacactaacagctccaccgagattcctgaattcccaattgcacctgaaattgcactggaactgctgatggctgcgaacttcttagattgttaaataaaataaattataataaactgttaactcttttcagtatttaatacctgtagttcagttagtaactttttcatatatagcatgttgcctgtatgcagttgaactatataaagttcattgcaaagcagattatcttgtttttttgcatagcaatcaaagttgaaatttgtttgctacatcaacaaattaaggacattttcacaaactgagaaataaacaaatatgccaattcgtaggtggttttgccttatcctttgaatgtgacttaaaatcagcaatgatgatatagtaaatactgaaatttaggtgtaaatcaatacgttctacagggaaataatgaggctaagtatttttatgtttttagtggttttttagaaacctaatcttatagccgccattagcattactagagttatgcaaataattgcattataaacatgtttataacttagccaaaacattgatttttataactctccaagtatgagttgaaatttcttatgtcttttgataaactgcagtattcttt

SEQ ID NO: 5687 - protein, 30 aa, Homo sapiens; identical to SEQ ID NO: 5639

SEQ ID NO: 5688 - DNA, 1030 bp, Homo sapiens
tgttagcatttgcatagctagaaaatttgggttaattttattaccgatgtcactttcaaaagcttaattaggcagaaaaccatcctagagtgatgatatctttggagttaaggaaactactaaagttcctggggaagcaaagtagaatttcataagaacaaaatggatggagaggagaaaacctatggtggctgtgaaggacctgatgccatgtatgtcaaattgatatcatctgatggccatgaatttattgtaaaaagagaacatgcattaacatcaggcacgataaaagccatgttgagtggcccaggtcagtttgctgagaacgaaaccaatgaggtcaattttagagagataccttcacatgtgctatcgaaagtatgcatgtattttacgtacaaggttcgctacactaacagctccaccgagattcctgaattcccaattgcacctgaaattgcactggaactgctgatggctgcgaacttcttagattgttaaataaaataaattataataaactgttaactcttttcagtatttaatacctgtagttcagttagtaactttttcatatatagcatgttgcctgtatgcagttgaactatataaagttcattgcaaagcagattatcttgtttttttgcatagcaatcaaagttgaaatttgtttgctacatcaacaaattaaggacattttcacaaactgagaaataaacaaatatgccaattcgtaggtggttttgccttatcctttgaatgtgacttaaaatcagcaatgatgatatagtaaatactgaaatttaggtgtaaatcaatacgttctacagggaaataatgaggctaagtatttttatgtttttagtggttttttagaaacctaatcttatagccgccattagcattactagagttatgcaaataattgcattataaacatgtttataacttagccaaaacattgatttttataactctccaagtatgagttgaaatttcttatgtcttttgataaactgcagtattcttt

SEQ ID NO: 5689 - protein, 112 aa, Homo sapiens; identical to SEQ ID NO: 542

SEQ ID NO: 5690 - DNA, 975 bp, Homo sapiens
gcagtttacatgtggatttattcattctggagatacaatggcaaggaaacagctgtggaaactactaaagttcctggggaagcaaagtagaatttcataagaacaaaatggatggagaggagaaaacctatggtggctgtgaaggacctgatgccatgtatgtcaaattgatatcatctgatggccatgaatttattgtaaaaagagaacatgcattaacatcaggcacgataaaagccatgttgagtggcccaggtcagtttgctgagaacgaaaccaatgaggtcaattttagagagataccttcacatgtgctatcgaaagtatgcatgtattttacgtacaaggttcgctacactaacagctccaccgagattcctgaattcccaattgcacctgaaattgcactggaactgctgatggctgcgaacttcttagattgttaaataaaataaattataataaactgttaactcttttcagtatttaatacctgtagttcagttagtaactttttcatatatagcatgttgcctgtatgcagttgaactatataaagttcattgcaaagcagattatcttgtttttttgcatagcaatcaaagttgaaatttgtttgctacatcaacaaattaaggacattttcacaaactgagaaataaacaaatatgccaattcgtaggtggttttgccttatcctttgaatgtgacttaaaatcagcaatgatgatatagtaaatactgaaatttaggtgtaaatcaatacgttctacagggaaataatgaggctaagtatttttatgtttttagtggttttttagaaacctaatcttatagccgccattagcattactagagttatgcaaataattgcattataaacatgtttataacttagccaaaacattgatttttataactctccaagtatgagttgaaatttcttatgtcttttgataaactgcagtattcttt

SEQ ID NO: 5691 - protein, 112 aa, Homo sapiens; identical to SEQ ID NO: 542

SEQ ID NO: 5692 - DNA, 1152 bp, Homo sapiens
gggagaagagggcggcgggacctttcctggcgccgctcgcagtttacatgtggatttattcattctggagatacaatggcaaggaaacagctgtgagtcttgctgtgtggcccaggctggagtgcccggctggtctcaaattcctgacctcaagtgatctccctcccaaagtgttgcgattgcaggtgtgagccactgcacctggctgctgagaaatctttgcctacagtgagggaaactactaaagttcctggggaagcaaagtagaatttcataagaacaaaatggatggagaggagaaaacctatggtggctgtgaaggacctgatgccatgtatgtcaaattgatatcatctgatggccatgaatttattgtaaaaagagaacatgcattaacatcaggcacgataaaagccatgttgagtggcccaggtcagtttgctgagaacgaaaccaatgaggtcaattttagagagataccttcacatgtgctatcgaaagtatgcatgtattttacgtacaaggttcgctacactaacagctccaccgagattcctgaattcccaattgcacctgaaattgcactggaactgctgatggctgcgaacttcttagattgttaaataaaataaattataataaactgttaactcttttcagtatttaatacctgtagttcagttagtaactttttcatatatagcatgttgcctgtatgcagttgaactatataaagttcattgcaaagcagattatcttgtttttttgcatagcaatcaaagttgaaatttgtttgctacatcaacaaattaaggacattttcacaaactgagaaataaacaaatatgccaattcgtaggtggttttgccttatcctttgaatgtgacttaaaatcagcaatgatgatatagtaaatactgaaatttaggtgtaaatcaatacgttctacagggaaataatgaggctaagtatttttatgtttttagtggttttttagaaacctaatcttatagccgccattagcattactagagttatgcaaataattgcattataaacatgtttataacttagccaaaacattgatttttataactctccaagtatgagttgaaatttcttatgtcttttgataaactgcagtattcttt

SEQ ID NO: 5693 - protein, 112 aa, Homo sapiens; identical to SEQ ID NO: 542

SEQ ID NO: 5694 - DNA, 983 bp, Homo sapiens
acccggctgcggtggctgcgggactgacgagtgagtctcgggctggggcggaaacggagctccgggaaactactaaagttcctggggaagcaaagtagaatttcataagaacaaaatggatggagaggagaaaacctatggtggctgtgaaggacctgatgccatgtatgtcaaattgatatcatctgatggccatgaatttattgtaaaaagagaacatgcattaacatcaggcacgataaaagccatgttgagtggcccaggtcagtttgctgagaacgaaaccaatgaggtcaattttagagagataccttcacatgtgctatcgaaagtatgcatgtattttacgtacaaggttcgctacactaacagctccaccgagattcctgaattcccaattgcacctgaaattgcactggaactgctgatggctgcgaacttcttagattgttaaataaaataaattataataaactgttaactcttttcagtatttaatacctgtagttcagttagtaactttttcatatatagcatgttgcctgtatgcagttgaactatataaagttcattgcaaagcagattatcttgtttttttgcatagcaatcaaagttgaaatttgtttgctacatcaacaaattaaggacattttcacaaactgagaaataaacaaatatgccaattcgtaggtggttttgccttatcctttgaatgtgacttaaaatcagcaatgatgatatagtaaatactgaaatttaggtgtaaatcaatacgttctacagggaaataatgaggctaagtatttttatgtttttagtggttttttagaaacctaatcttatagccgccattagcattactagagttatgcaaataattgcattataaacatgtttataacttagccaaaacattgatttttataactctccaagtatgagttgaaatttcttatgtcttttgataaactgcagtattcttt

SEQ ID NO: 5695 - protein, 112 aa, Homo sapiens; identical to SEQ ID NO: 542

SEQ ID NO: 5696 - DNA, 1188 bp, Homo sapiens
cgcgcgtcgccgaaagcggctctgacccagcggaagtaattctttcgactgccccggaacccaccggagcaggcagctgggggtgggggggcggccctgggataggggctgtggcagtacgcggggacccggctgcggtggctgcgggactgacgagatcatcagggaaggaagacctctctgaggagttgatgttttacctggagacctaaatgatgaggatttaaaagcttttcggacaacagcaattacaaatgcaaagaccttgaggaaactactaaagttcctggggaagcaaagtagaatttcataagaacaaaatggatggagaggagaaaacctatggtggctgtgaaggacctgatgccatgtatgtcaaattgatatcatctgatggccatgaatttattgtaaaaagagaacatgcattaacatcaggcacgataaaagccatgttgagtggcccaggtcagtttgctgagaacgaaaccaatgaggtcaattttagagagataccttcacatgtgctatcgaaagtatgcatgtattttacgtacaaggttcgctacactaacagctccaccgagattcctgaattcccaattgcacctgaaattgcactggaactgctgatggctgcgaacttcttagattgttaaataaaataaattataataaactgttaactcttttcagtatttaatacctgtagttcagttagtaactttttcatatatagcatgttgcctgtatgcagttgaactatataaagttcattgcaaagcagattatcttgtttttttgcatagcaatcaaagttgaaatttgtttgctacatcaacaaattaaggacattttcacaaactgagaaataaacaaatatgccaattcgtaggtggttttgccttatcctttgaatgtgacttaaaatcagcaatgatgatatagtaaatactgaaatttaggtgtaaatcaatacgttctacagggaaataatgaggctaagtatttttatgtttttagtggttttttagaaacctaatcttatagccgccattagcattactagagttatgcaaataattgcattataaacatgtttataacttagccaaaacattgatttttataactctccaagtatgagttgaaatttcttatgtcttttgataaactgcagtattcttt

SEQ ID NO: 5697 - protein, 112 aa, Homo sapiens; identical to SEQ ID NO: 542

SEQ ID NO: 5698 - DNA, 1233 bp, Homo sapiens
ctcaccaggtacggatctcccgcgcgtcgccgaaagcggctctgacccagcggaagtaattctttcgactgccccggaacccaccggagcaggcagctgggggtgggggggcggccctgggataggggctgtggcagtacgcggggacccggctgcggtggctgcgggactgacgaagtcttgctgtgtggcccaggctggagtgcccggctggtctcaaattcctgacctcaagtgatctccctcccaaagtgttgcgattgcaggtgtgagccactgcacctggctgctgagaaatctttgcctacagtgagggaaactactaaagttcctggggaagcaaagtagaatttcataagaacaaaatggatggagaggagaaaacctatggtggctgtgaaggacctgatgccatgtatgtcaaattgatatcatctgatggccatgaatttattgtaaaaagagaacatgcattaacatcaggcacgataaaagccatgttgagtggcccaggtcagtttgctgagaacgaaaccaatgaggtcaattttagagagataccttcacatgtgctatcgaaagtatgcatgtattttacgtacaaggttcgctacactaacagctccaccgagattcctgaattcccaattgcacctgaaattgcactggaactgctgatggctgcgaacttcttagattgttaaataaaataaattataataaactgttaactcttttcagtatttaatacctgtagttcagttagtaactttttcatatatagcatgttgcctgtatgcagttgaactatataaagttcattgcaaagcagattatcttgtttttttgcatagcaatcaaagttgaaatttgtttgctacatcaacaaattaaggacattttcacaaactgagaaataaacaaatatgccaattcgtaggtggttttgccttatcctttgaatgtgacttaaaatcagcaatgatgatatagtaaatactgaaatttaggtgtaaatcaatacgttctacagggaaataatgaggctaagtatttttatgtttttagtggttttttagaaacctaatcttatagccgccattagcattactagagttatgcaaataattgcattataaacatgtttataacttagccaaaacattgatttttataactctccaagtatgagttgaaatttcttatgtcttttgataaactgcagtattcttt

SEQ ID NO: 5699 - protein, 112 aa, Homo sapiens; identical to SEQ ID NO: 542

SEQ ID NO: 5700 - DNA, 1045 bp, Homo sapiens
ctcgcctcaccaggtacggatctcccgcgcgtcgccgaaagcggctctgacccagcggaagtaattctttcgactgccccggaacccaccggagcaggcagctgggggtgggggggcggccctgggataggggctgtggcagtacgcggggacccggctgcggtggctgcgggactgacgaatggagaggagaaaacctatggtggctgtgaaggacctgatgccatgtatgtcaaattgatatcatctgatggccatgaatttattgtaaaaagagaacatgcattaacatcaggcacgataaaagccatgttgagtggcccaggtcagtttgctgagaacgaaaccaatgaggtcaattttagagagataccttcacatgtgctatcgaaagtatgcatgtattttacgtacaaggttcgctacactaacagctccaccgagattcctgaattcccaattgcacctgaaattgcactggaactgctgatggctgcgaacttcttagattgttaaataaaataaattataataaactgttaactcttttcagtatttaatacctgtagttcagttagtaactttttcatatatagcatgttgcctgtatgcagttgaactatataaagttcattgcaaagcagattatcttgtttttttgcatagcaatcaaagttgaaatttgtttgctacatcaacaaattaaggacattttcacaaactgagaaataaacaaatatgccaattcgtaggtggttttgccttatcctttgaatgtgacttaaaatcagcaatgatgatatagtaaatactgaaatttaggtgtaaatcaatacgttctacagggaaataatgaggctaagtatttttatgtttttagtggttttttagaaacctaatcttatagccgccattagcattactagagttatgcaaataattgcattataaacatgtttataacttagccaaaacattgatttttataactctccaagtatgagttgaaatttcttatgtcttttgataaactgcagtattcttt

SEQ ID NO: 5701 - protein, 96 aa, Homo sapiens; identical to SEQ ID NO: 5653

SEQ ID NO: 5702 - DNA, 1112 bp, Homo sapiens
cacactctgcgtcctcgcctcaccaggtacggatctcccgcgcgtcgccgaaagcggctctgacccagcggaagtaattctttcgactgccccggaacccaccggagcaggcagctgggggtgggggggcggccctgggataggggctgtggcagtacgcggggacccggctgcggtggctgcgggactgacgagaaactactaaagttcctggggaagcaaagtagaatttcataagaacaaaatggatggagaggagaaaacctatggtggctgtgaaggacctgatgccatgtatgtcaaattgatatcatctgatggccatgaatttattgtaaaaagagaacatgcattaacatcaggcacgataaaagccatgttgagtggcccaggtcagtttgctgagaacgaaaccaatgaggtcaattttagagagataccttcacatgtgctatcgaaagtatgcatgtattttacgtacaaggttcgctacactaacagctccaccgagattcctgaattcccaattgcacctgaaattgcactggaactgctgatggctgcgaacttcttagattgttaaataaaataaattataataaactgttaactcttttcagtatttaatacctgtagttcagttagtaactttttcatatatagcatgttgcctgtatgcagttgaactatataaagttcattgcaaagcagattatcttgtttttttgcatagcaatcaaagttgaaatttgtttgctacatcaacaaattaaggacattttcacaaactgagaaataaacaaatatgccaattcgtaggtggttttgccttatcctttgaatgtgacttaaaatcagcaatgatgatatagtaaatactgaaatttaggtgtaaatcaatacgttctacagggaaataatgaggctaagtatttttatgtttttagtggttttttagaaacctaatcttatagccgccattagcattactagagttatgcaaataattgcattataaacatgtttataacttagccaaaacattgatttttataactctccaagtatgagttgaaatttcttatgtcttttgataaactgcagtattcttt

SEQ ID NO: 5703 - protein, 112 aa, Homo sapiens; identical to SEQ ID NO: 542

SEQ ID NO: 5704 - DNA, 960 bp, Homo sapiens
agacggaagtgagcgacacactctgcgtcctcgcctcaccaggaaactactaaagttcctggggaagcaaagtagaatttcataagaacaaaatggatggagaggagaaaacctatggtggctgtgaaggacctgatgccatgtatgtcaaattgatatcatctgatggccatgaatttattgtaaaaagagaacatgcattaacatcaggcacgataaaagccatgttgagtggcccaggtcagtttgctgagaacgaaaccaatgaggtcaattttagagagataccttcacatgtgctatcgaaagtatgcatgtattttacgtacaaggttcgctacactaacagctccaccgagattcctgaattcccaattgcacctgaaattgcactggaactgctgatggctgcgaacttcttagattgttaaataaaataaattataataaactgttaactcttttcagtatttaatacctgtagttcagttagtaactttttcatatatagcatgttgcctgtatgcagttgaactatataaagttcattgcaaagcagattatcttgtttttttgcatagcaatcaaagttgaaatttgtttgctacatcaacaaattaaggacattttcacaaactgagaaataaacaaatatgccaattcgtaggtggttttgccttatcctttgaatgtgacttaaaatcagcaatgatgatatagtaaatactgaaatttaggtgtaaatcaatacgttctacagggaaataatgaggctaagtatttttatgtttttagtggttttttagaaacctaatcttatagccgccattagcattactagagttatgcaaataattgcattataaacatgtttataacttagccaaaacattgatttttataactctccaagtatgagttgaaatttcttatgtcttttgataaactgcagtattcttt

SEQ ID NO: 5705 - protein, 112 aa, Homo sapiens; identical to SEQ ID NO: 542

SEQ ID NO: 5706 - DNA, 906 bp, Homo sapiens
agacggaagtgagcgacacactctgcgtcctcgcctcaccagatggagaggagaaaacctatggtggctgtgaaggacctgatgccatgtatgtcaaattgatatcatctgatggccatgaatttattgtaaaaagagaacatgcattaacatcaggcacgataaaagccatgttgagtggcccaggtcagtttgctgagaacgaaaccaatgaggtcaattttagagagataccttcacatgtgctatcgaaagtatgcatgtattttacgtacaaggttcgctacactaacagctccaccgagattcctgaattcccaattgcacctgaaattgcactggaactgctgatggctgcgaacttcttagattgttaaataaaataaattataataaactgttaactcttttcagtatttaatacctgtagttcagttagtaactttttcatatatagcatgttgcctgtatgcagttgaactatataaagttcattgcaaagcagattatcttgtttttttgcatagcaatcaaagttgaaatttgtttgctacatcaacaaattaaggacattttcacaaactgagaaataaacaaatatgccaattcgtaggtggttttgccttatcctttgaatgtgacttaaaatcagcaatgatgatatagtaaatactgaaatttaggtgtaaatcaatacgttctacagggaaataatgaggctaagtatttttatgtttttagtggttttttagaaacctaatcttatagccgccattagcattactagagttatgcaaataattgcattataaacatgtttataacttagccaaaacattgatttttataactctccaagtatgagttgaaatttcttatgtcttttgataaactgcagtattcttt

SEQ ID NO: 5707 - protein, 96 aa, Homo sapiens; identical to SEQ ID NO: 5653

SEQ ID NO: 5708 - DNA, 1099 bp, Homo sapiens
agacggaagtgagcgacacactctgcgtcctcgcctcaccagagtcttgctgtgtggcccaggctggagtgcccggctggtctcaaattcctgacctcaagtgatctccctcccaaagtgttgcgattgcaggtgtgagccactgcacctggctgctgagaaatctttgcctacagtgagggaaactactaaagttcctggggaagcaaagtagaatttcataagaacaaaatggatggagaggagaaaacctatggtggctgtgaaggacctgatgccatgtatgtcaaattgatatcatctgatggccatgaatttattgtaaaaagagaacatgcattaacatcaggcacgataaaagccatgttgagtggcccaggtcagtttgctgagaacgaaaccaatgaggtcaattttagagagataccttcacatgtgctatcgaaagtatgcatgtattttacgtacaaggttcgctacactaacagctccaccgagattcctgaattcccaattgcacctgaaattgcactggaactgctgatggctgcgaacttcttagattgttaaataaaataaattataataaactgttaactcttttcagtatttaatacctgtagttcagttagtaactttttcatatatagcatgttgcctgtatgcagttgaactatataaagttcattgcaaagcagattatcttgtttttttgcatagcaatcaaagttgaaatttgtttgctacatcaacaaattaaggacattttcacaaactgagaaataaacaaatatgccaattcgtaggtggttttgccttatcctttgaatgtgacttaaaatcagcaatgatgatatagtaaatactgaaatttaggtgtaaatcaatacgttctacagggaaataatgaggctaagtatttttatgtttttagtggttttttagaaacctaatcttatagccgccattagcattactagagttatgcaaataattgcattataaacatgtttataacttagccaaaacattgatttttataactctccaagtatgagttgaaatttcttatgtcttttgataaactgcagtattcttt

SEQ ID NO: 5709 - protein, 112 aa, Homo sapiens; identical to SEQ ID NO: 542

SEQ ID NO: 5710 - DNA, 544 bp, Homo sapiens
agagacagagtctcattctgttgcccaggctggagtgcaatggtgcggtctcagctcactgcaatctccgcctgctgggttcaggcaattctcctgcctcagagtagctggaattacaggtcagtttgctgagaacgaaaccaatgaggtcaattttagagagataccttcacatgtgctatcgaaagtatgcatgtattttacgtacaaggttcgctacactaacagctccaccgagattcctgaattcccaattgcacctgaaattgcactggaactgctgatggctgcgaacttcttagattgttaaataaaataaattataataaactgttaactcttttcagtatttaatacctgtagttcagttagtaactttttcatatatagcatgttgcctgtatgcagttgaactatataaagttcattgcaaagcagattatcttgtttttttgcatagcaatcaaagttgaaatttgtttgctacatcaacaaattaaggacattttcacaaactgagaaataaacaaatatgccaattcgt

SEQ ID NO: 5711 - protein, 30 aa, Homo sapiens; identical to SEQ ID NO: 5639

SEQ ID NO: 5712 - DNA, 735 bp, Homo sapiens
tgttagcatttgcatagctagaaaatttgggttaattttattaccgatgtcactttcaaaagcttaattaggcagaaaaccatcctagagtgatgatatctttggagttaaggaaactactaaagttcctggggaagcaaagtagaatttcataagaacaaaatggatggagaggagaaaacctatggtggctgtgaaggacctgatgccatgtatgtcaaattgatatcatctgatggccatgaatttattgtaaaaagagaacatgcattaacatcaggcacgataaaagccatgttgagtggcccaggtcagtttgctgagaacgaaaccaatgaggtcaattttagagagataccttcacatgtgctatcgaaagtatgcatgtattttacgtacaaggttcgctacactaacagctccaccgagattcctgaattcccaattgcacctgaaattgcactggaactgctgatggctgcgaacttcttagattgttaaataaaataaattataataaactgttaactcttttcagtatttaatacctgtagttcagttagtaactttttcatatatagcatgttgcctgtatgcagttgaactatataaagttcattgcaaagcagattatcttgtttttttgcatagcaatcaaagttgaaatttgtttgctacatcaacaaattaaggacattttcacaaactgagaaataaacaaatatgccaattcgt

SEQ ID NO: 5713 - protein, 112 aa, Homo sapiens; identical to SEQ ID NO: 542

SEQ ID NO: 5714 - DNA, 857 bp, Homo sapiens
gggagaagagggcggcgggacctttcctggcgccgctcgcagtttacatgtggatttattcattctggagatacaatggcaaggaaacagctgtgagtcttgctgtgtggcccaggctggagtgcccggctggtctcaaattcctgacctcaagtgatctccctcccaaagtgttgcgattgcaggtgtgagccactgcacctggctgctgagaaatctttgcctacagtgagggaaactactaaagttcctggggaagcaaagtagaatttcataagaacaaaatggatggagaggagaaaacctatggtggctgtgaaggacctgatgccatgtatgtcaaattgatatcatctgatggccatgaatttattgtaaaaagagaacatgcattaacatcaggcacgataaaagccatgttgagtggcccaggtcagtttgctgagaacgaaaccaatgaggtcaattttagagagataccttcacatgtgctatcgaaagtatgcatgtattttacgtacaaggttcgctacactaacagctccaccgagattcctgaattcccaattgcacctgaaattgcactggaactgctgatggctgcgaacttcttagattgttaaataaaataaattataataaactgttaactcttttcagtatttaatacctgtagttcagttagtaactttttcatatatagcatgttgcctgtatgcagttgaactatataaagttcattgcaaagcagattatcttgtttttttgcatagcaatcaaagttgaaatttgtttgctacatcaacaaattaaggacattttcacaaactgagaaataaacaaatatgccaattcgt

SEQ ID NO: 5715 - protein, 112 aa, Homo sapiens; identical to SEQ ID NO: 542

SEQ ID NO: 5716 - DNA, 688 bp, Homo sapiens
acccggctgcggtggctgcgggactgacgagtgagtctcgggctggggcggaaacggagctccgggaaactactaaagttcctggggaagcaaagtagaatttcataagaacaaaatggatggagaggagaaaacctatggtggctgtgaaggacctgatgccatgtatgtcaaattgatatcatctgatggccatgaatttattgtaaaaagagaacatgcattaacatcaggcacgataaaagccatgttgagtggcccaggtcagtttgctgagaacgaaaccaatgaggtcaattttagagagataccttcacatgtgctatcgaaagtatgcatgtattttacgtacaaggttcgctacactaacagctccaccgagattcctgaattcccaattgcacctgaaattgcactggaactgctgatggctgcgaacttcttagattgttaaataaaataaattataataaactgttaactcttttcagtatttaatacctgtagttcagttagtaactttttcatatatagcatgttgcctgtatgcagttgaactatataaagttcattgcaaagcagattatcttgtttttttgcatagcaatcaaagttgaaatttgtttgctacatcaacaaattaaggacattttcacaaactgagaaataaacaaatatgccaattcgt

SEQ ID NO: 5717 - protein, 112 aa, Homo sapiens; identical to SEQ ID NO: 542

SEQ ID NO: 5718 - DNA, 893 bp, Homo sapiens
cgcgcgtcgccgaaagcggctctgacccagcggaagtaattctttcgactgccccggaacccaccggagcaggcagctgggggtgggggggcggccctgggataggggctgtggcagtacgcggggacccggctgcggtggctgcgggactgacgagatcatcagggaaggaagacctctctgaggagttgatgttttacctggagacctaaatgatgaggatttaaaagcttttcggacaacagcaattacaaatgcaaagaccttgaggaaactactaaagttcctggggaagcaaagtagaatttcataagaacaaaatggatggagaggagaaaacctatggtggctgtgaaggacctgatgccatgtatgtcaaattgatatcatctgatggccatgaatttattgtaaaaagagaacatgcattaacatcaggcacgataaaagccatgttgagtggcccaggtcagtttgctgagaacgaaaccaatgaggtcaattttagagagataccttcacatgtgctatcgaaagtatgcatgtattttacgtacaaggttcgctacactaacagctccaccgagattcctgaattcccaattgcacctgaaattgcactggaactgctgatggctgcgaacttcttagattgttaaataaaataaattataataaactgttaactcttttcagtatttaatacctgtagttcagttagtaactttttcatatatagcatgttgcctgtatgcagttgaactatataaagttcattgcaaagcagattatcttgtttttttgcatagcaatcaaagttgaaatttgtttgctacatcaacaaattaaggacattttcacaaactgagaaataaacaaatatgccaattcgt

SEQ ID NO: 5719 - protein, 112 aa, Homo sapiens; identical to SEQ ID NO: 542

SEQ ID NO: 5720 - DNA, 938 bp, Homo sapiens
ctcaccaggtacggatctcccgcgcgtcgccgaaagcggctctgacccagcggaagtaattctttcgactgccccggaacccaccggagcaggcagctgggggtgggggggcggccctgggataggggctgtggcagtacgcggggacccggctgcggtggctgcgggactgacgaagtcttgctgtgtggcccaggctggagtgcccggctggtctcaaattcctgacctcaagtgatctccctcccaaagtgttgcgattgcaggtgtgagccactgcacctggctgctgagaaatctttgcctacagtgagggaaactactaaagttcctggggaagcaaagtagaatttcataagaacaaaatggatggagaggagaaaacctatggtggctgtgaaggacctgatgccatgtatgtcaaattgatatcatctgatggccatgaatttattgtaaaaagagaacatgcattaacatcaggcacgataaaagccatgttgagtggcccaggtcagtttgctgagaacgaaaccaatgaggtcaattttagagagataccttcacatgtgctatcgaaagtatgcatgtattttacgtacaaggttcgctacactaacagctccaccgagattcctgaattcccaattgcacctgaaattgcactggaactgctgatggctgcgaacttcttagattgttaaataaaataaattataataaactgttaactcttttcagtatttaatacctgtagttcagttagtaactttttcatatatagcatgttgcctgtatgcagttgaactatataaagttcattgcaaagcagattatcttgtttttttgcatagcaatcaaagttgaaatttgtttgctacatcaacaaattaaggacattttcacaaactgagaaataaacaaatatgccaattcgt

SEQ ID NO: 5721 - protein, 112 aa, Homo sapiens; identical to SEQ ID NO: 542

SEQ ID NO: 5722 - DNA, 750 bp, Homo sapiens
ctcgcctcaccaggtacggatctcccgcgcgtcgccgaaagcggctctgacccagcggaagtaattctttcgactgccccggaacccaccggagcaggcagctgggggtgggggggcggccctgggataggggctgtggcagtacgcggggacccggctgcggtggctgcgggactgacgaatggagaggagaaaacctatggtggctgtgaaggacctgatgccatgtatgtcaaattgatatcatctgatggccatgaatttattgtaaaaagagaacatgcattaacatcaggcacgataaaagccatgttgagtggcccaggtcagtttgctgagaacgaaaccaatgaggtcaattttagagagataccttcacatgtgctatcgaaagtatgcatgtattttacgtacaaggttcgctacactaacagctccaccgagattcctgaattcccaattgcacctgaaattgcactggaactgctgatggctgcgaacttcttagattgttaaataaaataaattataataaactgttaactcttttcagtatttaatacctgtagttcagttagtaactttttcatatatagcatgttgcctgtatgcagttgaactatataaagttcattgcaaagcagattatcttgtttttttgcatagcaatcaaagttgaaatttgtttgctacatcaacaaattaaggacattttcacaaactgagaaataaacaaatatgccaattcgt

SEQ ID NO: 5723 - protein, 96 aa, Homo sapiens; identical to SEQ ID NO: 5653

SEQ ID NO: 5724 - DNA, 817 bp, Homo sapiens
cacactctgcgtcctcgcctcaccaggtacggatctcccgcgcgtcgccgaaagcggctctgacccagcggaagtaattctttcgactgccccggaacccaccggagcaggcagctgggggtgggggggcggccctgggataggggctgtggcagtacgcggggacccggctgcggtggctgcgggactgacgagaaactactaaagttcctggggaagcaaagtagaatttcataagaacaaaatggatggagaggagaaaacctatggtggctgtgaaggacctgatgccatgtatgtcaaattgatatcatctgatggccatgaatttattgtaaaaagagaacatgcattaacatcaggcacgataaaagccatgttgagtggcccaggtcagtttgctgagaacgaaaccaatgaggtcaattttagagagataccttcacatgtgctatcgaaagtatgcatgtattttacgtacaaggttcgctacactaacagctccaccgagattcctgaattcccaattgcacctgaaattgcactggaactgctgatggctgcgaacttcttagattgttaaataaaataaattataataaactgttaactcttttcagtatttaatacctgtagttcagttagtaactttttcatatatagcatgttgcctgtatgcagttgaactatataaagttcattgcaaagcagattatcttgtttttttgcatagcaatcaaagttgaaatttgtttgctacatcaacaaattaaggacattttcacaaactgagaaataaacaaatatgccaattcgt

SEQ ID NO: 5725 - protein, 112 aa, Homo sapiens; identical to SEQ ID NO: 542

SEQ ID NO: 5726 - DNA, 665 bp, Homo sapiens
agacggaagtgagcgacacactctgcgtcctcgcctcaccaggaaactactaaagttcctggggaagcaaagtagaatttcataagaacaaaatggatggagaggagaaaacctatggtggctgtgaaggacctgatgccatgtatgtcaaattgatatcatctgatggccatgaatttattgtaaaaagagaacatgcattaacatcaggcacgataaaagccatgttgagtggcccaggtcagtttgctgagaacgaaaccaatgaggtcaattttagagagataccttcacatgtgctatcgaaagtatgcatgtattttacgtacaaggttcgctacactaacagctccaccgagattcctgaattcccaattgcacctgaaattgcactggaactgctgatggctgcgaacttcttagattgttaaataaaataaattataataaactgttaactcttttcagtatttaatacctgtagttcagttagtaactttttcatatatagcatgttgcctgtatgcagttgaactatataaagttcattgcaaagcagattatcttgtttttttgcatagcaatcaaagttgaaatttgtttgctacatcaacaaattaaggacattttcacaaactgagaaataaacaaatatgccaattcgt

SEQ ID NO: 5727 - protein, 112 aa, Homo sapiens; identical to SEQ ID NO: 542

SEQ ID NO: 5728 - DNA, 611 bp, Homo sapiens
agacggaagtgagcgacacactctgcgtcctcgcctcaccagatggagaggagaaaacctatggtggctgtgaaggacctgatgccatgtatgtcaaattgatatcatctgatggccatgaatttattgtaaaaagagaacatgcattaacatcaggcacgataaaagccatgttgagtggcccaggtcagtttgctgagaacgaaaccaatgaggtcaattttagagagataccttcacatgtgctatcgaaagtatgcatgtattttacgtacaaggttcgctacactaacagctccaccgagattcctgaattcccaattgcacctgaaattgcactggaactgctgatggctgcgaacttcttagattgttaaataaaataaattataataaactgttaactcttttcagtatttaatacctgtagttcagttagtaactttttcatatatagcatgttgcctgtatgcagttgaactatataaagttcattgcaaagcagattatcttgtttttttgcatagcaatcaaagttgaaatttgtttgctacatcaacaaattaaggacattttcacaaactgagaaataaacaaatatgccaattcgt

SEQ ID NO: 5729 - protein, 96 aa, Homo sapiens; identical to SEQ ID NO: 5653

SEQ ID NO: 5730 - DNA, 804 bp, Homo sapiens
agacggaagtgagcgacacactctgcgtcctcgcctcaccagagtcttgctgtgtggcccaggctggagtgcccggctggtctcaaattcctgacctcaagtgatctccctcccaaagtgttgcgattgcaggtgtgagccactgcacctggctgctgagaaatctttgcctacagtgagggaaactactaaagttcctggggaagcaaagtagaatttcataagaacaaaatggatggagaggagaaaacctatggtggctgtgaaggacctgatgccatgtatgtcaaattgatatcatctgatggccatgaatttattgtaaaaagagaacatgcattaacatcaggcacgataaaagccatgttgagtggcccaggtcagtttgctgagaacgaaaccaatgaggtcaattttagagagataccttcacatgtgctatcgaaagtatgcatgtattttacgtacaaggttcgctacactaacagctccaccgagattcctgaattcccaattgcacctgaaattgcactggaactgctgatggctgcgaacttcttagattgttaaataaaataaattataataaactgttaactcttttcagtatttaatacctgtagttcagttagtaactttttcatatatagcatgttgcctgtatgcagttgaactatataaagttcattgcaaagcagattatcttgtttttttgcatagcaatcaaagttgaaatttgtttgctacatcaacaaattaaggacattttcacaaactgagaaataaacaaatatgccaattcgt

SEQ ID NO: 5731 - protein, 112 aa, Homo sapiens; identical to SEQ ID NO: 542

SEQ ID NO: 5732 - DNA, 543 bp, Homo sapiens
tgttagcatttgcatagctagaaaatttgggttaattttattaccgatgtcactttcaaaagcttaattaggcagaaaaccatcctagagtgatgatatctttggagttaaggaaactactaaagttcctggggaagcaaagtagaatttcataagaacaaaatggatggagaggagaaaacctatggtggctgtgaaggacctgatgccatgtatgtcaaattgatatcatctgatggccatgaatttattgtaaaaagagaacatgcattaacatcaggcacgataaaagccatgttgagtggcccaggtcagtttgctgagaacgaaaccaatgaggtcaattttagagagataccttcacatgtgctatcgaaagtatgcatgtattttacgtacaaggttcgctacactaacagctccaccgagattcctgaattcccaattgcacctgaaattgcactggaactgctgatggctgcgaacttcttagattgttaaataaaataaattataataaactgttaactcttttcagtattt

SEQ ID NO: 5733 - protein, 112 aa, Homo sapiens; identical to SEQ ID NO: 542

SEQ ID NO: 5734 - DNA, 598 bp, Homo sapiens
aggggctgtggcagtacgcggggacccggctgcggtggctgcgggactgacgagatcatcagggaaggaagacctctctgaggagttgatgttttacctggagacctaaatgatgaggatttaaaagcttttcggacaacagcaattacaaatgcaaagaccttgaggaaactactaaagttcctggggaagcaaagtagaatttcataagaacaaaatggatggagaggagaaaacctatggtggctgtgaaggacctgatgccatgtatgtcaaattgatatcatctgatggccatgaatttattgtaaaaagagaacatgcattaacatcaggcacgataaaagccatgttgagtggcccaggtcagtttgctgagaacgaaaccaatgaggtcaattttagagagataccttcacatgtgctatcgaaagtatgcatgtattttacgtacaaggttcgctacactaacagctccaccgagattcctgaattcccaattgcacctgaaattgcactggaactgctgatggctgcgaacttcttagattgttaaataaaataaattataataaactgttaactcttttcagtattt

SEQ ID NO: 5735 - protein, 112 aa, Homo sapiens; identical to SEQ ID NO: 542

SEQ ID NO: 5736 - DNA, 448 bp, Homo sapiens
ggggggcggccctgggataggggctgtggcagtacgcggggacccggctgcggtggctgcgggactgacgaatggagaggagaaaacctatggtggctgtgaaggacctgatgccatgtatgtcaaattgatatcatctgatggccatgaatttattgtaaaaagagaacatgcattaacatcaggcacgataaaagccatgttgagtggcccaggtcagtttgctgagaacgaaaccaatgaggtcaattttagagagataccttcacatgtgctatcgaaagtatgcatgtattttacgtacaaggttcgctacactaacagctccaccgagattcctgaattcccaattgcacctgaaattgcactggaactgctgatggctgcgaacttcttagattgttaaataaaataaattataataaactgttaactcttttcagtattt

SEQ ID NO: 5737 - protein, 96 aa, Homo sapiens; identical to SEQ ID NO: 5653

SEQ ID NO: 5738 - DNA, 746 bp, Homo sapiens
ctcaccaggtacggatctcccgcgcgtcgccgaaagcggctctgacccagcggaagtaattctttcgactgccccggaacccaccggagcaggcagctgggggtgggggggcggccctgggataggggctgtggcagtacgcggggacccggctgcggtggctgcgggactgacgaagtcttgctgtgtggcccaggctggagtgcccggctggtctcaaattcctgacctcaagtgatctccctcccaaagtgttgcgattgcaggtgtgagccactgcacctggctgctgagaaatctttgcctacagtgagggaaactactaaagttcctggggaagcaaagtagaatttcataagaacaaaatggatggagaggagaaaacctatggtggctgtgaaggacctgatgccatgtatgtcaaattgatatcatctgatggccatgaatttattgtaaaaagagaacatgcattaacatcaggcacgataaaagccatgttgagtggcccaggtcagtttgctgagaacgaaaccaatgaggtcaattttagagagataccttcacatgtgctatcgaaagtatgcatgtattttacgtacaaggttcgctacactaacagctccaccgagattcctgaattcccaattgcacctgaaattgcactggaactgctgatggctgcgaacttcttagattgttaaataaaataaattataataaactgttaactcttttcagtattt

SEQ ID NO: 5739 - protein, 112 aa, Homo sapiens; identical to SEQ ID NO: 542

SEQ ID NO: 5740 - DNA, 625 bp, Homo sapiens
cacactctgcgtcctcgcctcaccaggtacggatctcccgcgcgtcgccgaaagcggctctgacccagcggaagtaattctttcgactgccccggaacccaccggagcaggcagctgggggtgggggggcggccctgggataggggctgtggcagtacgcggggacccggctgcggtggctgcgggactgacgagaaactactaaagttcctggggaagcaaagtagaatttcataagaacaaaatggatggagaggagaaaacctatggtggctgtgaaggacctgatgccatgtatgtcaaattgatatcatctgatggccatgaatttattgtaaaaagagaacatgcattaacatcaggcacgataaaagccatgttgagtggcccaggtcagtttgctgagaacgaaaccaatgaggtcaattttagagagataccttcacatgtgctatcgaaagtatgcatgtattttacgtacaaggttcgctacactaacagctccaccgagattcctgaattcccaattgcacctgaaattgcactggaactgctgatggctgcgaacttcttagattgttaaataaaataaattataataaactgttaactcttttcagtattt

SEQ ID NO: 5741 - protein, 112 aa, Homo sapiens; identical to SEQ ID NO: 542

SEQ ID NO: 5742 - DNA, 473 bp, Homo sapiens
agacggaagtgagcgacacactctgcgtcctcgcctcaccaggaaactactaaagttcctggggaagcaaagtagaatttcataagaacaaaatggatggagaggagaaaacctatggtggctgtgaaggacctgatgccatgtatgtcaaattgatatcatctgatggccatgaatttattgtaaaaagagaacatgcattaacatcaggcacgataaaagccatgttgagtggcccaggtcagtttgctgagaacgaaaccaatgaggtcaattttagagagataccttcacatgtgctatcgaaagtatgcatgtattttacgtacaaggttcgctacactaacagctccaccgagattcctgaattcccaattgcacctgaaattgcactggaactgctgatggctgcgaacttcttagattgttaaataaaataaattataataaactgttaactcttttcagtattt

SEQ ID NO: 5743 - protein, 112 aa, Homo sapiens; identical to SEQ ID NO: 542

SEQ ID NO: 5744 - DNA, 419 bp, Homo sapiens
agacggaagtgagcgacacactctgcgtcctcgcctcaccagatggagaggagaaaacctatggtggctgtgaaggacctgatgccatgtatgtcaaattgatatcatctgatggccatgaatttattgtaaaaagagaacatgcattaacatcaggcacgataaaagccatgttgagtggcccaggtcagtttgctgagaacgaaaccaatgaggtcaattttagagagataccttcacatgtgctatcgaaagtatgcatgtattttacgtacaaggttcgctacactaacagctccaccgagattcctgaattcccaattgcacctgaaattgcactggaactgctgatggctgcgaacttcttagattgttaaataaaataaattataataaactgttaactcttttcagtattt

SEQ ID NO: 5745 - protein, 96 aa, Homo sapiens; identical to SEQ ID NO: 5653

SEQ ID NO: 5746 - DNA, 612 bp, Homo sapiens
agacggaagtgagcgacacactctgcgtcctcgcctcaccagagtcttgctgtgtggcccaggctggagtgcccggctggtctcaaattcctgacctcaagtgatctccctcccaaagtgttgcgattgcaggtgtgagccactgcacctggctgctgagaaatctttgcctacagtgagggaaactactaaagttcctggggaagcaaagtagaatttcataagaacaaaatggatggagaggagaaaacctatggtggctgtgaaggacctgatgccatgtatgtcaaattgatatcatctgatggccatgaatttattgtaaaaagagaacatgcattaacatcaggcacgataaaagccatgttgagtggcccaggtcagtttgctgagaacgaaaccaatgaggtcaattttagagagataccttcacatgtgctatcgaaagtatgcatgtattttacgtacaaggttcgctacactaacagctccaccgagattcctgaattcccaattgcacctgaaattgcactggaactgctgatggctgcgaacttcttagattgttaaataaaataaattataataaactgttaactcttttcagtattt

SEQ ID NO: 5747 - protein, 112 aa, Homo sapiens; identical to SEQ ID NO: 542

SEQ ID NO: 5748 - DNA, 531 bp, Homo sapiens
actactaaagttcctggggaagcaaagtagaatttcataagaacaaaatggatggagaggagaaaacctatggtggctgtgaaggacctgatgccatgtatgtcaaattgatatcatctgatggccatgaatttattgtaaaaagagaacatgcattaacatcaggcacgataaaagccatgttgagtggcccagagagacagagtctcattctgttgcccaggctggagtgcaatggtgcggtctcagctcactgcaatctccgcctgctgggttcaggcaattctcctgcctcagagtagctggaattacaggtcagtttgctgagaacgaaaccaatgaggtcaattttagagagataccttcacatgtgctatcgaaagtatgcatgtattttacgtacaaggttcgctacactaacagctccaccgagattcctgaattcccaattgcacctgaaattgcactggaactgctgatggctgcgaacttcttagattgttaaataaaataaattataataaactgtta

SEQ ID NO: 5749 - protein, 84 aa, Homo sapiens
MDGEEKTYGGCEGPDAMYVKLISSDGHEFIVKREHALTSGTIKAMLSGPERQSLILLPRLECNGAVSAHCNLRLLGSGNSPASE

SEQ ID NO: 5750 - DNA, 758 bp, Homo sapiens
ctgcgctcgacccggacgccggagaaggcgcgcggctcccgaaggccccgtactccagccggctaccggccccgaaggcccgctgctggaggacgcccgggagacagaggcccggggacctcggagcgcggcggccgcacacaatgcagtcctccttccgcagagaggcagttcgaccgcccacgggcttctttataacagtgtggaggggcagagggctgtacgagaatgacaatgcccagaagccagggttaaatatttttttttctcgtggacgacatcactaaaaactgtttcctttgcggaaaatgattctagccataggaaacgcgggggggtgggaagcggggcgtggaatgagaaagaagttcccaaaaactgagtaacggtttggcaggcgcctggattttctgtgcgtgagctccggatccaggacagctgagctaacccagaggcaaaggcaggaccctcgcgggtggagtgggggacgtggttagttttcagttaacattgaattctaccgggaagagaggaaatgaggccagccgattgcgctagtcgttgctgtgctggctcttcagcacgcacagcaacttttcaccagggacagatgctgcttcataaagagtacgatctcgttagcaaagaaaccgccctcccacgtttcaatctttcctcagcagtctcccacctccaggcgtaaccctaaatgagaggtacggacagtctctgtaaccaccaaaatcttaacacgcagt

SEQ ID NO: 5751 - protein, 47 aa, Homo sapiens
MQSSFRREAVRPPTGFFITVWRGRGLYENDNAQKPGLNIFFSRGRHH

SEQ ID NO: 5752 - DNA, 2067 bp, Homo sapiens
tatttttcacctgtttaataacagtggttttcctacacccatagggtgccaccaagggaggagtgcacagttgcagaaacaaattaagatactgaagacaacactacttaccatttcccgtatagctaaccaccagttcaactgtacatgtatgttcttatgggcaatcatgccaggggttaggcaaaaacctgtgttctgaaccaaagaagacttaaaactgctcccataatttgtgaatttcttgaaattttgcggttttttgaaaattttttaacaactggtaatcaatttatgaaaacagttgacttaagcatttgcaatggtgacttccatctcaactcctggctcaatactgatggaagtaatctgcttaactatctgaggactgcgcaagtcaatgagtcgcttgtggattctcatctggaaacgatcccatgccttagaaccttcaccgtaagtttttcttgtagtgattctcaaagtcttggtaggcattcaaactggtcctttcactgattcttttcctttgctcctcagatcaagtcagcacacaccttatccagggattttacgttgcaactcgttagagtgatatgaattcggtgaattgccacctctgactccacgggtgtttttctggtatgtttaaaagccatggctgctgcaaggcttcctagccagcttcctgacagacttggtcctcaggcaacagcaaagagcagtgagtcaggagcaggagcaggtggaccacagctccgcaccacctatgactgtgtcttcctcaaagagaaaatgtcttttaatgtcggaaaatatttatacacttagaaaaatccatacacaaagaataaagcaactctcccatttgctactgacatcagatccccagtttagagtcaaccacagtaacacagaactcttatactagcatgaacatatttattcacatacctttctaaaacacgaatggtagatactacattttggttttcaaacatagcttgttttattataaacaaacatcattctctggaaattaaaagctttgataatttcaaattatttttaacaatcagtcactaacggaatgcaaaaggcaattttattattatacattaaaacgtaaatcacatttgagcacgaacactaacaaataggctcatttgtcatctttatgccgtttctcttcactggtttcttccatatacaaaataaattcttctttgtcataacccattagatggatatagtcttcacggtttggaaagagcactggattaactaacagtgattttgttttagcataaaatgtggtaaatacatgtttagcatctggaatcttcacatcattctggtgaaacactgtactcgtttctgcaagcatagcattgtaggtaatggctttataagtgtctgttgtggcctcatggtacaatcgaatgacatagccttttgtaataaagtgaagcagcactggggtgatcaccgtaaagcttcccatgatgccatagaatatgatttgaataggcagaggcacactttcagaaatagcattattttgtgtaaaaatgtatggcagaaatgtaaggccaatcagactcgtagaataagagaaacatttcacaccaaacactgctcgggccatattgccagtataaattagccttccatcttctgatttgtcagatggcgtatttaagaatcgaacatatccttcccaataaacagggatctgcgctcgacccggacgccggagaaggcgcgcggctcccgaaggccccgtactccagccggctaccggccccgaaggcccgctgctggaggacgcccgggagacagaggcccggggacctcggagcgcggcggccgcacacaatgcagtcctccttccgcagagaggcagttcgaccgcccacgggctgcccaacgccagaaacagcatcacgcgggtgacgagcggctgcggacgccccagctgcacgagtccacgactgcgagacacggcttcccacccgactgccgcacaagtggcgcatgcccagcccgggacgcctgactggcagc

SEQ ID NO: 5753 - protein, 113 aa, Homo sapiens
MFSIWNLHIILVKHCTRFCKHSIVGNGFISVCCGLMVQSNDIAFCNKVKQHWGDHRKASHDAIEYDLNRQRHTFRNSIILCKNVWQKCKANQTRRIRETFHTKHCSGHIASIN

SEQ ID NO: 5754 - DNA, 1053 bp, Homo sapiens
cttatactagcatgaacatatttattcacatacctttctaaaacacgaatggtagatactacattttggttttcaaacatagcttgttttattataaacaaacatcattctctggaaattaaaagctttgataatttcaaattatttttaacaatcagtcactaacggaatgcaaaaggcaattttattattatacattaaaacgtaaatcacatttgagcacgaacactaacaaataggctcatttgtcatctttatgccgtttctcttcactggtttcttccatatacaaaataaattcttctttgtcataacccattagatggatatagtcttcacggtttggaaagagcactggattaactaacagtgattttgttttagcataaaatgtggtaaatacatgtttagcatctggaatcttcacatcattctggtgaaacactgtactcgtttctgcaagcatagcattgtaggtaatggctttataagtgtctgttgtggcctcatggtacaatcgaatgacatagccttttgtaataaagtgaagcagcactggggtgatcaccgtaaagcttcccatgatgccatagaatatgatttgaataggcagaggcacactttcagaaatagcattattttgtgtaaaaatgtatggcagaaatgtaaggccaatcagactcgtagaataagagaaacatttcacaccaaacactgctcgggccatattgccagtataaattagccttccatcttctgatttgtcagatggcgtatttaagaatcgaacatatccttcccaataaacagggatccggctaccggccccgaaggcccgctgctggaggacgcccgggagacagaggcccggggacctcggagcgcggcggccgcacacaatgcagtcctccttccgcagagaggcagttcgaccgcccacgggctgcccaacgccagaaacagcatcacgcgggtgacgagcggctgcggacgccccagctgcacgagtccacgactgcgagacacggcttcccacccgactgccgcacaagt

SEQ ID NO: 5755 - protein, 113 aa, Homo sapiens; identical to SEQ ID NO: 5753

SEQ ID NO: 5756 - DNA, 1204 bp, Homo sapiens
cttatactagcatgaacatatttattcacatacctttctaaaacacgaatggtagatactacattttggttttcaaacatagcttgttttattataaacaaacatcattctctggaaattaaaagctttgataatttcaaattatttttaacaatcagtcactaacggaatgcaaaaggcaattttattattatacattaaaacgtaaatcacatttgagcacgaacactaacaaataggctcatttgtcatctttatgccgtttctcttcactggtttcttccatatacaaaataaattcttctttgtcataacccattagatggatatagtcttcacggtttggaaagagcactggattaactaacagtgattttgttttagcataaaatgtggtaaatacatgtttagcatctggaatcttcacatcattctggtgaaacactgtactcgtttctgcaagcatagcattgtaggtaatggctttataagtgtctgttgtggcctcatggtacaatcgaatgacatagccttttgtaataaagtgaagcagcactggggtgatcaccgtaaagcttcccatgatgccatagaatatgatttgaataggcagaggcacactttcagaaatagcattattttgtgtaaaaatgtatggcagaaatgtaaggccaatcagactcgtagaataagagaaacatttcacacctgtaatcccagcaggaggctgagccaggagaatcgcttgaacatgggaggcgaagagtatggtgaaccaagatcatgccactgcactccagccaaacactgctcgggccatattgccagtataaattagccttccatcttctgatttgtcagatggcgtatttaagaatcgaacatatccttcccaataaacagggatctgcgctcgacccggacgccggagaaggcgcgcggctcccgaaggccccgtactccagccggctaccggccccgaaggcccgctgctggaggacgcccgggagacagaggcccggggacctcggagcgcggcggccgcacacaatgcagtcctccttccgcagagaggcagttcgaccgcccacgggctgcccaacgccagaaacagcatcacgcgggtgacgagcggctgcggacgccccagctgcacgagtccacgactgcgagacacggcttcccacccgactgccgcacaagt

SEQ ID NO: 5757 - protein, 144 aa, Homo sapiens
MFSIWNLHIILVKHCTRFCKHSIVGNGFISVCCGLMVQSNDIAFCNKVKQHWGDHRKASHDAIEYDLNRQRHTFRNSIILCKNVWQKCKANQTRRIRETFHTCNPSRRLSQENRLNMGGEEYGEPRSCHCTPAKHCSGHIASIN

SEQ ID NO: 5758 - DNA, 539 bp, Homo sapiens
acatcttatcaacacacctcaagaaaaaaaaatgaaaatctaattttccttacgtcttgtaattaagggatgccataacaacaagtaagatatggtaaggatatttttacaattaaaagagaaaaaaacaaagtaagtacacccacctccaattacttaccaaacactgctcgggccatattgccagtataaattagccttccatcttctgatttgtcagatggcgtatttaagaatcgaacatatccttcccaataaacagggatctgcgctcgacccggacgccggagaaggcgcgcggctcccgaaggccccgtactccagccggctaccggccccgaaggcccgctgctggaggacgcccgggagacagaggcccggggacctcggagcgcggcggccgcacacaatgcagtcctccttccgcagagaggcagttcgaccgcccacgggctgcccaacgccagaaacagcatcacgcgggtgacgagcggctgcggacgccccagctgcacgagtccacgactgcgagacacggc

SEQ ID NO: 5759 - protein, 88 aa, Homo sapiens
MAYLRIEHILPNKQGSALDPDAGEGARLPKAPYSSRLPAPKARCWRTPGRQRPGDLGARRPHTMQSSFRREAVRPPTGCPTPETASRG

SEQ ID NO: 5760 - DNA, 543 bp, Homo sapiens
tataacattttatttttttcttctcagcaaggcagtttacttctatagaagggggcgccctcacagatggagcaatgccgtgaagaggatgccctgcagactcactgcccaccggctccctcccccgcatccctgcaaccccagaggcgaagatggcctcaggagtgcaagtagctgatgaagtatgtcgcattttttatgacatgaaagttcgtaaatgctccacaccagaagaaatcaagaaaagaaagaaggctgtcattttttgtctcggtgcagacgaaaagtgcatcattgtagaagaaggcaaagagatcttggttggagatgttggtgtaaccataactggtcctttcaagcattttgtgggaatgcttcctgaaaaagattgtcgctgtgctttgtatgatgcaagctttgaaacaaaagaatccagtacagaagagttgattttttttttgtaggcatgagaactagcacctctgaaaagtaaaatgatctgtgcaacatccaaggatgcaatgaaaaagaaatttcaaggca

SEQ ID NO: 5761 - protein, 35 aa, Homo sapiens [sequence omitted]

SEQ ID NO: 5762 - DNA, 622 bp, Homo sapiens
agaaatcatgtgactgatgactaagttaaatcttttctgcttactgaaaaggaagagtctgatgattagttactgatcctctttgcatttgtaaagctttggagatattgaatcatgttaccatttctgtttttttccaccctgttttcttccatatttactgaagctcagaagcagtattgggtctgcaactcatccgatgcaagtatttcatacacctactgtgataaaatgcaatacccaatttcaattaatgttaacccctgtatagaattgaaaagatccaaaggattattgcacattttctacattccaaggagagatttaaagcaattatatttcaatctctatataactgtcaacaccatgaatcttccaaagcgcaaagaagttatttgccgaggatctgatgacgattactctttttgcagagctctgaagggagagactgtgaatacaacaatatcattctccttcaagggaataaaattttctaagggaaaatacaaatgtgttgttgaagctatttctgggagcccagaagaaatgctcttttgcttggagtttgtcatcctacaccaacctaattcaaattagaataaattgagtatttaaaaaaaaa

SEQ ID NO: 5763 - protein, 160 aa, Homo sapiens [sequence omitted]

SEQ ID NO: 5764 - DNA, 614 bp, Homo sapiens
tatttctgtaaattgttgtgttagtggaggcaagaagagttcagggcttctgattctgccacattgctgatgtcattcttctggggagatattttcaatcatcatcaatttttcttattttataattttaatgcaagattcatcttaaaaggctgatattcagaatactatacttaatggagatgatttgtagtaatttattgacattatctttattgcttttagataaaatgcaatacccaatttcaattaatgttaacccctgtatagaattgaaaagatccaaaggattattgcacattttctacattccaaggagagatttaaagcaattatatttcaatctctatataactgtcaacaccatgaatcttccaaagcgcaaagaagttatttgccgaggatctgatgacgattactctttttgcagagctctgaagggagagactgtgaatacaacaatatcattctccttcaagggaataaaattttctaagggaaaatacaaatgtgttgttgaagctatttctgggagcccagaagaaatgctcttttgcttggagtttgtcatcctacaccaacctaattcaaattagaataaattgagtatttaa

SEQ ID NO: 5765 - protein, 139 aa, Homo sapiens
MEMICSNLLTLSLLLLDKMQYPISINVNPCIELKRSKGLLHIFYIPRRDLKQLYFNLYITVNTMNLPKRKEVICRGSDDDYSFCRALKGETVNTTISFSFKGIKFSKGKYKCVVEAISGSPEEMLFCLEFVILHQPNSN

SEQ ID NO: 5766 - DNA, 512 bp, Homo sapiens
aaagaagtttctgctgtttataagataccctcatttatggtgttttgttattcagatcgaacagactaggaaatagtatggaaataccagaaaggaaccagggtccggttgcggctattagatcttgaacttacgtctaggttcctgggagcaacaacagatacaactgtactagaggctaatgcagttctcttgggaatccaggagagtaaagactcaagatcgaaagaagaacatcatgaaaaataaatgaactttgcttagtggattgactcctttgctgaagtcagttattcatcaagaatgcaattagactaattgtgaataaatgattgaatgaagatataataaataaaagctataattatagataactcttattagaattttctttagcaatattcccaccccccaccccttgttttgctcttaatgtttttttcctttggtggggatagtatacactgtactaagaaattgtcattcaataaatacgttttgagtgctgtcta

SEQ ID NO: 5767 - protein, 59 aa, Homo sapiens
EIVWKYQKGTRVRLRLLDLELTSRFLGATTDTTVLEANAVLLGIQESKDSRSKEEHHEK

SEQ ID NO: 5768 - DNA, 720 bp, Homo sapiens
cctggacttccagcctctagaactatgagaaagaagtttctgctgtttataagataccctcatttatggtgttttgttattcagatcgaacagactaggaaatagtatggagtcccatttcgtggtatgctgtttggaggagattttcacaagtgatgataacctgtttttcttccaactctgactttggaaaacatcgtaaaagataaagaagttgtaatacaacatggatgaaccctgaaaacattatgccaaatgaaagaagccattcacaaaagatcatatattgaaataccagaaaggaaccagggtccggttgcggctattagatcttgaacttacgtctaggttcctgggagcaacaacagatacaactgtactagaggctaatgcagttctcttgggaatccaggagagtaaagactcaagatcgaaagaagaacatcatgaaaaataaatgaactttgcttagtggattgactcctttgctgaagtcagttattcatcaagaatgcaattagactaattgtgaataaatgattgaatgaagatataataaataaaagctataattatagataactcttattagaattttctttagcaatattcccaccccccaccccttgttttgctcttaatgtttttttcctttggtggggatagtatacactgtactaagaaattgtcattcaataaatacgttttgagtgctgtcta

SEQ ID NO: 5769 - protein, 65 aa, Homo sapiens
KKPFTKDHILKYQKGTRVRLRLLDLELTSRFLGATTDTTVLEANAVLLGIQESKDSRSKEEHHEK

SEQ ID NO: 5770 - DNA, 808 bp, Homo sapiens
gagttgcggtgcgttgtggctcagccctcggcccctagaatctgtgcttggtgtttttcttcctttcgttgtccttttgtgtggcatttgcgtactgggccgggtctgtccacactgcgcttgttttcctgggattgaatgctggtgggaagagatggggttttgccatgttgcccaggctggtcttgaactcctgggttcaagtgatcctcctgcgttggcctcccaaagtgctgggattacagatgacagatatgggacctgcaaaggataaactggtcattggacggatctttcatattgtggagaatgatctgtacatagattttggtggaaagtttcattgtgtatgtagaagaccagaagtggatggagagaaataccagaaaggaaccagggtccggttgcggctattagatcttgaacttacgtctaggttcctgggagcaacaacagatacaactgtactagaggctaatgcagttctcttgggaatccaggagagtaaagactcaagatcgaaagaagaacatcatgaaaaataaatgaactttgcttagtggattgactcctttgctgaagtcagttattcatcaagaatgcaattagactaattgtgaataaatgattgaatgaagatataataaataaaagctataattatagataactcttattagaattttctttagcaatattcccaccccccaccccttgttttgctcttaatgtttttttcctttggtggggatagtatacactgtactaagaaattgtcattcaataaatacgttttgagtgctgtcta

SEQ ID NO: 5771 - protein, 125 aa, Homo sapiens
MLPRLVLNSWVQVILLRWPPKVLGLQMTDMGPAKDKLVIGRIFHIVENDLYIDFGGKFHCVCRRPEVDGEKYQKGTRVRLRLLDLELTSRFLGATTDTTVLEANAVLLGIQESKDSRSKEEHHEK

SEQ ID NO: 5772 - DNA, 675 bp, Homo sapiens
ggggcggagcctggcttaggaaggggagctgaggtccggggcccagttttccggagttgcgggttctccaaaaaatgtggaatcctttgcatctatgctgagacattctcctcttacacagatgggacctgcaaaggataaactggtcattggacggatctttcatattgtggagaatgatctgtacatagattttggtggaaagtttcattgtgtatgtagaagaccagaagtggatggagagaaataccagaaaggaaccagggtccggttgcggctattagatcttgaacttacgtctaggttcctgggagcaacaacagatacaactgtactagaggctaatgcagttctcttgggaatccaggagagtaaagactcaagatcgaaagaagaacatcatgaaaaataaatgaactttgcttagtggattgactcctttgctgaagtcagttattcatcaagaatgcaattagactaattgtgaataaatgattgaatgaagatataataaataaaagctataattatagataactcttattagaattttctttagcaatattcccaccccccaccccttgttttgctcttaatgtttttttcctttggtggggatagtatacactgtactaagaaattgtcattcaataaatacgttttgagtgctgtcta

SEQ ID NO: 5773 - protein, 105 aa, Homo sapiens
MLRHSPLTQMGPAKDKLVIGRIFHIVENDLYIDFGGKFHCVCRRPEVDGEKYQKGTRVRLRLLDLELTSRFLGATTDTTVLEANAVLLGIQESKDSRSKEEHHEK

SEQ ID NO: 5774 - DNA, 726 bp, Homo sapiens
tcgggaataggggcggagcctggcttaggaaggggagctgaggtccggggcccagttttccggagttgcgagatggggttttgccatgttgcccaggctggtcttgaactcctgggttcaagtgatcctcctgcgttggcctcccaaagtgctgggattacagatgacagatatgggacctgcaaaggataaactggtcattggacggatctttcatattgtggagaatgatctgtacatagattttggtggaaagtttcattgtgtatgtagaagaccagaagtggatggagagaaataccagaaaggaaccagggtccggttgcggctattagatcttgaacttacgtctaggttcctgggagcaacaacagatacaactgtactagaggctaatgcagttctcttgggaatccaggagagtaaagactcaagatcgaaagaagaacatcatgaaaaataaatgaactttgcttagtggattgactcctttgctgaagtcagttattcatcaagaatgcaattagactaattgtgaataaatgattgaatgaagatataataaataaaagctataattatagataactcttattagaattttctttagcaatattcccaccccccaccccttgttttgctcttaatgtttttttcctttggtggggatagtatacactgtactaagaaattgtcattcaataaatacgttttgagtgctgtcta

SEQ ID NO: 5775 - protein, 125 aa, Homo sapiens; identical to SEQ ID NO: 5771

SEQ ID NO: 5776 - DNA, 764 bp, Homo sapiens
agaggtaaagaagtcatggcggcgctgtgtcggacccgtgctgtggctgccgagagccattttctgcgagtgtttctcttcttcaggccctttcggggtgtaggcactgagagtggatccgaaagtggtagttccaatgccaaggagcctaagacgcgcgcaggcggtttcgcgagcgcgttggagcggcactcggagcttctacagaagatgggacctgcaaaggataaactggtcattggacggatctttcatattgtggagaatgatctgtacatagattttggtggaaagtttcattgtgtatgtagaagaccagaagtggatggagagaaataccagaaaggaaccagggtccggttgcggctattagatcttgaacttacgtctaggttcctgggagcaacaacagatacaactgtactagaggctaatgcagttctcttgggaatccaggagagtaaagactcaagatcgaaagaagaacatcatgaaaaataaatgaactttgcttagtggattgactcctttgctgaagtcagttattcatcaagaatgcaattagactaattgtgaataaatgattgaatgaagatataataaataaaagctataattatagataactcttattagaattttctttagcaatattcccaccccccaccccttgttttgctcttaatgtttttttcctttggtggggatagtatacactgtactaagaaattgtcattcaataaatacgttttgagtgctgtcta

SEQ ID NO: 5777 - protein, 161 aa, Homo sapiens
MAALCRTRAVAAESHFLRVFLFFRPFRGVGTESGSESGSSNAKEPKTRAGGFASALERHSELLQKMGPAKDKLVIGRIFHIVENDLYIDFGGKFHCVCRRPEVDGEKYQKGTRVRLRLLDLELTSRFLGATTDTTVLEANAVLLGIQESKDSRSKEEHHEK

SEQ ID NO: 5778 - DNA, 661 bp, Homo sapiens
cagaggtaaagaagtcatggcggcgctgtgtcggacccgtgctgtggctgccgagagccattttctgcgagtgtttctcttcttcaggccctttcggggtgtaggcactgagagtggatccgaaagtggtagttccaatgccaaggagcctaagacgcgcgcaggcggtttcgcgagcgcgttggagcggcactcggagcttctacagaaggtggagcccctacagaaggaaataccagaaaggaaccagggtccggttgcggctattagatcttgaacttacgtctaggttcctgggagcaacaacagatacaactgtactagaggctaatgcagttctcttgggaatccaggagagtaaagactcaagatcgaaagaagaacatcatgaaaaataaatgaactttgcttagtggattgactcctttgctgaagtcagttattcatcaagaatgcaattagactaattgtgaataaatgattgaatgaagatataataaataaaagctataattatagataactcttattagaattttctttagcaatattcccaccccccaccccttgttttgctcttaatgtttttttcctttggtggggatagtatacactgtactaagaaattgtcattcaataaatacgttttgagtgctgtcta

SEQ ID NO: 5779 - protein, 86 aa, Homo sapiens
MAALCRTRAVAAESHFLRVFLFFRPFRGVGTESGSESGSSNAKEPKTRAGGFASALERHSELLQKVEPLQKEIPERNQGPVAAIRS

SEQ ID NO: 5780 - DNA, 861 bp, Homo sapiens
ggaggggaggtcaaaggtcagaggtaaagaagtcatggcggcgctgtgtcggacccgtgctgtggctgccgagagccattttctgcgagtgtttctcttcttcaggccctttcggggtgtaggcactgagagtggatccgaaagtggtagttccaatgccaaggagcctaagacgcgcgcaggcggtttcgcgagcgcgttggagcggcactcggagcttctacagaaggtggagcccctacagaagggttctccaaaaaatgtggaatcctttgcatctatgctgagacattctcctcttacacagatgggacctgcaaaggataaactggtcattggacggatctttcatattgtggagaatgatctgtacatagattttggtggaaagtttcattgtgtatgtagaagaccagaagtggatggagagaaataccagaaaggaaccagggtccggttgcggctattagatcttgaacttacgtctaggttcctgggagcaacaacagatacaactgtactagaggctaatgcagttctcttgggaatccaggagagtaaagactcaagatcgaaagaagaacatcatgaaaaataaatgaactttgcttagtggattgactcctttgctgaagtcagttattcatcaagaatgcaattagactaattgtgaataaatgattgaatgaagatataataaataaaagctataattatagataactcttattagaattttctttagcaatattcccaccccccaccccttgttttgctcttaatgtttttttcctttggtggggatagtatacactgtactaagaaattgtcattcaataaatacgttttgagtgctgtcta

SEQ ID NO: 5781 - protein, 187 aa, Homo sapiens; identical to SEQ ID NO: 548

SEQ ID NO: 5782 - DNA, 372 bp, Homo sapiens
aaagaagtttctgctgtttataagataccctcatttatggtgttttgttattcagatcgaacagactaggaaatagtatggaaataccagaaaggaaccagggtccggttgcggctattagatcttgaacttacgtctaggttcctgggagcaacaacagatacaactgtactagaggctaatgcagttctcttgggaatccaggagagtaaagactcaagatcgaaagaagaacatcatgaaaaataaatgaactttgcttagtggattgactcctttgctgaagtcagttattcatcaagaatgcaattagactaattgtgaataaatgattgaatgaagatataataaataaaagctataattatagat

SEQ ID NO: 5783 - protein, 59 aa, Homo sapiens; identical to SEQ ID NO: 5767

SEQ ID NO: 5784 - DNA, 580 bp, Homo sapiens
cctggacttccagcctctagaactatgagaaagaagtttctgctgtttataagataccctcatttatggtgttttgttattcagatcgaacagactaggaaatagtatggagtcccatttcgtggtatgctgtttggaggagattttcacaagtgatgataacctgtttttcttccaactctgactttggaaaacatcgtaaaagataaagaagttgtaatacaacatggatgaaccctgaaaacattatgccaaatgaaagaagccattcacaaaagatcatatattgaaataccagaaaggaaccagggtccggttgcggctattagatcttgaacttacgtctaggttcctgggagcaacaacagatacaactgtactagaggctaatgcagttctcttgggaatccaggagagtaaagactcaagatcgaaagaagaacatcatgaaaaataaatgaactttgcttagtggattgactcctttgctgaagtcagttattcatcaagaatgcaattagactaattgtgaataaatgattgaatgaagatataataaataaaagctataattatagat

SEQ ID NO: 5785 - protein, 65 aa, Homo sapiens; identical to SEQ ID NO: 5769

SEQ ID NO: 5786 - DNA, 553 bp, Homo sapiens
cttttgtgtggcatttgcgtactgggccgggtctgtccacactgcgcttgttttcctgggattgaatgctggtgggaagggttctccaaaaaatgtggaatcctttgcatctatgctgagacattctcctcttacacagatgggacctgcaaaggataaactggtcattggacggatctttcatattgtggagaatgatctgtacatagattttggtggaaagtttcattgtgtatgtagaagaccagaagtggatggagagaaataccagaaaggaaccagggtccggttgcggctattagatcttgaacttacgtctaggttcctgggagcaacaacagatacaactgtactagaggctaatgcagttctcttgggaatccaggagagtaaagactcaagatcgaaagaagaacatcatgaaaaataaatgaactttgcttagtggattgactcctttgctgaagtcagttattcatcaagaatgcaattagactaattgtgaataaatgattgaatgaagatataataaataaaagctataattatagat

SEQ ID NO: 5787 - protein, 105 aa, Homo sapiens; identical to SEQ ID NO: 5773

SEQ ID NO: 5788 - DNA, 668 bp, Homo sapiens
gagttgcggtgcgttgtggctcagccctcggcccctagaatctgtgcttggtgtttttcttcctttcgttgtccttttgtgtggcatttgcgtactgggccgggtctgtccacactgcgcttgttttcctgggattgaatgctggtgggaagagatggggttttgccatgttgcccaggctggtcttgaactcctgggttcaagtgatcctcctgcgttggcctcccaaagtgctgggattacagatgacagatatgggacctgcaaaggataaactggtcattggacggatctttcatattgtggagaatgatctgtacatagattttggtggaaagtttcattgtgtatgtagaagaccagaagtggatggagagaaataccagaaaggaaccagggtccggttgcggctattagatcttgaacttacgtctaggttcctgggagcaacaacagatacaactgtactagaggctaatgcagttctcttgggaatccaggagagtaaagactcaagatcgaaagaagaacatcatgaaaaataaatgaactttgcttagtggattgactcctttgctgaagtcagttattcatcaagaatgcaattagactaattgtgaataaatgattgaatgaagatataataaataaaagctataattatagat

SEQ ID NO: 5789 - protein, 125 aa, Homo sapiens; identical to SEQ ID NO: 5771

SEQ ID NO: 5790 - DNA, 535 bp, Homo sapiens
ggggcggagcctggcttaggaaggggagctgaggtccggggcccagttttccggagttgcgggttctccaaaaaatgtggaatcctttgcatctatgctgagacattctcctcttacacagatgggacctgcaaaggataaactggtcattggacggatctttcatattgtggagaatgatctgtacatagattttggtggaaagtttcattgtgtatgtagaagaccagaagtggatggagagaaataccagaaaggaaccagggtccggttgcggctattagatcttgaacttacgtctaggttcctgggagcaacaacagatacaactgtactagaggctaatgcagttctcttgggaatccaggagagtaaagactcaagatcgaaagaagaacatcatgaaaaataaatgaactttgcttagtggattgactcctttgctgaagtcagttattcatcaagaatgcaattagactaattgtgaataaatgattgaatgaagatataataaataaaagctataattatagat

SEQ ID NO: 5791 - protein, 105 aa, Homo sapiens; identical to SEQ ID NO: 5773

SEQ ID NO: 5792 - DNA, 586 bp, Homo sapiens
tcgggaataggggcggagcctggcttaggaaggggagctgaggtccggggcccagttttccggagttgcgagatggggttttgccatgttgcccaggctggtcttgaactcctgggttcaagtgatcctcctgcgttggcctcccaaagtgctgggattacagatgacagatatgggacctgcaaaggataaactggtcattggacggatctttcatattgtggagaatgatctgtacatagattttggtggaaagtttcattgtgtatgtagaagaccagaagtggatggagagaaataccagaaaggaaccagggtccggttgcggctattagatcttgaacttacgtctaggttcctgggagcaacaacagatacaactgtactagaggctaatgcagttctcttgggaatccaggagagtaaagactcaagatcgaaagaagaacatcatgaaaaataaatgaactttgcttagtggattgactcctttgctgaagtcagttattcatcaagaatgcaattagactaattgtgaataaatgattgaatgaagatataataaataaaagctataattatagat

SEQ ID NO: 5793 - protein, 125 aa, Homo sapiens; identical to SEQ ID NO: 5771

SEQ ID NO: 5794 - DNA, 624 bp, Homo sapiens
agaggtaaagaagtcatggcggcgctgtgtcggacccgtgctgtggctgccgagagccattttctgcgagtgtttctcttcttcaggccctttcggggtgtaggcactgagagtggatccgaaagtggtagttccaatgccaaggagcctaagacgcgcgcaggcggtttcgcgagcgcgttggagcggcactcggagcttctacagaagatgggacctgcaaaggataaactggtcattggacggatctttcatattgtggagaatgatctgtacatagattttggtggaaagtttcattgtgtatgtagaagaccagaagtggatggagagaaataccagaaaggaaccagggtccggttgcggctattagatcttgaacttacgtctaggttcctgggagcaacaacagatacaactgtactagaggctaatgcagttctcttgggaatccaggagagtaaagactcaagatcgaaagaagaacatcatgaaaaataaatgaactttgcttagtggattgactcctttgctgaagtcagttattcatcaagaatgcaattagactaattgtgaataaatgattgaatgaagatataataaataaaagctataattatagat

SEQ ID NO: 5795 - protein, 161 aa, Homo sapiens; identical to SEQ ID NO: 5777

SEQ ID NO: 5796 - DNA, 521 bp, Homo sapiens
cagaggtaaagaagtcatggcggcgctgtgtcggacccgtgctgtggctgccgagagccattttctgcgagtgtttctcttcttcaggccctttcggggtgtaggcactgagagtggatccgaaagtggtagttccaatgccaaggagcctaagacgcgcgcaggcggtttcgcgagcgcgttggagcggcactcggagcttctacagaaggtggagcccctacagaaggaaataccagaaaggaaccagggtccggttgcggctattagatcttgaacttacgtctaggttcctgggagcaacaacagatacaactgtactagaggctaatgcagttctcttgggaatccaggagagtaaagactcaagatcgaaagaagaacatcatgaaaaataaatgaactttgcttagtggattgactcctttgctgaagtcagttattcatcaagaatgcaattagactaattgtgaataaatgattgaatgaagatataataaataaaagctataattatagat

SEQ ID NO: 5797 - protein, 86 aa, Homo sapiens; identical to SEQ ID NO: 5779

SEQ ID NO: 5798 - DNA, 712 bp, Homo sapiens
gtcaaaggtcagaggtaaagaagtcatggcggcgctgtgtcggacccgtgctgtggctgccgagagccattttctgcgagtgtttctcttcttcaggccctttcggggtgtaggcactgagagtggatccgaaagtggtagttccaatgccaaggagcctaagacgcgcgcaggcggtttcgcgagcgcgttggagcggcactcggagcttctacagaaggtggagcccctacagaagggttctccaaaaaatgtggaatcctttgcatctatgctgagacattctcctcttacacagatgggacctgcaaaggataaactggtcattggacggatctttcatattgtggagaatgatctgtacatagattttggtggaaagtttcattgtgtatgtagaagaccagaagtggatggagagaaataccagaaaggaaccagggtccggttgcggctattagatcttgaacttacgtctaggttcctgggagcaacaacagatacaactgtactagaggctaatgcagttctcttgggaatccaggagagtaaagactcaagatcgaaagaagaacatcatgaaaaataaatgaactttgcttagtggattgactcctttgctgaagtcagttattcatcaagaatgcaattagactaattgtgaataaatgattgaatgaagatataataaataaaagctataattatagat

SEQ ID NO: 5799 - protein, 187 aa, Homo sapiens; identical to SEQ ID NO: 548

SEQ ID NO: 5800 - DNA, 406 bp, Homo sapiens
atggtggtggtaatctttaagaagtttggcataaacagtaaccaagtctttggtcttcaatgcattctatgatgattctttcaatgatgtaggtaatacagtaagattttaaactgtaacacaaacacacacatatacacacacacacaagcacaattacaaaatgccttcggatagatgactagaaataaaaataattccacaacattctaaaagcatctttatcaatatagctaatttaatgaataaatgttatttgccatctgaagtaaaactttgagtttcagagctttactttacatcacaccagctgacctttaagatgttgttgaggacaagtcttaaccaatatcaaatgaataaatttctgctgctattcatcctggagtcagatgtgaagtcagtc

SEQ ID NO: 5801 - DNA, 622 bp, Homo sapiens
aaaaatgtggaatcctttgcatctatgctgagacattctcctcttacacagatgggacctgcaaaggataaactggtcattggacggatctttcatattgtggagaatgatctgtacatagattttggtggaaagtttcattgtgtatgtagaagaccagaagtggatggagagagtcccatttcgtggtatgctgtttggaggagattttcacaagtgatgataacctgtttttcttccaactctgactttggaaaacatcgtaaaagataaagaagttgtaatacaacatggatgaaccctgaaaacattatgccaaatgaaagaagccattcacaaaagatcatatattgtatgattccatttatatgaaatgttcagaatagacaaatccacagagacagaaagtagattagtcatccccagagtctagaataggggagggggagagattgctaatgagtacagggtttcttttttggggtgatgaaaatgttctaaaattaggttatggtaaaagctgtacagctctgagaatatattcaaagtcactgaattatacactttgggtagattttatgatatgtgaattatatctcaataaagctgttaaagttttagt

SEQ ID NO: 5802 - protein, 82 aa, Homo sapiens
MLRHSPLTQMGPAKDKLVIGRIFHIVENDLYIDFGGKFHCVCRRPEVDGESPISWYAVWRRFSQVMITCFSSNSDFGKHRKR

SEQ ID NO: 5803 - DNA, 2580 bp, Homo sapiens
aatgttatgcaagtgtagagacagacagttcactaggtactttaaaataatagaccttacaaagttttctagacagacttcctgtgaagaacaaggagcagggggaaaggggaaggggtagaatttaccaatctgaatatttcagcaagggagaatgcatgagttttactataaaaccacactgaacattgcaacaatactaaattccatacatatataataatcactgagctataaggttgctgatgtatttgttcttgaaagtgaattagagttactttatgcagaatcagctagttttatgtttcataatgtctttcccttttttgaacttttttttaagtctaaagtagggggaaccaagcctgctggtggtgattttggagaagtcttgaattcggctgcaaatgctagtgccaccaccacggagcctcttccagaaaagacacaggagagcctgtgagattcctacctttgttctgctacccactgccagatgctgcaagcgaggtccaagcacatcttgtcaacatgcattgccatgaatttctaccagatgtgcttttatttagctttacatattcttatgaaaaccaaattttaaaagccacaggtgttgattgttataaaataacatgctgccattcttgattgctagagtttttgttagtactttggatgcaattaaaactatgtgctatcacatgtgaaaagcttaataaattccatctatcagtagtataggtctcaatatttattatgagaccagtggtctggaaacagcttgttgtaccgaatcaactggagtctatgcttaaaaaaaaaaaatttttttttaaccatccttaaattattgcttaatggtatcatattaacatattctaaataagggctttaaggcacaggctgttgaagcattttctcagaggagtggatctgtagaagtctgtctttctatagaaatattgtgcttactcaagtgttaaattattttttctatgaactagtctacttcttaaaattcaaacatattcttttgatcacattgtttcttgagcatcctgccctgctactaacttttcaacaaggcaaaatggagtaaagtggcaatttctttagatgagtgaaataccctcaagtctcttttctgcccaaaaagggaaaagtgatagaaatgggggtggcaagtggggtgagtggatgaaggtgggtattgggggtggctgtgaaagaaaataatggagaatcacttttctagacatctacctatacttaatctaagaaacaaagtaatctactgtaaagtactctgccccttgaaagaagtattaaaaagagtgaggatggatttagaaaaaaacatgaatttagaaatattcaaaatggtttttgtggcagattcaatattatgaattcacagatatttaaagaatgagaaacatagtaattagtagaaatgccagaaacagttcctggttcctcttgtgtttgacactaagaaaatagcaagagtgtgaaatctcagatacttatgaaatctcacagatgtaaggactcaagtgtagaagaaaatatccccttcttacaaaaagaaatgtcaatttatggagtttgtgggaaatagggcaagaattcttatgcttatgagagccaagtagtcagtggaagagagtagagctcaaaactggattatcaccttagcaacttagaatagtttgaaatagaaaaaaagtatttaatttggatctggatctgttaagatatgcacagtctattttttgtatagtattggaaaataaaaatgctataatttgggtatgggttcttttgtatacattacctgcccattgaggaaaggggcaagtccattatgcaacttctctccaaacccttcatattctggatatgatacttaaagagccatgagcagctacattctgcctatcagaaggcatttattaaatgactgcttgctgaagatgtgtccaaagagatcctacattaaggtcatttgtcagaatgatgtttgtgtttgtttagagttggctgacctccaactcctggggtcaaggaatcctactgccttagcttcccaaatagctaggactataggcatgcacccggccatgtgttttatttatagctcttaaagcccagatgaagaaatcacatttttgcccatagtgaagaaacatttggccattgattagtccttattttcagtgactgtcctgttttcattagattagagagaccctgtgtgggccacagttaatataaaccattatcacttttaagtaaacctgcacatcttagatttcataatttccttattgttctgactcaaaatgaactaagagcttttcactttttgtttgtaagttctcagagagtcgggtctgcaagtgcttttgcctgccaggattttgtactcaaataaatgctatttggcaactaaaattcttgccagctctcatgtaattttgatgttactgaggttggttggtagtttattttattaattttgtggttcttctatcatatagaaaaagccaaatacagttttgtttgaatatttgt

SEQ ID NO: 5804 - protein, 39 aa, Homo sapiens
MHCHEFLPDVLLFSFTYSYENQILKATGVDCYKITCCHS

SEQ ID NO: 5805 - DNA, 3777 bp, Homo sapiens
attacttatgtctgagactggccctgttcatggaatcaaatgcatactcttaaaatattagatcagaaattgagaatcttacattataaatacttgtatgtacctgcacatatatggtacagattatatctgttcttttgccgattgagaataatgttgaagaggaatcaattatattttcaaactagttggattttttttcagtatttgtatttactatttgtttttcttttctctccatagaaactccccaacttttaaatcatttgaagaaaaggtcgaaaacttaaaggcaatagggggaaccaagcctgctggtggtgattttggagaagtcttgaattcggctgcaaatgctagtgccaccaccacggagcctcttccagaaaagacacaggagagcctgtgagattcctacctttgttctgctacccactgccagatgctgcaagcgaggtccaagcacatcttgtcaacatgcattgccatgaatttctaccagatgtgcttttatttagctttacatattcctttgaccaaatagtttgtgggttaaacaaaatgaaaatatcttcacctctattcttgggaaacaccctttagtgtacatttatgttcctttatttaggaaacaccattataaaaacacttatagtaaatggggacattcactataatgatctaagaagctacagattgtcatagttgttttcctgctttacaaaattgctccagatctggaatgccagtttgacctttgtcttctataatatttcctttttttcccctctttgaatctctgtatatttgattcttaactaaaattgttctcttaaatattctgaatcctggtaattaaaagtttgggtgtattttctttacctccaaggaaagaactactagctacaaaaaatattttggaataagcattgttttggtataaggtacatattttggttgaagacaccagactgaagtaaacagctgtgcatccaatttattatagttttgtaagtaacaatatgtaatcaaacttctaggtgacttgagagtggaacctcctatatcattatttagcaccgtttgtgacagtaaccatttcagtgtattgtttattataccacttatatcaacttatttttcaccaggttaaaattttaatttctacaaaataacattctgaatcaagcacactgtatgttcagtaggttgaactatgaacactgtcatcaatgttcagttcaaaagcctgaaagtttagatctagaagctggtaaaaatgacaatatcaatcacattaggggaaccattgttgtcttcacttaatccatttagcactatttaaaataagcacaccaagttatatgactaatataacttgaaaattttttatactgaggggttggtgataactcttgaggatgtaatgcattaataaaaatcaactcatcattttctacttgttttcaatgtgttggaaactgtaaaatgatactgtagaacctgtctcctactttgaaaactgaatgtcagggctgagtgaatcaaagtgtctagacatatttgcatagaggccaaggtattctattctaataactgcttactcaacactaccaccttttccttatactgtatatgattatggcctacaatgttgtatttgttatttattaaattgtgattgttttattattgtttatgccaaatgttaactgccaagcttggagtgacctaaagcattttttaaaagcatggctagatttacttcagtataaattatcttatgaaaaccaaattttaaaagccacaggtgttgattgttataaaataacatgctgccattcttgattgctagagtttttgttagtactttggatgcaattaaaactatgtgctatcacatgtgaaaagcttaataaattccatctatcagtagtataggtctcaatatttattatgagaccagtggtctggaaacagcttgttgtaccgaatcaactggagtctatgcttaaaaaaaaaaaatttttttttaaccatccttaaattattgcttaatggtatcatattaacatattctaaataagggctttaaggcacaggctgttgaagcattttctcagaggagtggatctgtagaagtctgtctttctatagaaatattgtgcttactcaagtgttaaattattttttctatgaactagtctacttcttaaaattcaaacatattcttttgatcacattgtttcttgagcatcctgccctgctactaacttttcaacaaggcaaaatggagtaaagtggcaatttctttagatgagtgaaataccctcaagtctcttttctgcccaaaaagggaaaagtgatagaaatgggggtggcaagtggggtgagtggatgaaggtgggtattgggggtggctgtgaaagaaaataatggagaatcacttttctagacatctacctatacttaatctaagaaacaaagtaatctactgtaaagtactctgccccttgaaagaagtattaaaaagagtgaggatggatttagaaaaaaacatgaatttagaaatattcaaaatggtttttgtggcagattcaatattatgaattcacagatatttaaagaatgagaaacatagtaattagtagaaatgccagaaacagttcctggttcctcttgtgtttgacactaagaaaatagcaagagtgtgaaatctcagatacttatgaaatctcacagatgtaaggactcaagtgtagaagaaaatatccccttcttacaaaaagaaatgtcaatttatggagtttgtgggaaatagggcaagaattcttatgcttatgagagccaagtagtcagtggaagagagtagagctcaaaactggattatcaccttagcaacttagaatagtttgaaatagaaaaaaagtatttaatttggatctggatctgttaagatatgcacagtctattttttgtatagtattggaaaataaaaatgctataatttgggtatgggttcttttgtatacattacctgcccattgaggaaaggggcaagtccattatgcaacttctctccaaacccttcatattctggatatgatacttaaagagccatgagcagctacattctgcctatcagaaggcatttattaaatgactgcttgctgaagatgtgtccaaagagatcctacattaaggtcatttgtcagaatgatgtttgtgtttgtttagagttggctgacctccaactcctggggtcaaggaatcctactgccttagcttcccaaatagctaggactataggcatgcacccggccatgtgttttatttatagctcttaaagcccagatgaagaaatcacatttttgcccatagtgaagaaacatttggccattgattagtccttattttcagtgactgtcctgttttcattagattagagagaccctgtgtgggccacagttaatataaaccattatcacttttaagtaaacctgcacatcttagatttcataatttccttattgttctgactcaaaatgaactaagagcttttcactttttgtttgtaagttctcagagagtcgggtctgcaagtgcttttgcctgccaggattttgtactcaaataaatgctatttggcaactaaaattcttgccagctctcatgtaattttgatgttactgaggttggttggtagtttattttattaattttgtggttcttctatcatatagaaaaagccaaatacagttttgtttgaatatttgt

SEQ ID NO: 5806 - protein, 75 aa, Homo sapiens [sequence omitted]

SEQ ID NO: 5807 - DNA, 3711 bp, Homo sapiens
actccttcaaaccagtacctggaaggctcatctaaggtcttctaggcctagcattctaacatcaaatgatcatctgatgatcatttaaggttgttgaaaaattctggttgtgaacttctttgtctttttagttcttcatgatcatgcaggattgcaagccttttcacattcctttagaaactccccaacttttaaatcatttgaagaaaaggtcgaaaacttaaaggcaatagggggaaccaagcctgctggtggtgattttggagaagtcttgaattcggctgcaaatgctagtgccaccaccacggagcctcttccagaaaagacacaggagagcctgtgagattcctacctttgttctgctacccactgccagatgctgcaagcgaggtccaagcacatcttgtcaacatgcattgccatgaatttctaccagatgtgcttttatttagctttacatattcctttgaccaaatagtttgtgggttaaacaaaatgaaaatatcttcacctctattcttgggaaacaccctttagtgtacatttatgttcctttatttaggaaacaccattataaaaacacttatagtaaatggggacattcactataatgatctaagaagctacagattgtcatagttgttttcctgctttacaaaattgctccagatctggaatgccagtttgacctttgtcttctataatatttcctttttttcccctctttgaatctctgtatatttgattcttaactaaaattgttctcttaaatattctgaatcctggtaattaaaagtttgggtgtattttctttacctccaaggaaagaactactagctacaaaaaatattttggaataagcattgttttggtataaggtacatattttggttgaagacaccagactgaagtaaacagctgtgcatccaatttattatagttttgtaagtaacaatatgtaatcaaacttctaggtgacttgagagtggaacctcctatatcattatttagcaccgtttgtgacagtaaccatttcagtgtattgtttattataccacttatatcaacttatttttcaccaggttaaaattttaatttctacaaaataacattctgaatcaagcacactgtatgttcagtaggttgaactatgaacactgtcatcaatgttcagttcaaaagcctgaaagtttagatctagaagctggtaaaaatgacaatatcaatcacattaggggaaccattgttgtcttcacttaatccatttagcactatttaaaataagcacaccaagttatatgactaatataacttgaaaattttttatactgaggggttggtgataactcttgaggatgtaatgcattaataaaaatcaactcatcattttctacttgttttcaatgtgttggaaactgtaaaatgatactgtagaacctgtctcctactttgaaaactgaatgtcagggctgagtgaatcaaagtgtctagacatatttgcatagaggccaaggtattctattctaataactgcttactcaacactaccaccttttccttatactgtatatgattatggcctacaatgttgtatttgttatttattaaattgtgattgttttattattgtttatgccaaatgttaactgccaagcttggagtgacctaaagcattttttaaaagcatggctagatttacttcagtataaattatcttatgaaaaccaaattttaaaagccacaggtgttgattgttataaaataacatgctgccattcttgattgctagagtttttgttagtactttggatgcaattaaaactatgtgctatcacatgtgaaaagcttaataaattccatctatcagtagtataggtctcaatatttattatgagaccagtggtctggaaacagcttgttgtaccgaatcaactggagtctatgcttaaaaaaaaaaaatttttttttaaccatccttaaattattgcttaatggtatcatattaacatattctaaataagggctttaaggcacaggctgttgaagcattttctcagaggagtggatctgtagaagtctgtctttctatagaaatattgtgcttactcaagtgttaaattattttttctatgaactagtctacttcttaaaattcaaacatattcttttgatcacattgtttcttgagcatcctgccctgctactaacttttcaacaaggcaaaatggagtaaagtggcaatttctttagatgagtgaaataccctcaagtctcttttctgcccaaaaagggaaaagtgatagaaatgggggtggcaagtggggtgagtggatgaaggtgggtattgggggtggctgtgaaagaaaataatggagaatcacttttctagacatctacctatacttaatctaagaaacaaagtaatctactgtaaagtactctgccccttgaaagaagtattaaaaagagtgaggatggatttagaaaaaaacatgaatttagaaatattcaaaatggtttttgtggcagattcaatattatgaattcacagatatttaaagaatgagaaacatagtaattagtagaaatgccagaaacagttcctggttcctcttgtgtttgacactaagaaaatagcaagagtgtgaaatctcagatacttatgaaatctcacagatgtaaggactcaagtgtagaagaaaatatccccttcttacaaaaagaaatgtcaatttatggagtttgtgggaaatagggcaagaattcttatgcttatgagagccaagtagtcagtggaagagagtagagctcaaaactggattatcaccttagcaacttagaatagtttgaaatagaaaaaaagtatttaatttggatctggatctgttaagatatgcacagtctattttttgtatagtattggaaaataaaaatgctataatttgggtatgggttcttttgtatacattacctgcccattgaggaaaggggcaagtccattatgcaacttctctccaaacccttcatattctggatatgatacttaaagagccatgagcagctacattctgcctatcagaaggcatttattaaatgactgcttgctgaagatgtgtccaaagagatcctacattaaggtcatttgtcagaatgatgtttgtgtttgtttagagttggctgacctccaactcctggggtcaaggaatcctactgccttagcttcccaaatagctaggactataggcatgcacccggccatgtgttttatttatagctcttaaagcccagatgaagaaatcacatttttgcccatagtgaagaaacatttggccattgattagtccttattttcagtgactgtcctgttttcattagattagagagaccctgtgtgggccacagttaatataaaccattatcacttttaagtaaacctgcacatcttagatttcataatttccttattgttctgactcaaaatgaactaagagcttttcactttttgtttgtaagttctcagagagtcgggtctgcaagtgcttttgcctgccaggattttgtactcaaataaatgctatttggcaactaaaattcttgccagctctcatgtaattttgatgttactgaggttggttggtagtttattttattaattttgtggttcttctatcatatagaaaaagccaaatacagttttgtttgaatatttgt

SEQ ID NO: 5808 - protein, 75 aa, Homo sapiens [sequence omitted]

SEQ ID NO: 5809 - DNA, 3699 bp, Homo sapiens
agagtgagggagggcactccttcaaaccagtacctggaaggctcatctaaggtcttctaggcctagcattctaacatcaaatgatcatctgatgatcatttaaggttgttgaaaaattctggttgtgaacttctttgtctttttagttcttcatgatcatgcaggaaactccccaacttttaaatcatttgaagaaaaggtcgaaaacttaaaggcaatagggggaaccaagcctgctggtggtgattttggagaagtcttgaattcggctgcaaatgctagtgccaccaccacggagcctcttccagaaaagacacaggagagcctgtgagattcctacctttgttctgctacccactgccagatgctgcaagcgaggtccaagcacatcttgtcaacatgcattgccatgaatttctaccagatgtgcttttatttagctttacatattcctttgaccaaatagtttgtgggttaaacaaaatgaaaatatcttcacctctattcttgggaaacaccctttagtgtacatttatgttcctttatttaggaaacaccattataaaaacacttatagtaaatggggacattcactataatgatctaagaagctacagattgtcatagttgttttcctgctttacaaaattgctccagatctggaatgccagtttgacctttgtcttctataatatttcctttttttcccctctttgaatctctgtatatttgattcttaactaaaattgttctcttaaatattctgaatcctggtaattaaaagtttgggtgtattttctttacctccaaggaaagaactactagctacaaaaaatattttggaataagcattgttttggtataaggtacatattttggttgaagacaccagactgaagtaaacagctgtgcatccaatttattatagttttgtaagtaacaatatgtaatcaaacttctaggtgacttgagagtggaacctcctatatcattatttagcaccgtttgtgacagtaaccatttcagtgtattgtttattataccacttatatcaacttatttttcaccaggttaaaattttaatttctacaaaataacattctgaatcaagcacactgtatgttcagtaggttgaactatgaacactgtcatcaatgttcagttcaaaagcctgaaagtttagatctagaagctggtaaaaatgacaatatcaatcacattaggggaaccattgttgtcttcacttaatccatttagcactatttaaaataagcacaccaagttatatgactaatataacttgaaaattttttatactgaggggttggtgataactcttgaggatgtaatgcattaataaaaatcaactcatcattttctacttgttttcaatgtgttggaaactgtaaaatgatactgtagaacctgtctcctactttgaaaactgaatgtcagggctgagtgaatcaaagtgtctagacatatttgcatagaggccaaggtattctattctaataactgcttactcaacactaccaccttttccttatactgtatatgattatggcctacaatgttgtatttgttatttattaaattgtgattgttttattattgtttatgccaaatgttaactgccaagcttggagtgacctaaagcattttttaaaagcatggctagatttacttcagtataaattatcttatgaaaaccaaattttaaaagccacaggtgttgattgttataaaataacatgctgccattcttgattgctagagtttttgttagtactttggatgcaattaaaactatgtgctatcacatgtgaaaagcttaataaattccatctatcagtagtataggtctcaatatttattatgagaccagtggtctggaaacagcttgttgtaccgaatcaactggagtctatgcttaaaaaaaaaaaatttttttttaaccatccttaaattattgcttaatggtatcatattaacatattctaaataagggctttaaggcacaggctgttgaagcattttctcagaggagtggatctgtagaagtctgtctttctatagaaatattgtgcttactcaagtgttaaattattttttctatgaactagtctacttcttaaaattcaaacatattcttttgatcacattgtttcttgagcatcctgccctgctactaacttttcaacaaggcaaaatggagtaaagtggcaatttctttagatgagtgaaataccctcaagtctcttttctgcccaaaaagggaaaagtgatagaaatgggggtggcaagtggggtgagtggatgaaggtgggtattgggggtggctgtgaaagaaaataatggagaatcacttttctagacatctacctatacttaatctaagaaacaaagtaatctactgtaaagtactctgccccttgaaagaagtattaaaaagagtgaggatggatttagaaaaaaacatgaatttagaaatattcaaaatggtttttgtggcagattcaatattatgaattcacagatatttaaagaatgagaaacatagtaattagtagaaatgccagaaacagttcctggttcctcttgtgtttgacactaagaaaatagcaagagtgtgaaatctcagatacttatgaaatctcacagatgtaaggactcaagtgtagaagaaaatatccccttcttacaaaaagaaatgtcaatttatggagtttgtgggaaatagggcaagaattcttatgcttatgagagccaagtagtcagtggaagagagtagagctcaaaactggattatcaccttagcaacttagaatagtttgaaatagaaaaaaagtatttaatttggatctggatctgttaagatatgcacagtctattttttgtatagtattggaaaataaaaatgctataatttgggtatgggttcttttgtatacattacctgcccattgaggaaaggggcaagtccattatgcaacttctctccaaacccttcatattctggatatgatacttaaagagccatgagcagctacattctgcctatcagaaggcatttattaaatgactgcttgctgaagatgtgtccaaagagatcctacattaaggtcatttgtcagaatgatgtttgtgtttgtttagagttggctgacctccaactcctggggtcaaggaatcctactgccttagcttcccaaatagctaggactataggcatgcacccggccatgtgttttatttatagctcttaaagcccagatgaagaaatcacatttttgcccatagtgaagaaacatttggccattgattagtccttattttcagtgactgtcctgttttcattagattagagagaccctgtgtgggccacagttaatataaaccattatcacttttaagtaaacctgcacatcttagatttcataatttccttattgttctgactcaaaatgaactaagagcttttcactttttgtttgtaagttctcagagagtcgggtctgcaagtgcttttgcctgccaggattttgtactcaaataaatgctatttggcaactaaaattcttgccagctctcatgtaattttgatgttactgaggttggttggtagtttattttattaattttgtggttcttctatcatatagaaaaagccaaatacagttttgtttgaatatttgt

SEQ ID NO: 5810 - protein, 75 aa, Homo sapiens [sequence omitted]

SEQ ID NO: 5811 - DNA, 3867 bp, Homo sapiens
ctttctggctggactagggcactgcagaagattgtgcctgagcttagggttgagcatacgaagatgtggtgatgccgctctgctggttatgaaggattttagaagttctgaaaaatgttttctctttttgagagttctccagcaggtggtgaccactgcacttgaaacaattgatattagaaaagatgagctgacccttcttttgctctgtgtgtttataatttaatatagttacaagaagacatctgaaaccttatcccaggctggacagaaggcctcagctgctttttcgtctgttggctcagtcatcaccaaaaagctggaagatgtaaaaaactccccaacttttaaatcatttgaagaaaaggtcgaaaacttaaaggcaatagggggaaccaagcctgctggtggtgattttggagaagtcttgaattcggctgcaaatgctagtgccaccaccacggagcctcttccagaaaagacacaggagagcctgtgagattcctacctttgttctgctacccactgccagatgctgcaagcgaggtccaagcacatcttgtcaacatgcattgccatgaatttctaccagatgtgcttttatttagctttacatattcctttgaccaaatagtttgtgggttaaacaaaatgaaaatatcttcacctctattcttgggaaacaccctttagtgtacatttatgttcctttatttaggaaacaccattataaaaacacttatagtaaatggggacattcactataatgatctaagaagctacagattgtcatagttgttttcctgctttacaaaattgctccagatctggaatgccagtttgacctttgtcttctataatatttcctttttttcccctctttgaatctctgtatatttgattcttaactaaaattgttctcttaaatattctgaatcctggtaattaaaagtttgggtgtattttctttacctccaaggaaagaactactagctacaaaaaatattttggaataagcattgttttggtataaggtacatattttggttgaagacaccagactgaagtaaacagctgtgcatccaatttattatagttttgtaagtaacaatatgtaatcaaacttctaggtgacttgagagtggaacctcctatatcattatttagcaccgtttgtgacagtaaccatttcagtgtattgtttattataccacttatatcaacttatttttcaccaggttaaaattttaatttctacaaaataacattctgaatcaagcacactgtatgttcagtaggttgaactatgaacactgtcatcaatgttcagttcaaaagcctgaaagtttagatctagaagctggtaaaaatgacaatatcaatcacattaggggaaccattgttgtcttcacttaatccatttagcactatttaaaataagcacaccaagttatatgactaatataacttgaaaattttttatactgaggggttggtgataactcttgaggatgtaatgcattaataaaaatcaactcatcattttctacttgttttcaatgtgttggaaactgtaaaatgatactgtagaacctgtctcctactttgaaaactgaatgtcagggctgagtgaatcaaagtgtctagacatatttgcatagaggccaaggtattctattctaataactgcttactcaacactaccaccttttccttatactgtatatgattatggcctacaatgttgtatttgttatttattaaattgtgattgttttattattgtttatgccaaatgttaactgccaagcttggagtgacctaaagcattttttaaaagcatggctagatttacttcagtataaattatcttatgaaaaccaaattttaaaagccacaggtgttgattgttataaaataacatgctgccattcttgattgctagagtttttgttagtactttggatgcaattaaaactatgtgctatcacatgtgaaaagcttaataaattccatctatcagtagtataggtctcaatatttattatgagaccagtggtctggaaacagcttgttgtaccgaatcaactggagtctatgcttaaaaaaaaaaaatttttttttaaccatccttaaattattgcttaatggtatcatattaacatattctaaataagggctttaaggcacaggctgttgaagcattttctcagaggagtggatctgtagaagtctgtctttctatagaaatattgtgcttactcaagtgttaaattattttttctatgaactagtctacttcttaaaattcaaacatattcttttgatcacattgtttcttgagcatcctgccctgctactaacttttcaacaaggcaaaatggagtaaagtggcaatttctttagatgagtgaaataccctcaagtctcttttctgcccaaaaagggaaaagtgatagaaatgggggtggcaagtggggtgagtggatgaaggtgggtattgggggtggctgtgaaagaaaataatggagaatcacttttctagacatctacctatacttaatctaagaaacaaagtaatctactgtaaagtactctgccccttgaaagaagtattaaaaagagtgaggatggatttagaaaaaaacatgaatttagaaatattcaaaatggtttttgtggcagattcaatattatgaattcacagatatttaaagaatgagaaacatagtaattagtagaaatgccagaaacagttcctggttcctcttgtgtttgacactaagaaaatagcaagagtgtgaaatctcagatacttatgaaatctcacagatgtaaggactcaagtgtagaagaaaatatccccttcttacaaaaagaaatgtcaatttatggagtttgtgggaaatagggcaagaattcttatgcttatgagagccaagtagtcagtggaagagagtagagctcaaaactggattatcaccttagcaacttagaatagtttgaaatagaaaaaaagtatttaatttggatctggatctgttaagatatgcacagtctattttttgtatagtattggaaaataaaaatgctataatttgggtatgggttcttttgtatacattacctgcccattgaggaaaggggcaagtccattatgcaacttctctccaaacccttcatattctggatatgatacttaaagagccatgagcagctacattctgcctatcagaaggcatttattaaatgactgcttgctgaagatgtgtccaaagagatcctacattaaggtcatttgtcagaatgatgtttgtgtttgtttagagttggctgacctccaactcctggggtcaaggaatcctactgccttagcttcccaaatagctaggactataggcatgcacccggccatgtgttttatttatagctcttaaagcccagatgaagaaatcacatttttgcccatagtgaagaaacatttggccattgattagtccttattttcagtgactgtcctgttttcattagattagagagaccctgtgtgggccacagttaatataaaccattatcacttttaagtaaacctgcacatcttagatttcataatttccttattgttctgactcaaaatgaactaagagcttttcactttttgtttgtaagttctcagagagtcgggtctgcaagtgcttttgcctgccaggattttgtactcaaataaatgctatttggcaactaaaattcttgccagctctcatgtaattttgatgttactgaggttggttggtagtttattttattaattttgtggttcttctatcatatagaaaaagccaaatacagttttgtttgaatatttgt

SEQ ID NO: 5812 - protein, 75 aa, Homo sapiens [sequence omitted]

SEQ ID NO: 5813 - DNA, 3965 bp, Homo sapiens
ggagcttaaatagggattttacttagattttgcactttaaaaaatggtttaaatccccaaccaggtctgctgagaacagacccagtccctgaggaaggagaagatgttgctgccacgatcagtgccacagagaccctctcggaagaggagcaggaagagctaagaagagaacttgcaaaggtagaagaagaaatccagactctgtctcaagtgttagcagcaaaagagaagcatctagcagagatcaagcggaaacttggaatcaattctctacaggaactaaaacagaacattgccaaagggtggcaagacgtgacagcaacatctgcttacaagaagacatctgaaaccttatcccaggctggacagaaggcctcagctgctttttcgtctgttggctcagtcatcaccaaaaagctggaagatgtaaaaaactccccaacttttaaatcatttgaagaaaaggtcgaaaacttaaaggcaatagggggaaccaagcctgctggtggtgattttggagaagtcttgaattcggctgcaaatgctagtgccaccaccacggagcctcttccagaaaagacacaggagagcctgtgagattcctacctttgttctgctacccactgccagatgctgcaagcgaggtccaagcacatcttgtcaacatgcattgccatgaatttctaccagatgtgcttttatttagctttacatattcctttgaccaaatagtttgtgggttaaacaaaatgaaaatatcttcacctctattcttgggaaacaccctttagtgtacatttatgttcctttatttaggaaacaccattataaaaacacttatagtaaatggggacattcactataatgatctaagaagctacagattgtcatagttgttttcctgctttacaaaattgctccagatctggaatgccagtttgacctttgtcttctataatatttcctttttttcccctctttgaatctctgtatatttgattcttaactaaaattgttctcttaaatattctgaatcctggtaattaaaagtttgggtgtattttctttacctccaaggaaagaactactagctacaaaaaatattttggaataagcattgttttggtataaggtacatattttggttgaagacaccagactgaagtaaacagctgtgcatccaatttattatagttttgtaagtaacaatatgtaatcaaacttctaggtgacttgagagtggaacctcctatatcattatttagcaccgtttgtgacagtaaccatttcagtgtattgtttattataccacttatatcaacttatttttcaccaggttaaaattttaatttctacaaaataacattctgaatcaagcacactgtatgttcagtaggttgaactatgaacactgtcatcaatgttcagttcaaaagcctgaaagtttagatctagaagctggtaaaaatgacaatatcaatcacattaggggaaccattgttgtcttcacttaatccatttagcactatttaaaataagcacaccaagttatatgactaatataacttgaaaattttttatactgaggggttggtgataactcttgaggatgtaatgcattaataaaaatcaactcatcattttctacttgttttcaatgtgttggaaactgtaaaatgatactgtagaacctgtctcctactttgaaaactgaatgtcagggctgagtgaatcaaagtgtctagacatatttgcatagaggccaaggtattctattctaataactgcttactcaacactaccaccttttccttatactgtatatgattatggcctacaatgttgtatttgttatttattaaattgtgattgttttattattgtttatgccaaatgttaactgccaagcttggagtgacctaaagcattttttaaaagcatggctagatttacttcagtataaattatcttatgaaaaccaaattttaaaagccacaggtgttgattgttataaaataacatgctgccattcttgattgctagagtttttgttagtactttggatgcaattaaaactatgtgctatcacatgtgaaaagcttaataaattccatctatcagtagtataggtctcaatatttattatgagaccagtggtctggaaacagcttgttgtaccgaatcaactggagtctatgcttaaaaaaaaaaaatttttttttaaccatccttaaattattgcttaatggtatcatattaacatattctaaataagggctttaaggcacaggctgttgaagcattttctcagaggagtggatctgtagaagtctgtctttctatagaaatattgtgcttactcaagtgttaaattattttttctatgaactagtctacttcttaaaattcaaacatattcttttgatcacattgtttcttgagcatcctgccctgctactaacttttcaacaaggcaaaatggagtaaagtggcaatttctttagatgagtgaaataccctcaagtctcttttctgcccaaaaagggaaaagtgatagaaatgggggtggcaagtggggtgagtggatgaaggtgggtattgggggtggctgtgaaagaaaataatggagaatcacttttctagacatctacctatacttaatctaagaaacaaagtaatctactgtaaagtactctgccccttgaaagaagtattaaaaagagtgaggatggatttagaaaaaaacatgaatttagaaatattcaaaatggtttttgtggcagattcaatattatgaattcacagatatttaaagaatgagaaacatagtaattagtagaaatgccagaaacagttcctggttcctcttgtgtttgacactaagaaaatagcaagagtgtgaaatctcagatacttatgaaatctcacagatgtaaggactcaagtgtagaagaaaatatccccttcttacaaaaagaaatgtcaatttatggagtttgtgggaaatagggcaagaattcttatgcttatgagagccaagtagtcagtggaagagagtagagctcaaaactggattatcaccttagcaacttagaatagtttgaaatagaaaaaaagtatttaatttggatctggatctgttaagatatgcacagtctattttttgtatagtattggaaaataaaaatgctataatttgggtatgggttcttttgtatacattacctgcccattgaggaaaggggcaagtccattatgcaacttctctccaaacccttcatattctggatatgatacttaaagagccatgagcagctacattctgcctatcagaaggcatttattaaatgactgcttgctgaagatgtgtccaaagagatcctacattaaggtcatttgtcagaatgatgtttgtgtttgtttagagttggctgacctccaactcctggggtcaaggaatcctactgccttagcttcccaaatagctaggactataggcatgcacccggccatgtgttttatttatagctcttaaagcccagatgaagaaatcacatttttgcccatagtgaagaaacatttggccattgattagtccttattttcagtgactgtcctgttttcattagattagagagaccctgtgtgggccacagttaatataaaccattatcacttttaagtaaacctgcacatcttagatttcataatttccttattgttctgactcaaaatgaactaagagcttttcactttttgtttgtaagttctcagagagtcgggtctgcaagtgcttttgcctgccaggattttgtactcaaataaatgctatttggcaactaaaattcttgccagctctcatgtaattttgatgttactgaggttggttggtagtttattttattaattttgtggttcttctatcatatagaaaaagccaaatacagttttgtttgaatatttgt

SEQ ID NO: 5814 - protein, 75 aa, Homo sapiens [sequence omitted]

SEQ ID NO: 5815 - DNA, 4487 bp, Homo sapiens
agtgtctgatgtttgcctgaactgtttgtacctctgggccatattgcagaaccctgcccttctttgttgactgaggaaagctcgctccctgcccaggtttttcattgttgatcgaaattaacaccaggtggtgaatagagcccctcctaaggttgctcaggataaatcatttattaaataggtctgcttatcaggaggggcgtgaaggctcccaaaaggaaatgctggcacctgggcccagaagccagggcctctaactcctggggttgatttcttcagtgaagttgcaccctacaaagggaatatggccaaagcggcactcaactgaaggctgatatcaggcgattagacagccatgcattctgcgtttgtctggaatggattgtagagagatggacttatatgaggactaccagtccccgtttgattttgatgcaggagtgaacaaaagctatctctacttgtctcctagtggaaattcatctccacccggatcacctactcttcagaaatttggtctgctgagaacagacccagtccctgaggaaggagaagatgttgctgccacgatcagtgccacagagaccctctcggaagaggagcaggaagagctaagaagagaacttgcaaaggtagaagaagaaatccagactctgtctcaagtgttagcagcaaaagagaagcatctagcagagatcaagcggaaacttggaatcaattctctacaggaactaaaacagaacattgccaaagggtggcaagacgtgacagcaacatctgcgaggagcaagcttctagcagcagaaaccgaactgctctgtcttctgtattgagagccatctgcagagctgttacaagaagacatctgaaaccttatcccaggctggacagaaggcctcagctgctttttcgtctgttggctcagtcatcaccaaaaagctggaagatgtaaaaaactccccaacttttaaatcatttgaagaaaaggtcgaaaacttaaaggcaatagggggaaccaagcctgctggtggtgattttggagaagtcttgaattcggctgcaaatgctagtgccaccaccacggagcctcttccagaaaagacacaggagagcctgtgagattcctacctttgttctgctacccactgccagatgctgcaagcgaggtccaagcacatcttgtcaacatgcattgccatgaatttctaccagatgtgcttttatttagctttacatattcctttgaccaaatagtttgtgggttaaacaaaatgaaaatatcttcacctctattcttgggaaacaccctttagtgtacatttatgttcctttatttaggaaacaccattataaaaacacttatagtaaatggggacattcactataatgatctaagaagctacagattgtcatagttgttttcctgctttacaaaattgctccagatctggaatgccagtttgacctttgtcttctataatatttcctttttttcccctctttgaatctctgtatatttgattcttaactaaaattgttctcttaaatattctgaatcctggtaattaaaagtttgggtgtattttctttacctccaaggaaagaactactagctacaaaaaatattttggaataagcattgttttggtataaggtacatattttggttgaagacaccagactgaagtaaacagctgtgcatccaatttattatagttttgtaagtaacaatatgtaatcaaacttctaggtgacttgagagtggaacctcctatatcattatttagcaccgtttgtgacagtaaccatttcagtgtattgtttattataccacttatatcaacttatttttcaccaggttaaaattttaatttctacaaaataacattctgaatcaagcacactgtatgttcagtaggttgaactatgaacactgtcatcaatgttcagttcaaaagcctgaaagtttagatctagaagctggtaaaaatgacaatatcaatcacattaggggaaccattgttgtcttcacttaatccatttagcactatttaaaataagcacaccaagttatatgactaatataacttgaaaattttttatactgaggggttggtgataactcttgaggatgtaatgcattaataaaaatcaactcatcattttctacttgttttcaatgtgttggaaactgtaaaatgatactgtagaacctgtctcctactttgaaaactgaatgtcagggctgagtgaatcaaagtgtctagacatatttgcatagaggccaaggtattctattctaataactgcttactcaacactaccaccttttccttatactgtatatgattatggcctacaatgttgtatttgttatttattaaattgtgattgttttattattgtttatgccaaatgttaactgccaagcttggagtgacctaaagcattttttaaaagcatggctagatttacttcagtataaattatcttatgaaaaccaaattttaaaagccacaggtgttgattgttataaaataacatgctgccattcttgattgctagagtttttgttagtactttggatgcaattaaaactatgtgctatcacatgtgaaaagcttaataaattccatctatcagtagtataggtctcaatatttattatgagaccagtggtctggaaacagcttgttgtaccgaatcaactggagtctatgcttaaaaaaaaaaaatttttttttaaccatccttaaattattgcttaatggtatcatattaacatattctaaataagggctttaaggcacaggctgttgaagcattttctcagaggagtggatctgtagaagtctgtctttctatagaaatattgtgcttactcaagtgttaaattattttttctatgaactagtctacttcttaaaattcaaacatattcttttgatcacattgtttcttgagcatcctgccctgctactaacttttcaacaaggcaaaatggagtaaagtggcaatttctttagatgagtgaaataccctcaagtctcttttctgcccaaaaagggaaaagtgatagaaatgggggtggcaagtggggtgagtggatgaaggtgggtattgggggtggctgtgaaagaaaataatggagaatcacttttctagacatctacctatacttaatctaagaaacaaagtaatctactgtaaagtactctgccccttgaaagaagtattaaaaagagtgaggatggatttagaaaaaaacatgaatttagaaatattcaaaatggtttttgtggcagattcaatattatgaattcacagatatttaaagaatgagaaacatagtaattagtagaaatgccagaaacagttcctggttcctcttgtgtttgacactaagaaaatagcaagagtgtgaaatctcagatacttatgaaatctcacagatgtaaggactcaagtgtagaagaaaatatccccttcttacaaaaagaaatgtcaatttatggagtttgtgggaaatagggcaagaattcttatgcttatgagagccaagtagtcagtggaagagagtagagctcaaaactggattatcaccttagcaacttagaatagtttgaaatagaaaaaaagtatttaatttggatctggatctgttaagatatgcacagtctattttttgtatagtattggaaaataaaaatgctataatttgggtatgggttcttttgtatacattacctgcccattgaggaaaggggcaagtccattatgcaacttctctccaaacccttcatattctggatatgatacttaaagagccatgagcagctacattctgcctatcagaaggcatttattaaatgactgcttgctgaagatgtgtccaaagagatcctacattaaggtcatttgtcagaatgatgtttgtgtttgtttagagttggctgacctccaactcctggggtcaaggaatcctactgccttagcttcccaaatagctaggactataggcatgcacccggccatgtgttttatttatagctcttaaagcccagatgaagaaatcacatttttgcccatagtgaagaaacatttggccattgattagtccttattttcagtgactgtcctgttttcattagattagagagaccctgtgtgggccacagttaatataaaccattatcacttttaagtaaacctgcacatcttagatttcataatttccttattgttctgactcaaaatgaactaagagcttttcactttttgtttgtaagttctcagagagtcgggtctgcaagtgcttttgcctgccaggattttgtactcaaataaatgctatttggcaactaaaattcttgccagctctcatgtaattttgatgttactgaggttggttggtagtttattttattaattttgtggttcttctatcatatagaaaaagccaaatacagttttgtttgaatatttgt

SEQ ID NO: 5816 - protein, 151 aa, Homo sapiens
MDCREMDLYEDYQSPFDFDAGVNKSYLYLSPSGNSSPPGSPTLQKFGLLRTDPVPEEGEDVAATISATETLSEEEQEELRRELAKVEEEIQTLSQVLAAKEKHLAEIKRKLGINSLQELKQNIAKGWQDVTATSARSKLLAAETELLCLLY

SEQ ID NO: 5817 - DNA, 4486 bp, Homo sapiens
agtgtctgatgtttgcctgaactgtttgtacctctgggccatattgcagaaccctgcccttctttgttgactgaggaaagctcgctccctgcccaggtttttcattgttgatcgaaattaacaccaggtggtgaatagagcccctcctaaggttgctcaggataaatcatttattaaataggtctgcttatcaggaggggcgtgaaggctcccaaaaggaaatgctggcacctgggcccagaagccagggcctctaactcctggggttgatttcttcagtgaagttgcaccctacaaagggaatatggccaaagcggcactcaactgaaggctgatatcaggcgattagacagccatgcattctgcgtttgtctggaatggattgtagagagatggacttatatgaggactaccagtccccgtttgattttgatgcaggagtgaacaaaagctatctctacttgtctcctagtggaaattcatctccacccggatcacctactcttcagaaatttggtctgctgagaacagacccagtccctgaggaaggagaagatgttgctgccacgatcagtgccacagagaccctctcggaagaggagcaggaagagctaagaagagaacttgcaaaggtagaagaagaaatccagactctgtctcaagtgttagcagcaaaagagaagcatctagcagagatcaagcggaaacttggaatcaattctctacaggaactaaaacagaacattgccaaagggtggcaagacgtgacagcaacatctgcttacaagaagacatctgaaaccttatcccaggctggacagaaggcctcagctgctttttcgtctgttggctcagtcatcaccaaaaagctggaagatgtaaaattgcaagccttttcacattcctttagtatacgttccattcagcattcaattagcatgcctgctatgagaaactccccaacttttaaatcatttgaagaaaaggtcgaaaacttaaaggcaatagggggaaccaagcctgctggtggtgattttggagaagtcttgaattcggctgcaaatgctagtgccaccaccacggagcctcttccagaaaagacacaggagagcctgtgagattcctacctttgttctgctacccactgccagatgctgcaagcgaggtccaagcacatcttgtcaacatgcattgccatgaatttctaccagatgtgcttttatttagctttacatattcctttgaccaaatagtttgtgggttaaacaaaatgaaaatatcttcacctctattcttgggaaacaccctttagtgtacatttatgttcctttatttaggaaacaccattataaaaacacttatagtaaatggggacattcactataatgatctaagaagctacagattgtcatagttgttttcctgctttacaaaattgctccagatctggaatgccagtttgacctttgtcttctataatatttcctttttttcccctctttgaatctctgtatatttgattcttaactaaaattgttctcttaaatattctgaatcctggtaattaaaagtttgggtgtattttctttacctccaaggaaagaactactagctacaaaaaatattttggaataagcattgttttggtataaggtacatattttggttgaagacaccagactgaagtaaacagctgtgcatccaatttattatagttttgtaagtaacaatatgtaatcaaacttctaggtgacttgagagtggaacctcctatatcattatttagcaccgtttgtgacagtaaccatttcagtgtattgtttattataccacttatatcaacttatttttcaccaggttaaaattttaatttctacaaaataacattctgaatcaagcacactgtatgttcagtaggttgaactatgaacactgtcatcaatgttcagttcaaaagcctgaaagtttagatctagaagctggtaaaaatgacaatatcaatcacattaggggaaccattgttgtcttcacttaatccatttagcactatttaaaataagcacaccaagttatatgactaatataacttgaaaattttttatactgaggggttggtgataactcttgaggatgtaatgcattaataaaaatcaactcatcattttctacttgttttcaatgtgttggaaactgtaaaatgatactgtagaacctgtctcctactttgaaaactgaatgtcagggctgagtgaatcaaagtgtctagacatatttgcatagaggccaaggtattctattctaataactgcttactcaacactaccaccttttccttatactgtatatgattatggcctacaatgttgtatttgttatttattaaattgtgattgttttattattgtttatgccaaatgttaactgccaagcttggagtgacctaaagcattttttaaaagcatggctagatttacttcagtataaattatcttatgaaaaccaaattttaaaagccacaggtgttgattgttataaaataacatgctgccattcttgattgctagagtttttgttagtactttggatgcaattaaaactatgtgctatcacatgtgaaaagcttaataaattccatctatcagtagtataggtctcaatatttattatgagaccagtggtctggaaacagcttgttgtaccgaatcaactggagtctatgcttaaaaaaaaaaaatttttttttaaccatccttaaattattgcttaatggtatcatattaacatattctaaataagggctttaaggcacaggctgttgaagcattttctcagaggagtggatctgtagaagtctgtctttctatagaaatattgtgcttactcaagtgttaaattattttttctatgaactagtctacttcttaaaattcaaacatattcttttgatcacattgtttcttgagcatcctgccctgctactaacttttcaacaaggcaaaatggagtaaagtggcaatttctttagatgagtgaaataccctcaagtctcttttctgcccaaaaagggaaaagtgatagaaatgggggtggcaagtggggtgagtggatgaaggtgggtattgggggtggctgtgaaagaaaataatggagaatcacttttctagacatctacctatacttaatctaagaaacaaagtaatctactgtaaagtactctgccccttgaaagaagtattaaaaagagtgaggatggatttagaaaaaaacatgaatttagaaatattcaaaatggtttttgtggcagattcaatattatgaattcacagatatttaaagaatgagaaacatagtaattagtagaaatgccagaaacagttcctggttcctcttgtgtttgacactaagaaaatagcaagagtgtgaaatctcagatacttatgaaatctcacagatgtaaggactcaagtgtagaagaaaatatccccttcttacaaaaagaaatgtcaatttatggagtttgtgggaaatagggcaagaattcttatgcttatgagagccaagtagtcagtggaagagagtagagctcaaaactggattatcaccttagcaacttagaatagtttgaaatagaaaaaaagtatttaatttggatctggatctgttaagatatgcacagtctattttttgtatagtattggaaaataaaaatgctataatttgggtatgggttcttttgtatacattacctgcccattgaggaaaggggcaagtccattatgcaacttctctccaaacccttcatattctggatatgatacttaaagagccatgagcagctacattctgcctatcagaaggcatttattaaatgactgcttgctgaagatgtgtccaaagagatcctacattaaggtcatttgtcagaatgatgtttgtgtttgtttagagttggctgacctccaactcctggggtcaaggaatcctactgccttagcttcccaaatagctaggactataggcatgcacccggccatgtgttttatttatagctcttaaagcccagatgaagaaatcacatttttgcccatagtgaagaaacatttggccattgattagtccttattttcagtgactgtcctgttttcattagattagagagaccctgtgtgggccacagttaatataaaccattatcacttttaagtaaacctgcacatcttagatttcataatttccttattgttctgactcaaaatgaactaagagcttttcactttttgtttgtaagttctcagagagtcgggtctgcaagtgcttttgcctgccaggattttgtactcaaataaatgctatttggcaactaaaattcttgccagctctcatgtaattttgatgttactgaggttggttggtagtttattttattaattttgtggttcttctatcatatagaaaaagccaaatacagttttgtttgaatatttgt

SEQ ID NO: 5818 - protein, 246 aa, Homo sapiens
MDCREMDLYEDYQSPFDFDAGVNKSYLYLSPSGNSSPPGSPTLQKFGLLRTDPVPEEGEDVAATISATETLSEEEQEELRRELAKVEEEIQTLSQVLAAKEKHLAEIKRKLGINSLQELKQNIAKGWQDVTATSAYKKTSETLSQAGQKASAAFSSVGSVITKKLEDVKLQAFSHSFSIRSIQHSISMPAMRNSPTFKSFEEKVENLKAIGGTKPAGGDFGEVLNSAANASATTTEPLPEKTQESL

SEQ ID NO: 5819 - DNA, 4417 bp, Homo sapiens
agtgtctgatgtttgcctgaactgtttgtacctctgggccatattgcagaaccctgcccttctttgttgactgaggaaagctcgctccctgcccaggtttttcattgttgatcgaaattaacaccaggtggtgaatagagcccctcctaaggttgctcaggataaatcatttattaaataggtctgcttatcaggaggggcgtgaaggctcccaaaaggaaatgctggcacctgggcccagaagccagggcctctaactcctggggttgatttcttcagtgaagttgcaccctacaaagggaatatggccaaagcggcactcaactgaaggctgatatcaggcgattagacagccatgcattctgcgtttgtctggaatggattgtagagagatggacttatatgaggactaccagtccccgtttgattttgatgcaggagtgaacaaaagctatctctacttgtctcctagtggaaattcatctccacccggatcacctactcttcagaaatttggtctgctgagaacagacccagtccctgaggaaggagaagatgttgctgccacgatcagtgccacagagaccctctcggaagaggagcaggaagagctaagaagagaacttgcaaaggtagaagaagaaatccagactctgtctcaagtgttagcagcaaaagagaagcatctagcagagatcaagcggaaacttggaatcaattctctacaggaactaaaacagaacattgccaaagggtggcaagacgtgacagcaacatctgcttacaagaagacatctgaaaccttatcccaggctggacagaaggcctcagctgctttttcgtctgttggctcagtcatcaccaaaaagctggaagatgtaaaaaactccccaacttttaaatcatttgaagaaaaggtcgaaaacttaaaggcaatagggggaaccaagcctgctggtggtgattttggagaagtcttgaattcggctgcaaatgctagtgccaccaccacggagcctcttccagaaaagacacaggagagcctgtgagattcctacctttgttctgctacccactgccagatgctgcaagcgaggtccaagcacatcttgtcaacatgcattgccatgaatttctaccagatgtgcttttatttagctttacatattcctttgaccaaatagtttgtgggttaaacaaaatgaaaatatcttcacctctattcttgggaaacaccctttagtgtacatttatgttcctttatttaggaaacaccattataaaaacacttatagtaaatggggacattcactataatgatctaagaagctacagattgtcatagttgttttcctgctttacaaaattgctccagatctggaatgccagtttgacctttgtcttctataatatttcctttttttcccctctttgaatctctgtatatttgattcttaactaaaattgttctcttaaatattctgaatcctggtaattaaaagtttgggtgtattttctttacctccaaggaaagaactactagctacaaaaaatattttggaataagcattgttttggtataaggtacatattttggttgaagacaccagactgaagtaaacagctgtgcatccaatttattatagttttgtaagtaacaatatgtaatcaaacttctaggtgacttgagagtggaacctcctatatcattatttagcaccgtttgtgacagtaaccatttcagtgtattgtttattataccacttatatcaacttatttttcaccaggttaaaattttaatttctacaaaataacattctgaatcaagcacactgtatgttcagtaggttgaactatgaacactgtcatcaatgttcagttcaaaagcctgaaagtttagatctagaagctggtaaaaatgacaatatcaatcacattaggggaaccattgttgtcttcacttaatccatttagcactatttaaaataagcacaccaagttatatgactaatataacttgaaaattttttatactgaggggttggtgataactcttgaggatgtaatgcattaataaaaatcaactcatcattttctacttgttttcaatgtgttggaaactgtaaaatgatactgtagaacctgtctcctactttgaaaactgaatgtcagggctgagtgaatcaaagtgtctagacatatttgcatagaggccaaggtattctattctaataactgcttactcaacactaccaccttttccttatactgtatatgattatggcctacaatgttgtatttgttatttattaaattgtgattgttttattattgtttatgccaaatgttaactgccaagcttggagtgacctaaagcattttttaaaagcatggctagatttacttcagtataaattatcttatgaaaaccaaattttaaaagccacaggtgttgattgttataaaataacatgctgccattcttgattgctagagtttttgttagtactttggatgcaattaaaactatgtgctatcacatgtgaaaagcttaataaattccatctatcagtagtataggtctcaatatttattatgagaccagtggtctggaaacagcttgttgtaccgaatcaactggagtctatgcttaaaaaaaaaaaatttttttttaaccatccttaaattattgcttaatggtatcatattaacatattctaaataagggctttaaggcacaggctgttgaagcattttctcagaggagtggatctgtagaagtctgtctttctatagaaatattgtgcttactcaagtgttaaattattttttctatgaactagtctacttcttaaaattcaaacatattcttttgatcacattgtttcttgagcatcctgccctgctactaacttttcaacaaggcaaaatggagtaaagtggcaatttctttagatgagtgaaataccctcaagtctcttttctgcccaaaaagggaaaagtgatagaaatgggggtggcaagtggggtgagtggatgaaggtgggtattgggggtggctgtgaaagaaaataatggagaatcacttttctagacatctacctatacttaatctaagaaacaaagtaatctactgtaaagtactctgccccttgaaagaagtattaaaaagagtgaggatggatttagaaaaaaacatgaatttagaaatattcaaaatggtttttgtggcagattcaatattatgaattcacagatatttaaagaatgagaaacatagtaattagtagaaatgccagaaacagttcctggttcctcttgtgtttgacactaagaaaatagcaagagtgtgaaatctcagatacttatgaaatctcacagatgtaaggactcaagtgtagaagaaaatatccccttcttacaaaaagaaatgtcaatttatggagtttgtgggaaatagggcaagaattcttatgcttatgagagccaagtagtcagtggaagagagtagagctcaaaactggattatcaccttagcaacttagaatagtttgaaatagaaaaaaagtatttaatttggatctggatctgttaagatatgcacagtctattttttgtatagtattggaaaataaaaatgctataatttgggtatgggttcttttgtatacattacctgcccattgaggaaaggggcaagtccattatgcaacttctctccaaacccttcatattctggatatgatacttaaagagccatgagcagctacattctgcctatcagaaggcatttattaaatgactgcttgctgaagatgtgtccaaagagatcctacattaaggtcatttgtcagaatgatgtttgtgtttgtttagagttggctgacctccaactcctggggtcaaggaatcctactgccttagcttcccaaatagctaggactataggcatgcacccggccatgtgttttatttatagctcttaaagcccagatgaagaaatcacatttttgcccatagtgaagaaacatttggccattgattagtccttattttcagtgactgtcctgttttcattagattagagagaccctgtgtgggccacagttaatataaaccattatcacttttaagtaaacctgcacatcttagatttcataatttccttattgttctgactcaaaatgaactaagagcttttcactttttgtttgtaagttctcagagagtcgggtctgcaagtgcttttgcctgccaggattttgtactcaaataaatgctatttggcaactaaaattcttgccagctctcatgtaattttgatgttactgaggttggttggtagtttattttattaattttgtggttcttctatcatatagaaaaagccaaatacagttttgtttgaatatttgt

SEQ ID NO: 5820 - protein, 223 aa, Homo sapiens
MDCREMDLYEDYQSPFDFDAGVNKSYLYLSPSGNSSPPGSPTLQKFGLLRTDPVPEEGEDVAATISATETLSEEEQEELRRELAKVEEEIQTLSQVLAAKEKHLAEIKRKLGINSLQELKQNIAKGWQDVTATSAYKKTSETLSQAGQKASAAFSSVGSVITKKLEDVKNSPTFKSFEEKVENLKAIGGTKPAGGDFGEVLNSAANASATTTEPLPEKTQESL

SEQ ID NO: 5821 - DNA, 3917 bp, Homo sapiens
gggagtcgccggcggaggcgaggaggagctctgcgcggcgcggcgggcgatccgagccgggacgggctgcaggcgggggtgctgcagaggacacgaggcggcgggctggagacatggaccgcggcgagcaaggtagaagaagaaatccagactctgtctcaagtgttagcagcaaaagagaagcatctagcagagatcaagcggaaacttggaatcaattctctacaggaactaaaacagaacattgccaaagggtggcaagacgtgacagcaacatctgcttacaagaagacatctgaaaccttatcccaggctggacagaaggcctcagctgctttttcgtctgttggctcagtcatcaccaaaaagctggaagatgtaaaaaactccccaacttttaaatcatttgaagaaaaggtcgaaaacttaaaggcaatagggggaaccaagcctgctggtggtgattttggagaagtcttgaattcggctgcaaatgctagtgccaccaccacggagcctcttccagaaaagacacaggagagcctgtgagattcctacctttgttctgctacccactgccagatgctgcaagcgaggtccaagcacatcttgtcaacatgcattgccatgaatttctaccagatgtgcttttatttagctttacatattcctttgaccaaatagtttgtgggttaaacaaaatgaaaatatcttcacctctattcttgggaaacaccctttagtgtacatttatgttcctttatttaggaaacaccattataaaaacacttatagtaaatggggacattcactataatgatctaagaagctacagattgtcatagttgttttcctgctttacaaaattgctccagatctggaatgccagtttgacctttgtcttctataatatttcctttttttcccctctttgaatctctgtatatttgattcttaactaaaattgttctcttaaatattctgaatcctggtaattaaaagtttgggtgtattttctttacctccaaggaaagaactactagctacaaaaaatattttggaataagcattgttttggtataaggtacatattttggttgaagacaccagactgaagtaaacagctgtgcatccaatttattatagttttgtaagtaacaatatgtaatcaaacttctaggtgacttgagagtggaacctcctatatcattatttagcaccgtttgtgacagtaaccatttcagtgtattgtttattataccacttatatcaacttatttttcaccaggttaaaattttaatttctacaaaataacattctgaatcaagcacactgtatgttcagtaggttgaactatgaacactgtcatcaatgttcagttcaaaagcctgaaagtttagatctagaagctggtaaaaatgacaatatcaatcacattaggggaaccattgttgtcttcacttaatccatttagcactatttaaaataagcacaccaagttatatgactaatataacttgaaaattttttatactgaggggttggtgataactcttgaggatgtaatgcattaataaaaatcaactcatcattttctacttgttttcaatgtgttggaaactgtaaaatgatactgtagaacctgtctcctactttgaaaactgaatgtcagggctgagtgaatcaaagtgtctagacatatttgcatagaggccaaggtattctattctaataactgcttactcaacactaccaccttttccttatactgtatatgattatggcctacaatgttgtatttgttatttattaaattgtgattgttttattattgtttatgccaaatgttaactgccaagcttggagtgacctaaagcattttttaaaagcatggctagatttacttcagtataaattatcttatgaaaaccaaattttaaaagccacaggtgttgattgttataaaataacatgctgccattcttgattgctagagtttttgttagtactttggatgcaattaaaactatgtgctatcacatgtgaaaagcttaataaattccatctatcagtagtataggtctcaatatttattatgagaccagtggtctggaaacagcttgttgtaccgaatcaactggagtctatgcttaaaaaaaaaaaatttttttttaaccatccttaaattattgcttaatggtatcatattaacatattctaaataagggctttaaggcacaggctgttgaagcattttctcagaggagtggatctgtagaagtctgtctttctatagaaatattgtgcttactcaagtgttaaattattttttctatgaactagtctacttcttaaaattcaaacatattcttttgatcacattgtttcttgagcatcctgccctgctactaacttttcaacaaggcaaaatggagtaaagtggcaatttctttagatgagtgaaataccctcaagtctcttttctgcccaaaaagggaaaagtgatagaaatgggggtggcaagtggggtgagtggatgaaggtgggtattgggggtggctgtgaaagaaaataatggagaatcacttttctagacatctacctatacttaatctaagaaacaaagtaatctactgtaaagtactctgccccttgaaagaagtattaaaaagagtgaggatggatttagaaaaaaacatgaatttagaaatattcaaaatggtttttgtggcagattcaatattatgaattcacagatatttaaagaatgagaaacatagtaattagtagaaatgccagaaacagttcctggttcctcttgtgtttgacactaagaaaatagcaagagtgtgaaatctcagatacttatgaaatctcacagatgtaaggactcaagtgtagaagaaaatatccccttcttacaaaaagaaatgtcaatttatggagtttgtgggaaatagggcaagaattcttatgcttatgagagccaagtagtcagtggaagagagtagagctcaaaactggattatcaccttagcaacttagaatagtttgaaatagaaaaaaagtatttaatttggatctggatctgttaagatatgcacagtctattttttgtatagtattggaaaataaaaatgctataatttgggtatgggttcttttgtatacattacctgcccattgaggaaaggggcaagtccattatgcaacttctctccaaacccttcatattctggatatgatacttaaagagccatgagcagctacattctgcctatcagaaggcatttattaaatgactgcttgctgaagatgtgtccaaagagatcctacattaaggtcatttgtcagaatgatgtttgtgtttgtttagagttggctgacctccaactcctggggtcaaggaatcctactgccttagcttcccaaatagctaggactataggcatgcacccggccatgtgttttatttatagctcttaaagcccagatgaagaaatcacatttttgcccatagtgaagaaacatttggccattgattagtccttattttcagtgactgtcctgttttcattagattagagagaccctgtgtgggccacagttaatataaaccattatcacttttaagtaaacctgcacatcttagatttcataatttccttattgttctgactcaaaatgaactaagagcttttcactttttgtttgtaagttctcagagagtcgggtctgcaagtgcttttgcctgccaggattttgtactcaaataaatgctatttggcaactaaaattcttgccagctctcatgtaattttgatgttactgaggttggttggtagtttattttattaattttgtggttcttctatcatatagaaaaagccaaatacagttttgtttgaatatttgt

SEQ ID NO: 5822 - protein, 61 aa, Homo sapiens
MDRGEQGRRRNPDSVSSVSSKREASSRDQAETWNQFSTGTKTEHCQRVARRDSNICLQEDI

SEQ ID NO: 5823 - DNA, 4042 bp, Homo sapiens
ggacttcgcgggagtcgccggcggaggcgaggaggagctctgcgcggcgcggcgggcgatccgagccgggacgggctgcaggcgggggtgctgcagaggacacgaggcggcgggctggagacatggaccgcggcgagcaaggtctgctgagaacagacccagtccctgaggaaggagaagatgttgctgccacgatcagtgccacagagaccctctcggaagaggagcaggaagagctaagaagagaacttgcaaaggtagaagaagaaatccagactctgtctcaagtgttagcagcaaaagagaagcatctagcagagatcaagcggaaacttggaatcaattctctacaggaactaaaacagaacattgccaaagggtggcaagacgtgacagcaacatctgcttacaagaagacatctgaaaccttatcccaggctggacagaaggcctcagctgctttttcgtctgttggctcagtcatcaccaaaaagctggaagatgtaaaaaactccccaacttttaaatcatttgaagaaaaggtcgaaaacttaaaggcaatagggggaaccaagcctgctggtggtgattttggagaagtcttgaattcggctgcaaatgctagtgccaccaccacggagcctcttccagaaaagacacaggagagcctgtgagattcctacctttgttctgctacccactgccagatgctgcaagcgaggtccaagcacatcttgtcaacatgcattgccatgaatttctaccagatgtgcttttatttagctttacatattcctttgaccaaatagtttgtgggttaaacaaaatgaaaatatcttcacctctattcttgggaaacaccctttagtgtacatttatgttcctttatttaggaaacaccattataaaaacacttatagtaaatggggacattcactataatgatctaagaagctacagattgtcatagttgttttcctgctttacaaaattgctccagatctggaatgccagtttgacctttgtcttctataatatttcctttttttcccctctttgaatctctgtatatttgattcttaactaaaattgttctcttaaatattctgaatcctggtaattaaaagtttgggtgtattttctttacctccaaggaaagaactactagctacaaaaaatattttggaataagcattgttttggtataaggtacatattttggttgaagacaccagactgaagtaaacagctgtgcatccaatttattatagttttgtaagtaacaatatgtaatcaaacttctaggtgacttgagagtggaacctcctatatcattatttagcaccgtttgtgacagtaaccatttcagtgtattgtttattataccacttatatcaacttatttttcaccaggttaaaattttaatttctacaaaataacattctgaatcaagcacactgtatgttcagtaggttgaactatgaacactgtcatcaatgttcagttcaaaagcctgaaagtttagatctagaagctggtaaaaatgacaatatcaatcacattaggggaaccattgttgtcttcacttaatccatttagcactatttaaaataagcacaccaagttatatgactaatataacttgaaaattttttatactgaggggttggtgataactcttgaggatgtaatgcattaataaaaatcaactcatcattttctacttgttttcaatgtgttggaaactgtaaaatgatactgtagaacctgtctcctactttgaaaactgaatgtcagggctgagtgaatcaaagtgtctagacatatttgcatagaggccaaggtattctattctaataactgcttactcaacactaccaccttttccttatactgtatatgattatggcctacaatgttgtatttgttatttattaaattgtgattgttttattattgtttatgccaaatgttaactgccaagcttggagtgacctaaagcattttttaaaagcatggctagatttacttcagtataaattatcttatgaaaaccaaattttaaaagccacaggtgttgattgttataaaataacatgctgccattcttgattgctagagtttttgttagtactttggatgcaattaaaactatgtgctatcacatgtgaaaagcttaataaattccatctatcagtagtataggtctcaatatttattatgagaccagtggtctggaaacagcttgttgtaccgaatcaactggagtctatgcttaaaaaaaaaaaatttttttttaaccatccttaaattattgcttaatggtatcatattaacatattctaaataagggctttaaggcacaggctgttgaagcattttctcagaggagtggatctgtagaagtctgtctttctatagaaatattgtgcttactcaagtgttaaattattttttctatgaactagtctacttcttaaaattcaaacatattcttttgatcacattgtttcttgagcatcctgccctgctactaacttttcaacaaggcaaaatggagtaaagtggcaatttctttagatgagtgaaataccctcaagtctcttttctgcccaaaaagggaaaagtgatagaaatgggggtggcaagtggggtgagtggatgaaggtgggtattgggggtggctgtgaaagaaaataatggagaatcacttttctagacatctacctatacttaatctaagaaacaaagtaatctactgtaaagtactctgccccttgaaagaagtattaaaaagagtgaggatggatttagaaaaaaacatgaatttagaaatattcaaaatggtttttgtggcagattcaatattatgaattcacagatatttaaagaatgagaaacatagtaattagtagaaatgccagaaacagttcctggttcctcttgtgtttgacactaagaaaatagcaagagtgtgaaatctcagatacttatgaaatctcacagatgtaaggactcaagtgtagaagaaaatatccccttcttacaaaaagaaatgtcaatttatggagtttgtgggaaatagggcaagaattcttatgcttatgagagccaagtagtcagtggaagagagtagagctcaaaactggattatcaccttagcaacttagaatagtttgaaatagaaaaaaagtatttaatttggatctggatctgttaagatatgcacagtctattttttgtatagtattggaaaataaaaatgctataatttgggtatgggttcttttgtatacattacctgcccattgaggaaaggggcaagtccattatgcaacttctctccaaacccttcatattctggatatgatacttaaagagccatgagcagctacattctgcctatcagaaggcatttattaaatgactgcttgctgaagatgtgtccaaagagatcctacattaaggtcatttgtcagaatgatgtttgtgtttgtttagagttggctgacctccaactcctggggtcaaggaatcctactgccttagcttcccaaatagctaggactataggcatgcacccggccatgtgttttatttatagctcttaaagcccagatgaagaaatcacatttttgcccatagtgaagaaacatttggccattgattagtccttattttcagtgactgtcctgttttcattagattagagagaccctgtgtgggccacagttaatataaaccattatcacttttaagtaaacctgcacatcttagatttcataatttccttattgttctgactcaaaatgaactaagagcttttcactttttgtttgtaagttctcagagagtcgggtctgcaagtgcttttgcctgccaggattttgtactcaaataaatgctatttggcaactaaaattcttgccagctctcatgtaattttgatgttactgaggttggttggtagtttattttattaattttgtggttcttctatcatatagaaaaagccaaatacagttttgtttgaatatttgt

SEQ ID NO: 5824 - protein, 183 aa, Homo sapiens
MDRGEQGLLRTDPVPEEGEDVAATISATETLSEEEQEELRRELAKVEEEIQTLSQVLAAKEKHLAEIKRKLGINSLQELKQNIAKGWQDVTATSAYKKTSETLSQAGQKASAAFSSVGSVITKKLEDVKNSPTFKSFEEKVENLKAIGGTKPAGGDFGEVLNSAANASATTTEPLPEKTQESL

SEQ ID NO: 5825 - DNA, 4187 bp, Homo sapiens
ggttgggtgacgccccaggaaagcgctccaggccgagggcgggcggcgccgccgcgcccgacgcctctgggggtggggacttcgcgggagtcgccggcggaggcgaggaggagctctgcgcggcgcggcgggcgatccgagccgggacgggctgcaggcgggggtgctgcagaggacacgaggcggcgggctggagacatggaccgcggcgagcaaggtctgctgagaacagacccagtccctgaggaaggagaagatgttgctgccacgatcagtgccacagagaccctctcggaagaggagcaggaagagctaagaagagaacttgcaaaggtagaagaagaaatccagactctgtctcaagtgttagcagcaaaagagaagcatctagcagagatcaagcggaaacttggaatcaattctctacaggaactaaaacagaacattgccaaagggtggcaagacgtgacagcaacatctgcttacaagaagacatctgaaaccttatcccaggctggacagaaggcctcagctgctttttcgtctgttggctcagtcatcaccaaaaagctggaagatgtaaaattgcaagccttttcacattcctttagtatacgttccattcagcattcaattagcatgcctgctatgagaaactccccaacttttaaatcatttgaagaaaaggtcgaaaacttaaaggcaatagggggaaccaagcctgctggtggtgattttggagaagtcttgaattcggctgcaaatgctagtgccaccaccacggagcctcttccagaaaagacacaggagagcctgtgagattcctacctttgttctgctacccactgccagatgctgcaagcgaggtccaagcacatcttgtcaacatgcattgccatgaatttctaccagatgtgcttttatttagctttacatattcctttgaccaaatagtttgtgggttaaacaaaatgaaaatatcttcacctctattcttgggaaacaccctttagtgtacatttatgttcctttatttaggaaacaccattataaaaacacttatagtaaatggggacattcactataatgatctaagaagctacagattgtcatagttgttttcctgctttacaaaattgctccagatctggaatgccagtttgacctttgtcttctataatatttcctttttttcccctctttgaatctctgtatatttgattcttaactaaaattgttctcttaaatattctgaatcctggtaattaaaagtttgggtgtattttctttacctccaaggaaagaactactagctacaaaaaatattttggaataagcattgttttggtataaggtacatattttggttgaagacaccagactgaagtaaacagctgtgcatccaatttattatagttttgtaagtaacaatatgtaatcaaacttctaggtgacttgagagtggaacctcctatatcattatttagcaccgtttgtgacagtaaccatttcagtgtattgtttattataccacttatatcaacttatttttcaccaggttaaaattttaatttctacaaaataacattctgaatcaagcacactgtatgttcagtaggttgaactatgaacactgtcatcaatgttcagttcaaaagcctgaaagtttagatctagaagctggtaaaaatgacaatatcaatcacattaggggaaccattgttgtcttcacttaatccatttagcactatttaaaataagcacaccaagttatatgactaatataacttgaaaattttttatactgaggggttggtgataactcttgaggatgtaatgcattaataaaaatcaactcatcattttctacttgttttcaatgtgttggaaactgtaaaatgatactgtagaacctgtctcctactttgaaaactgaatgtcagggctgagtgaatcaaagtgtctagacatatttgcatagaggccaaggtattctattctaataactgcttactcaacactaccaccttttccttatactgtatatgattatggcctacaatgttgtatttgttatttattaaattgtgattgttttattattgtttatgccaaatgttaactgccaagcttggagtgacctaaagcattttttaaaagcatggctagatttacttcagtataaattatcttatgaaaaccaaattttaaaagccacaggtgttgattgttataaaataacatgctgccattcttgattgctagagtttttgttagtactttggatgcaattaaaactatgtgctatcacatgtgaaaagcttaataaattccatctatcagtagtataggtctcaatatttattatgagaccagtggtctggaaacagcttgttgtaccgaatcaactggagtctatgcttaaaaaaaaaaaatttttttttaaccatccttaaattattgcttaatggtatcatattaacatattctaaataagggctttaaggcacaggctgttgaagcattttctcagaggagtggatctgtagaagtctgtctttctatagaaatattgtgcttactcaagtgttaaattattttttctatgaactagtctacttcttaaaattcaaacatattcttttgatcacattgtttcttgagcatcctgccctgctactaacttttcaacaaggcaaaatggagtaaagtggcaatttctttagatgagtgaaataccctcaagtctcttttctgcccaaaaagggaaaagtgatagaaatgggggtggcaagtggggtgagtggatgaaggtgggtattgggggtggctgtgaaagaaaataatggagaatcacttttctagacatctacctatacttaatctaagaaacaaagtaatctactgtaaagtactctgccccttgaaagaagtattaaaaagagtgaggatggatttagaaaaaaacatgaatttagaaatattcaaaatggtttttgtggcagattcaatattatgaattcacagatatttaaagaatgagaaacatagtaattagtagaaatgccagaaacagttcctggttcctcttgtgtttgacactaagaaaatagcaagagtgtgaaatctcagatacttatgaaatctcacagatgtaaggactcaagtgtagaagaaaatatccccttcttacaaaaagaaatgtcaatttatggagtttgtgggaaatagggcaagaattcttatgcttatgagagccaagtagtcagtggaagagagtagagctcaaaactggattatcaccttagcaacttagaatagtttgaaatagaaaaaaagtatttaatttggatctggatctgttaagatatgcacagtctattttttgtatagtattggaaaataaaaatgctataatttgggtatgggttcttttgtatacattacctgcccattgaggaaaggggcaagtccattatgcaacttctctccaaacccttcatattctggatatgatacttaaagagccatgagcagctacattctgcctatcagaaggcatttattaaatgactgcttgctgaagatgtgtccaaagagatcctacattaaggtcatttgtcagaatgatgtttgtgtttgtttagagttggctgacctccaactcctggggtcaaggaatcctactgccttagcttcccaaatagctaggactataggcatgcacccggccatgtgttttatttatagctcttaaagcccagatgaagaaatcacatttttgcccatagtgaagaaacatttggccattgattagtccttattttcagtgactgtcctgttttcattagattagagagaccctgtgtgggccacagttaatataaaccattatcacttttaagtaaacctgcacatcttagatttcataatttccttattgttctgactcaaaatgaactaagagcttttcactttttgtttgtaagttctcagagagtcgggtctgcaagtgcttttgcctgccaggattttgtactcaaataaatgctatttggcaactaaaattcttgccagctctcatgtaattttgatgttactgaggttggttggtagtttattttattaattttgtggttcttctatcatatagaaaaagccaaatacagttttgtttgaatatttgt

SEQ ID NO: 5826 - protein, 206 aa, Homo sapiens
MDRGEQGLLRTDPVPEEGEDVAATISATETLSEEEQEELRRELAKVEEEIQTLSQVLAAKEKHLAEIKRKLGINSLQELKQNIAKGWQDVTATSAYKKTSETLSQAGQKASAAFSSVGSVITKKLEDVKLQAFSHSFSIRSIQHSISMPAMRNSPTFKSFEEKVENLKAIGGTKPAGGDFGEVLNSAANASATTTEPLPEKTQESL

SEQ ID NO: 5827 - DNA, 2456 bp, Homo sapiens
aatgttatgcaagtgtagagacagacagttcactaggtactttaaaataatagaccttacaaagttttctagacagacttcctgtgaagaacaaggagcagggggaaaggggaaggggtagaatttaccaatctgaatatttcagcaagggagaatgcatgagttttactataaaaccacactgaacattgcaacaatactaaattccatacatatataataatcactgagctataaggttgctgatgtatttgttcttgaaagtgaattagagttactttatgcagaatcagctagttttatgtttcataatgtctttcccttttttgaacttttttttaagtctaaagtagggggaaccaagcctgctggtggtgattttggagaagtcttgaattcggctgcaaatgctagtgccaccaccacggagcctcttccagaaaagacacaggagagcctgtgagattcctacctttgttctgctacccactgccagatgctgcaagcgaggtccaagcacatcttgtcaacatgcattgccatgaatttctaccagatgtgcttttatttagctttacatattcttatgaaaaccaaattttaaaagccacaggtgttgattgttataaaataacatgctgccattcttgattgctagagtttttgttagtactttggatgcaattaaaactatgtgctatcacatgtgaaaagcttaataaattccatctatcagtagtataggtctcaatatttattatgagaccagtggtctggaaacagcttgttgtaccgaatcaactggagtctatgcttaaaaaaaaaaaatttttttttaaccatccttaaattattgcttaatggtatcatattaacatattctaaataagggctttaaggcacaggctgttgaagcattttctcagaggagtggatctgtagaagtctgtctttctatagaaatattgtgcttactcaagtgttaaattattttttctatgaactagtctacttcttaaaattcaaacatattcttttgatcacattgtttcttgagcatcctgccctgctactaacttttcaacaaggcaaaatggagtaaagtggcaatttctttagatgagtgaaataccctcaagtctcttttctgcccaaaaagggaaaagtgatagaaatgggggtggcaagtggggtgagtggatgaaggtgggtattgggggtggctgtgaaagaaaataatggagaatcacttttctagacatctacctatacttaatctaagaaacaaagtaatctactgtaaagtactctgccccttgaaagaagtattaaaaagagtgaggatggatttagaaaaaaacatgaatttagaaatattcaaaatggtttttgtggcagattcaatattatgaattcacagatatttaaagaatgagaaacatagtaattagtagaaatgccagaaacagttcctggttcctcttgtgtttgacactaagaaaatagcaagagtgtgaaatctcagatacttatgaaatctcacagatgtaaggactcaagtgtagaagaaaatatccccttcttacaaaaagaaatgtcaatttatggagtttgtgggaaatagggcaagaattcttatgcttatgagagccaagtagtcagtggaagagagtagagctcaaaactggattatcaccttagcaacttagaatagtttgaaatagaaaaaaagtatttaatttggatctggatctgttaagatatgcacagtctattttttgtatagtattggaaaataaaaatgctataatttgggtatgggttcttttgtatacattacctgcccattgaggaaaggggcaagtccattatgcaacttctctccaaacccttcatattctggatatgatacttaaagagccatgagcagctacattctgcctatcagaaggcatttattaaatgactgcttgctgaagatgtgtccaaagagatcctacattaaggtcatttgtcagaatgatgtttgtgtttgtttagagttggctgacctccaactcctggggtcaaggaatcctactgccttagcttcccaaatagctaggactataggcatgcacccggccatgtgttttatttatagctcttaaagcccagatgaagaaatcacatttttgcccatagtgaagaaacatttggccattgattagtccttattttcagtgactgtcctgttttcattagattagagagaccctgtgtgggccacagttaatataaaccattatcacttttaagtaaacctgcacatcttagatttcataatttccttattgttctgactcaaaatgaactaagagcttttcactttttgtttgtaagttctcagagagtcgggtctgcaagtgcttttgcctgccaggattttgtactcaaataaatgctatttggcaact

SEQ ID NO: 5828 - protein, 39 aa, Homo sapiens; identical to SEQ ID NO: 5804

SEQ ID NO: 5829 - DNA, 3653 bp, Homo sapiens
attacttatgtctgagactggccctgttcatggaatcaaatgcatactcttaaaatattagatcagaaattgagaatcttacattataaatacttgtatgtacctgcacatatatggtacagattatatctgttcttttgccgattgagaataatgttgaagaggaatcaattatattttcaaactagttggattttttttcagtatttgtatttactatttgtttttcttttctctccatagaaactccccaacttttaaatcatttgaagaaaaggtcgaaaacttaaaggcaatagggggaaccaagcctgctggtggtgattttggagaagtcttgaattcggctgcaaatgctagtgccaccaccacggagcctcttccagaaaagacacaggagagcctgtgagattcctacctttgttctgctacccactgccagatgctgcaagcgaggtccaagcacatcttgtcaacatgcattgccatgaatttctaccagatgtgcttttatttagctttacatattcctttgaccaaatagtttgtgggttaaacaaaatgaaaatatcttcacctctattcttgggaaacaccctttagtgtacatttatgttcctttatttaggaaacaccattataaaaacacttatagtaaatggggacattcactataatgatctaagaagctacagattgtcatagttgttttcctgctttacaaaattgctccagatctggaatgccagtttgacctttgtcttctataatatttcctttttttcccctctttgaatctctgtatatttgattcttaactaaaattgttctcttaaatattctgaatcctggtaattaaaagtttgggtgtattttctttacctccaaggaaagaactactagctacaaaaaatattttggaataagcattgttttggtataaggtacatattttggttgaagacaccagactgaagtaaacagctgtgcatccaatttattatagttttgtaagtaacaatatgtaatcaaacttctaggtgacttgagagtggaacctcctatatcattatttagcaccgtttgtgacagtaaccatttcagtgtattgtttattataccacttatatcaacttatttttcaccaggttaaaattttaatttctacaaaataacattctgaatcaagcacactgtatgttcagtaggttgaactatgaacactgtcatcaatgttcagttcaaaagcctgaaagtttagatctagaagctggtaaaaatgacaatatcaatcacattaggggaaccattgttgtcttcacttaatccatttagcactatttaaaataagcacaccaagttatatgactaatataacttgaaaattttttatactgaggggttggtgataactcttgaggatgtaatgcattaataaaaatcaactcatcattttctacttgttttcaatgtgttggaaactgtaaaatgatactgtagaacctgtctcctactttgaaaactgaatgtcagggctgagtgaatcaaagtgtctagacatatttgcatagaggccaaggtattctattctaataactgcttactcaacactaccaccttttccttatactgtatatgattatggcctacaatgttgtatttgttatttattaaattgtgattgttttattattgtttatgccaaatgttaactgccaagcttggagtgacctaaagcattttttaaaagcatggctagatttacttcagtataaattatcttatgaaaaccaaattttaaaagccacaggtgttgattgttataaaataacatgctgccattcttgattgctagagtttttgttagtactttggatgcaattaaaactatgtgctatcacatgtgaaaagcttaataaattccatctatcagtagtataggtctcaatatttattatgagaccagtggtctggaaacagcttgttgtaccgaatcaactggagtctatgcttaaaaaaaaaaaatttttttttaaccatccttaaattattgcttaatggtatcatattaacatattctaaataagggctttaaggcacaggctgttgaagcattttctcagaggagtggatctgtagaagtctgtctttctatagaaatattgtgcttactcaagtgttaaattattttttctatgaactagtctacttcttaaaattcaaacatattcttttgatcacattgtttcttgagcatcctgccctgctactaacttttcaacaaggcaaaatggagtaaagtggcaatttctttagatgagtgaaataccctcaagtctcttttctgcccaaaaagggaaaagtgatagaaatgggggtggcaagtggggtgagtggatgaaggtgggtattgggggtggctgtgaaagaaaataatggagaatcacttttctagacatctacctatacttaatctaagaaacaaagtaatctactgtaaagtactctgccccttgaaagaagtattaaaaagagtgaggatggatttagaaaaaaacatgaatttagaaatattcaaaatggtttttgtggcagattcaatattatgaattcacagatatttaaagaatgagaaacatagtaattagtagaaatgccagaaacagttcctggttcctcttgtgtttgacactaagaaaatagcaagagtgtgaaatctcagatacttatgaaatctcacagatgtaaggactcaagtgtagaagaaaatatccccttcttacaaaaagaaatgtcaatttatggagtttgtgggaaatagggcaagaattcttatgcttatgagagccaagtagtcagtggaagagagtagagctcaaaactggattatcaccttagcaacttagaatagtttgaaatagaaaaaaagtatttaatttggatctggatctgttaagatatgcacagtctattttttgtatagtattggaaaataaaaatgctataatttgggtatgggttcttttgtatacattacctgcccattgaggaaaggggcaagtccattatgcaacttctctccaaacccttcatattctggatatgatacttaaagagccatgagcagctacattctgcctatcagaaggcatttattaaatgactgcttgctgaagatgtgtccaaagagatcctacattaaggtcatttgtcagaatgatgtttgtgtttgtttagagttggctgacctccaactcctggggtcaaggaatcctactgccttagcttcccaaatagctaggactataggcatgcacccggccatgtgttttatttatagctcttaaagcccagatgaagaaatcacatttttgcccatagtgaagaaacatttggccattgattagtccttattttcagtgactgtcctgttttcattagattagagagaccctgtgtgggccacagttaatataaaccattatcacttttaagtaaacctgcacatcttagatttcataatttccttattgttctgactcaaaatgaactaagagcttttcactttttgtttgtaagttctcagagagtcgggtctgcaagtgcttttgcctgccaggattttgtactcaaataaatgctatttggcaact

SEQ ID NO: 5830 - protein, 75 aa, Homo sapiens [sequence omitted]

SEQ ID NO: 5831 - DNA, 3587 bp, Homo sapiens
actccttcaaaccagtacctggaaggctcatctaaggtcttctaggcctagcattctaacatcaaatgatcatctgatgatcatttaaggttgttgaaaaattctggttgtgaacttctttgtctttttagttcttcatgatcatgcaggattgcaagccttttcacattcctttagaaactccccaacttttaaatcatttgaagaaaaggtcgaaaacttaaaggcaatagggggaaccaagcctgctggtggtgattttggagaagtcttgaattcggctgcaaatgctagtgccaccaccacggagcctcttccagaaaagacacaggagagcctgtgagattcctacctttgttctgctacccactgccagatgctgcaagcgaggtccaagcacatcttgtcaacatgcattgccatgaatttctaccagatgtgcttttatttagctttacatattcctttgaccaaatagtttgtgggttaaacaaaatgaaaatatcttcacctctattcttgggaaacaccctttagtgtacatttatgttcctttatttaggaaacaccattataaaaacacttatagtaaatggggacattcactataatgatctaagaagctacagattgtcatagttgttttcctgctttacaaaattgctccagatctggaatgccagtttgacctttgtcttctataatatttcctttttttcccctctttgaatctctgtatatttgattcttaactaaaattgttctcttaaatattctgaatcctggtaattaaaagtttgggtgtattttctttacctccaaggaaagaactactagctacaaaaaatattttggaataagcattgttttggtataaggtacatattttggttgaagacaccagactgaagtaaacagctgtgcatccaatttattatagttttgtaagtaacaatatgtaatcaaacttctaggtgacttgagagtggaacctcctatatcattatttagcaccgtttgtgacagtaaccatttcagtgtattgtttattataccacttatatcaacttatttttcaccaggttaaaattttaatttctacaaaataacattctgaatcaagcacactgtatgttcagtaggttgaactatgaacactgtcatcaatgttcagttcaaaagcctgaaagtttagatctagaagctggtaaaaatgacaatatcaatcacattaggggaaccattgttgtcttcacttaatccatttagcactatttaaaataagcacaccaagttatatgactaatataacttgaaaattttttatactgaggggttggtgataactcttgaggatgtaatgcattaataaaaatcaactcatcattttctacttgttttcaatgtgttggaaactgtaaaatgatactgtagaacctgtctcctactttgaaaactgaatgtcagggctgagtgaatcaaagtgtctagacatatttgcatagaggccaaggtattctattctaataactgcttactcaacactaccaccttttccttatactgtatatgattatggcctacaatgttgtatttgttatttattaaattgtgattgttttattattgtttatgccaaatgttaactgccaagcttggagtgacctaaagcattttttaaaagcatggctagatttacttcagtataaattatcttatgaaaaccaaattttaaaagccacaggtgttgattgttataaaataacatgctgccattcttgattgctagagtttttgttagtactttggatgcaattaaaactatgtgctatcacatgtgaaaagcttaataaattccatctatcagtagtataggtctcaatatttattatgagaccagtggtctggaaacagcttgttgtaccgaatcaactggagtctatgcttaaaaaaaaaaaatttttttttaaccatccttaaattattgcttaatggtatcatattaacatattctaaataagggctttaaggcacaggctgttgaagcattttctcagaggagtggatctgtagaagtctgtctttctatagaaatattgtgcttactcaagtgttaaattattttttctatgaactagtctacttcttaaaattcaaacatattcttttgatcacattgtttcttgagcatcctgccctgctactaacttttcaacaaggcaaaatggagtaaagtggcaatttctttagatgagtgaaataccctcaagtctcttttctgcccaaaaagggaaaagtgatagaaatgggggtggcaagtggggtgagtggatgaaggtgggtattgggggtggctgtgaaagaaaataatggagaatcacttttctagacatctacctatacttaatctaagaaacaaagtaatctactgtaaagtactctgccccttgaaagaagtattaaaaagagtgaggatggatttagaaaaaaacatgaatttagaaatattcaaaatggtttttgtggcagattcaatattatgaattcacagatatttaaagaatgagaaacatagtaattagtagaaatgccagaaacagttcctggttcctcttgtgtttgacactaagaaaatagcaagagtgtgaaatctcagatacttatgaaatctcacagatgtaaggactcaagtgtagaagaaaatatccccttcttacaaaaagaaatgtcaatttatggagtttgtgggaaatagggcaagaattcttatgcttatgagagccaagtagtcagtggaagagagtagagctcaaaactggattatcaccttagcaacttagaatagtttgaaatagaaaaaaagtatttaatttggatctggatctgttaagatatgcacagtctattttttgtatagtattggaaaataaaaatgctataatttgggtatgggttcttttgtatacattacctgcccattgaggaaaggggcaagtccattatgcaacttctctccaaacccttcatattctggatatgatacttaaagagccatgagcagctacattctgcctatcagaaggcatttattaaatgactgcttgctgaagatgtgtccaaagagatcctacattaaggtcatttgtcagaatgatgtttgtgtttgtttagagttggctgacctccaactcctggggtcaaggaatcctactgccttagcttcccaaatagctaggactataggcatgcacccggccatgtgttttatttatagctcttaaagcccagatgaagaaatcacatttttgcccatagtgaagaaacatttggccattgattagtccttattttcagtgactgtcctgttttcattagattagagagaccctgtgtgggccacagttaatataaaccattatcacttttaagtaaacctgcacatcttagatttcataatttccttattgttctgactcaaaatgaactaagagcttttcactttttgtttgtaagttctcagagagtcgggtctgcaagtgcttttgcctgccaggattttgtactcaaataaatgctatttggcaact

SEQ ID NO: 5832 - protein, 75 aa, Homo sapiens [sequence omitted]

SEQ ID NO: 5833 - DNA, 3575 bp, Homo sapiens
agagtgagggagggcactccttcaaaccagtacctggaaggctcatctaaggtcttctaggcctagcattctaacatcaaatgatcatctgatgatcatttaaggttgttgaaaaattctggttgtgaacttctttgtctttttagttcttcatgatcatgcaggaaactccccaacttttaaatcatttgaagaaaaggtcgaaaacttaaaggcaatagggggaaccaagcctgctggtggtgattttggagaagtcttgaattcggctgcaaatgctagtgccaccaccacggagcctcttccagaaaagacacaggagagcctgtgagattcctacctttgttctgctacccactgccagatgctgcaagcgaggtccaagcacatcttgtcaacatgcattgccatgaatttctaccagatgtgcttttatttagctttacatattcctttgaccaaatagtttgtgggttaaacaaaatgaaaatatcttcacctctattcttgggaaacaccctttagtgtacatttatgttcctttatttaggaaacaccattataaaaacacttatagtaaatggggacattcactataatgatctaagaagctacagattgtcatagttgttttcctgctttacaaaattgctccagatctggaatgccagtttgacctttgtcttctataatatttcctttttttcccctctttgaatctctgtatatttgattcttaactaaaattgttctcttaaatattctgaatcctggtaattaaaagtttgggtgtattttctttacctccaaggaaagaactactagctacaaaaaatattttggaataagcattgttttggtataaggtacatattttggttgaagacaccagactgaagtaaacagctgtgcatccaatttattatagttttgtaagtaacaatatgtaatcaaacttctaggtgacttgagagtggaacctcctatatcattatttagcaccgtttgtgacagtaaccatttcagtgtattgtttattataccacttatatcaacttatttttcaccaggttaaaattttaatttctacaaaataacattctgaatcaagcacactgtatgttcagtaggttgaactatgaacactgtcatcaatgttcagttcaaaagcctgaaagtttagatctagaagctggtaaaaatgacaatatcaatcacattaggggaaccattgttgtcttcacttaatccatttagcactatttaaaataagcacaccaagttatatgactaatataacttgaaaattttttatactgaggggttggtgataactcttgaggatgtaatgcattaataaaaatcaactcatcattttctacttgttttcaatgtgttggaaactgtaaaatgatactgtagaacctgtctcctactttgaaaactgaatgtcagggctgagtgaatcaaagtgtctagacatatttgcatagaggccaaggtattctattctaataactgcttactcaacactaccaccttttccttatactgtatatgattatggcctacaatgttgtatttgttatttattaaattgtgattgttttattattgtttatgccaaatgttaactgccaagcttggagtgacctaaagcattttttaaaagcatggctagatttacttcagtataaattatcttatgaaaaccaaattttaaaagccacaggtgttgattgttataaaataacatgctgccattcttgattgctagagtttttgttagtactttggatgcaattaaaactatgtgctatcacatgtgaaaagcttaataaattccatctatcagtagtataggtctcaatatttattatgagaccagtggtctggaaacagcttgttgtaccgaatcaactggagtctatgcttaaaaaaaaaaaatttttttttaaccatccttaaattattgcttaatggtatcatattaacatattctaaataagggctttaaggcacaggctgttgaagcattttctcagaggagtggatctgtagaagtctgtctttctatagaaatattgtgcttactcaagtgttaaattattttttctatgaactagtctacttcttaaaattcaaacatattcttttgatcacattgtttcttgagcatcctgccctgctactaacttttcaacaaggcaaaatggagtaaagtggcaatttctttagatgagtgaaataccctcaagtctcttttctgcccaaaaagggaaaagtgatagaaatgggggtggcaagtggggtgagtggatgaaggtgggtattgggggtggctgtgaaagaaaataatggagaatcacttttctagacatctacctatacttaatctaagaaacaaagtaatctactgtaaagtactctgccccttgaaagaagtattaaaaagagtgaggatggatttagaaaaaaacatgaatttagaaatattcaaaatggtttttgtggcagattcaatattatgaattcacagatatttaaagaatgagaaacatagtaattagtagaaatgccagaaacagttcctggttcctcttgtgtttgacactaagaaaatagcaagagtgtgaaatctcagatacttatgaaatctcacagatgtaaggactcaagtgtagaagaaaatatccccttcttacaaaaagaaatgtcaatttatggagtttgtgggaaatagggcaagaattcttatgcttatgagagccaagtagtcagtggaagagagtagagctcaaaactggattatcaccttagcaacttagaatagtttgaaatagaaaaaaagtatttaatttggatctggatctgttaagatatgcacagtctattttttgtatagtattggaaaataaaaatgctataatttgggtatgggttcttttgtatacattacctgcccattgaggaaaggggcaagtccattatgcaacttctctccaaacccttcatattctggatatgatacttaaagagccatgagcagctacattctgcctatcagaaggcatttattaaatgactgcttgctgaagatgtgtccaaagagatcctacattaaggtcatttgtcagaatgatgtttgtgtttgtttagagttggctgacctccaactcctggggtcaaggaatcctactgccttagcttcccaaatagctaggactataggcatgcacccggccatgtgttttatttatagctcttaaagcccagatgaagaaatcacatttttgcccatagtgaagaaacatttggccattgattagtccttattttcagtgactgtcctgttttcattagattagagagaccctgtgtgggccacagttaatataaaccattatcacttttaagtaaacctgcacatcttagatttcataatttccttattgttctgactcaaaatgaactaagagcttttcactttttgtttgtaagttctcagagagtcgggtctgcaagtgcttttgcctgccaggattttgtactcaaataaatgctatttggcaact

SEQ ID NO: 5834 - protein, 75 aa, Homo sapiens [sequence omitted]

SEQ ID NO: 5835 - DNA, 3743 bp, Homo sapiens
ctttctggctggactagggcactgcagaagattgtgcctgagcttagggttgagcatacgaagatgtggtgatgccgctctgctggttatgaaggattttagaagttctgaaaaatgttttctctttttgagagttctccagcaggtggtgaccactgcacttgaaacaattgatattagaaaagatgagctgacccttcttttgctctgtgtgtttataatttaatatagttacaagaagacatctgaaaccttatcccaggctggacagaaggcctcagctgctttttcgtctgttggctcagtcatcaccaaaaagctggaagatgtaaaaaactccccaacttttaaatcatttgaagaaaaggtcgaaaacttaaaggcaatagggggaaccaagcctgctggtggtgattttggagaagtcttgaattcggctgcaaatgctagtgccaccaccacggagcctcttccagaaaagacacaggagagcctgtgagattcctacctttgttctgctacccactgccagatgctgcaagcgaggtccaagcacatcttgtcaacatgcattgccatgaatttctaccagatgtgcttttatttagctttacatattcctttgaccaaatagtttgtgggttaaacaaaatgaaaatatcttcacctctattcttgggaaacaccctttagtgtacatttatgttcctttatttaggaaacaccattataaaaacacttatagtaaatggggacattcactataatgatctaagaagctacagattgtcatagttgttttcctgctttacaaaattgctccagatctggaatgccagtttgacctttgtcttctataatatttcctttttttcccctctttgaatctctgtatatttgattcttaactaaaattgttctcttaaatattctgaatcctggtaattaaaagtttgggtgtattttctttacctccaaggaaagaactactagctacaaaaaatattttggaataagcattgttttggtataaggtacatattttggttgaagacaccagactgaagtaaacagctgtgcatccaatttattatagttttgtaagtaacaatatgtaatcaaacttctaggtgacttgagagtggaacctcctatatcattatttagcaccgtttgtgacagtaaccatttcagtgtattgtttattataccacttatatcaacttatttttcaccaggttaaaattttaatttctacaaaataacattctgaatcaagcacactgtatgttcagtaggttgaactatgaacactgtcatcaatgttcagttcaaaagcctgaaagtttagatctagaagctggtaaaaatgacaatatcaatcacattaggggaaccattgttgtcttcacttaatccatttagcactatttaaaataagcacaccaagttatatgactaatataacttgaaaattttttatactgaggggttggtgataactcttgaggatgtaatgcattaataaaaatcaactcatcattttctacttgttttcaatgtgttggaaactgtaaaatgatactgtagaacctgtctcctactttgaaaactgaatgtcagggctgagtgaatcaaagtgtctagacatatttgcatagaggccaaggtattctattctaataactgcttactcaacactaccaccttttccttatactgtatatgattatggcctacaatgttgtatttgttatttattaaattgtgattgttttattattgtttatgccaaatgttaactgccaagcttggagtgacctaaagcattttttaaaagcatggctagatttacttcagtataaattatcttatgaaaaccaaattttaaaagccacaggtgttgattgttataaaataacatgctgccattcttgattgctagagtttttgttagtactttggatgcaattaaaactatgtgctatcacatgtgaaaagcttaataaattccatctatcagtagtataggtctcaatatttattatgagaccagtggtctggaaacagcttgttgtaccgaatcaactggagtctatgcttaaaaaaaaaaaatttttttttaaccatccttaaattattgcttaatggtatcatattaacatattctaaataagggctttaaggcacaggctgttgaagcattttctcagaggagtggatctgtagaagtctgtctttctatagaaatattgtgcttactcaagtgttaaattattttttctatgaactagtctacttcttaaaattcaaacatattcttttgatcacattgtttcttgagcatcctgccctgctactaacttttcaacaaggcaaaatggagtaaagtggcaatttctttagatgagtgaaataccctcaagtctcttttctgcccaaaaagggaaaagtgatagaaatgggggtggcaagtggggtgagtggatgaaggtgggtattgggggtggctgtgaaagaaaataatggagaatcacttttctagacatctacctatacttaatctaagaaacaaagtaatctactgtaaagtactctgccccttgaaagaagtattaaaaagagtgaggatggatttagaaaaaaacatgaatttagaaatattcaaaatggtttttgtggcagattcaatattatgaattcacagatatttaaagaatgagaaacatagtaattagtagaaatgccagaaacagttcctggttcctcttgtgtttgacactaagaaaatagcaagagtgtgaaatctcagatacttatgaaatctcacagatgtaaggactcaagtgtagaagaaaatatccccttcttacaaaaagaaatgtcaatttatggagtttgtgggaaatagggcaagaattcttatgcttatgagagccaagtagtcagtggaagagagtagagctcaaaactggattatcaccttagcaacttagaatagtttgaaatagaaaaaaagtatttaatttggatctggatctgttaagatatgcacagtctattttttgtatagtattggaaaataaaaatgctataatttgggtatgggttcttttgtatacattacctgcccattgaggaaaggggcaagtccattatgcaacttctctccaaacccttcatattctggatatgatacttaaagagccatgagcagctacattctgcctatcagaaggcatttattaaatgactgcttgctgaagatgtgtccaaagagatcctacattaaggtcatttgtcagaatgatgtttgtgtttgtttagagttggctgacctccaactcctggggtcaaggaatcctactgccttagcttcccaaatagctaggactataggcatgcacccggccatgtgttttatttatagctcttaaagcccagatgaagaaatcacatttttgcccatagtgaagaaacatttggccattgattagtccttattttcagtgactgtcctgttttcattagattagagagaccctgtgtgggccacagttaatataaaccattatcacttttaagtaaacctgcacatcttagatttcataatttccttattgttctgactcaaaatgaactaagagcttttcactttttgtttgtaagttctcagagagtcgggtctgcaagtgcttttgcctgccaggattttgtactcaaataaatgctatttggcaact

SEQ ID NO: 5836 - protein, 75 aa, Homo sapiens [sequence omitted]

SEQ ID NO: 5837 - DNA, 3841 bp, Homo sapiens
ggagcttaaatagggattttacttagattttgcactttaaaaaatggtttaaatccccaaccaggtctgctgagaacagacccagtccctgaggaaggagaagatgttgctgccacgatcagtgccacagagaccctctcggaagaggagcaggaagagctaagaagagaacttgcaaaggtagaagaagaaatccagactctgtctcaagtgttagcagcaaaagagaagcatctagcagagatcaagcggaaacttggaatcaattctctacaggaactaaaacagaacattgccaaagggtggcaagacgtgacagcaacatctgcttacaagaagacatctgaaaccttatcccaggctggacagaaggcctcagctgctttttcgtctgttggctcagtcatcaccaaaaagctggaagatgtaaaaaactccccaacttttaaatcatttgaagaaaaggtcgaaaacttaaaggcaatagggggaaccaagcctgctggtggtgattttggagaagtcttgaattcggctgcaaatgctagtgccaccaccacggagcctcttccagaaaagacacaggagagcctgtgagattcctacctttgttctgctacccactgccagatgctgcaagcgaggtccaagcacatcttgtcaacatgcattgccatgaatttctaccagatgtgcttttatttagctttacatattcctttgaccaaatagtttgtgggttaaacaaaatgaaaatatcttcacctctattcttgggaaacaccctttagtgtacatttatgttcctttatttaggaaacaccattataaaaacacttatagtaaatggggacattcactataatgatctaagaagctacagattgtcatagttgttttcctgctttacaaaattgctccagatctggaatgccagtttgacctttgtcttctataatatttcctttttttcccctctttgaatctctgtatatttgattcttaactaaaattgttctcttaaatattctgaatcctggtaattaaaagtttgggtgtattttctttacctccaaggaaagaactactagctacaaaaaatattttggaataagcattgttttggtataaggtacatattttggttgaagacaccagactgaagtaaacagctgtgcatccaatttattatagttttgtaagtaacaatatgtaatcaaacttctaggtgacttgagagtggaacctcctatatcattatttagcaccgtttgtgacagtaaccatttcagtgtattgtttattataccacttatatcaacttatttttcaccaggttaaaattttaatttctacaaaataacattctgaatcaagcacactgtatgttcagtaggttgaactatgaacactgtcatcaatgttcagttcaaaagcctgaaagtttagatctagaagctggtaaaaatgacaatatcaatcacattaggggaaccattgttgtcttcacttaatccatttagcactatttaaaataagcacaccaagttatatgactaatataacttgaaaattttttatactgaggggttggtgataactcttgaggatgtaatgcattaataaaaatcaactcatcattttctacttgttttcaatgtgttggaaactgtaaaatgatactgtagaacctgtctcctactttgaaaactgaatgtcagggctgagtgaatcaaagtgtctagacatatttgcatagaggccaaggtattctattctaataactgcttactcaacactaccaccttttccttatactgtatatgattatggcctacaatgttgtatttgttatttattaaattgtgattgttttattattgtttatgccaaatgttaactgccaagcttggagtgacctaaagcattttttaaaagcatggctagatttacttcagtataaattatcttatgaaaaccaaattttaaaagccacaggtgttgattgttataaaataacatgctgccattcttgattgctagagtttttgttagtactttggatgcaattaaaactatgtgctatcacatgtgaaaagcttaataaattccatctatcagtagtataggtctcaatatttattatgagaccagtggtctggaaacagcttgttgtaccgaatcaactggagtctatgcttaaaaaaaaaaaatttttttttaaccatccttaaattattgcttaatggtatcatattaacatattctaaataagggctttaaggcacaggctgttgaagcattttctcagaggagtggatctgtagaagtctgtctttctatagaaatattgtgcttactcaagtgttaaattattttttctatgaactagtctacttcttaaaattcaaacatattcttttgatcacattgtttcttgagcatcctgccctgctactaacttttcaacaaggcaaaatggagtaaagtggcaatttctttagatgagtgaaataccctcaagtctcttttctgcccaaaaagggaaaagtgatagaaatgggggtggcaagtggggtgagtggatgaaggtgggtattgggggtggctgtgaaagaaaataatggagaatcacttttctagacatctacctatacttaatctaagaaacaaagtaatctactgtaaagtactctgccccttgaaagaagtattaaaaagagtgaggatggatttagaaaaaaacatgaatttagaaatattcaaaatggtttttgtggcagattcaatattatgaattcacagatatttaaagaatgagaaacatagtaattagtagaaatgccagaaacagttcctggttcctcttgtgtttgacactaagaaaatagcaagagtgtgaaatctcagatacttatgaaatctcacagatgtaaggactcaagtgtagaagaaaatatccccttcttacaaaaagaaatgtcaatttatggagtttgtgggaaatagggcaagaattcttatgcttatgagagccaagtagtcagtggaagagagtagagctcaaaactggattatcaccttagcaacttagaatagtttgaaatagaaaaaaagtatttaatttggatctggatctgttaagatatgcacagtctattttttgtatagtattggaaaataaaaatgctataatttgggtatgggttcttttgtatacattacctgcccattgaggaaaggggcaagtccattatgcaacttctctccaaacccttcatattctggatatgatacttaaagagccatgagcagctacattctgcctatcagaaggcatttattaaatgactgcttgctgaagatgtgtccaaagagatcctacattaaggtcatttgtcagaatgatgtttgtgtttgtttagagttggctgacctccaactcctggggtcaaggaatcctactgccttagcttcccaaatagctaggactataggcatgcacccggccatgtgttttatttatagctcttaaagcccagatgaagaaatcacatttttgcccatagtgaagaaacatttggccattgattagtccttattttcagtgactgtcctgttttcattagattagagagaccctgtgtgggccacagttaatataaaccattatcacttttaagtaaacctgcacatcttagatttcataatttccttattgttctgactcaaaatgaactaagagcttttcactttttgtttgtaagttctcagagagtcgggtctgcaagtgcttttgcctgccaggattttgtactcaaataaatgctatttggcaact

SEQ ID NO: 5838 - protein, 75 aa, Homo sapiens [sequence omitted]

SEQ ID NO: 5839 - DNA, 4362 bp, Homo sapiens
agtgtctgatgtttgcctgaactgtttgtacctctgggccatattgcagaaccctgcccttctttgttgactgaggaaagctcgctccctgcccaggtttttcattgttgatcgaaattaacaccaggtggtgaatagagcccctcctaaggttgctcaggataaatcatttattaaataggtctgcttatcaggaggggcgtgaaggctcccaaaaggaaatgctggcacctgggcccagaagccagggcctctaactcctggggttgatttcttcagtgaagttgcaccctacaaagggaatatggccaaagcggcactcaactgaaggctgatatcaggcgattagacagccatgcattctgcgtttgtctggaatggattgtagagagatggacttatatgaggactaccagtccccgtttgattttgatgcaggagtgaacaaaagctatctctacttgtctcctagtggaaattcatctccacccggatcacctactcttcagaaatttggtctgctgagaacagacccagtccctgaggaaggagaagatgttgctgccacgatcagtgccacagagaccctctcggaagaggagcaggaagagctaagaagagaacttgcaaaggtagaagaagaaatccagactctgtctcaagtgttagcagcaaaagagaagcatctagcagagatcaagcggaaacttggaatcaattctctacaggaactaaaacagaacattgccaaagggtggcaagacgtgacagcaacatctgcttacaagaagacatctgaaaccttatcccaggctggacagaaggcctcagctgctttttcgtctgttggctcagtcatcaccaaaaagctggaagatgtaaaattgcaagccttttcacattcctttagtatacgttccattcagcattcaattagcatgcctgctatgagaaactccccaacttttaaatcatttgaagaaaaggtcgaaaacttaaaggcaatagggggaaccaagcctgctggtggtgattttggagaagtcttgaattcggctgcaaatgctagtgccaccaccacggagcctcttccagaaaagacacaggagagcctgtgagattcctacctttgttctgctacccactgccagatgctgcaagcgaggtccaagcacatcttgtcaacatgcattgccatgaatttctaccagatgtgcttttatttagctttacatattcctttgaccaaatagtttgtgggttaaacaaaatgaaaatatcttcacctctattcttgggaaacaccctttagtgtacatttatgttcctttatttaggaaacaccattataaaaacacttatagtaaatggggacattcactataatgatctaagaagctacagattgtcatagttgttttcctgctttacaaaattgctccagatctggaatgccagtttgacctttgtcttctataatatttcctttttttcccctctttgaatctctgtatatttgattcttaactaaaattgttctcttaaatattctgaatcctggtaattaaaagtttgggtgtattttctttacctccaaggaaagaactactagctacaaaaaatattttggaataagcattgttttggtataaggtacatattttggttgaagacaccagactgaagtaaacagctgtgcatccaatttattatagttttgtaagtaacaatatgtaatcaaacttctaggtgacttgagagtggaacctcctatatcattatttagcaccgtttgtgacagtaaccatttcagtgtattgtttattataccacttatatcaacttatttttcaccaggttaaaattttaatttctacaaaataacattctgaatcaagcacactgtatgttcagtaggttgaactatgaacactgtcatcaatgttcagttcaaaagcctgaaagtttagatctagaagctggtaaaaatgacaatatcaatcacattaggggaaccattgttgtcttcacttaatccatttagcactatttaaaataagcacaccaagttatatgactaatataacttgaaaattttttatactgaggggttggtgataactcttgaggatgtaatgcattaataaaaatcaactcatcattttctacttgttttcaatgtgttggaaactgtaaaatgatactgtagaacctgtctcctactttgaaaactgaatgtcagggctgagtgaatcaaagtgtctagacatatttgcatagaggccaaggtattctattctaataactgcttactcaacactaccaccttttccttatactgtatatgattatggcctacaatgttgtatttgttatttattaaattgtgattgttttattattgtttatgccaaatgttaactgccaagcttggagtgacctaaagcattttttaaaagcatggctagatttacttcagtataaattatcttatgaaaaccaaattttaaaagccacaggtgttgattgttataaaataacatgctgccattcttgattgctagagtttttgttagtactttggatgcaattaaaactatgtgctatcacatgtgaaaagcttaataaattccatctatcagtagtataggtctcaatatttattatgagaccagtggtctggaaacagcttgttgtaccgaatcaactggagtctatgcttaaaaaaaaaaaatttttttttaaccatccttaaattattgcttaatggtatcatattaacatattctaaataagggctttaaggcacaggctgttgaagcattttctcagaggagtggatctgtagaagtctgtctttctatagaaatattgtgcttactcaagtgttaaattattttttctatgaactagtctacttcttaaaattcaaacatattcttttgatcacattgtttcttgagcatcctgccctgctactaacttttcaacaaggcaaaatggagtaaagtggcaatttctttagatgagtgaaataccctcaagtctcttttctgcccaaaaagggaaaagtgatagaaatgggggtggcaagtggggtgagtggatgaaggtgggtattgggggtggctgtgaaagaaaataatggagaatcacttttctagacatctacctatacttaatctaagaaacaaagtaatctactgtaaagtactctgccccttgaaagaagtattaaaaagagtgaggatggatttagaaaaaaacatgaatttagaaatattcaaaatggtttttgtggcagattcaatattatgaattcacagatatttaaagaatgagaaacatagtaattagtagaaatgccagaaacagttcctggttcctcttgtgtttgacactaagaaaatagcaagagtgtgaaatctcagatacttatgaaatctcacagatgtaaggactcaagtgtagaagaaaatatccccttcttacaaaaagaaatgtcaatttatggagtttgtgggaaatagggcaagaattcttatgcttatgagagccaagtagtcagtggaagagagtagagctcaaaactggattatcaccttagcaacttagaatagtttgaaatagaaaaaaagtatttaatttggatctggatctgttaagatatgcacagtctattttttgtatagtattggaaaataaaaatgctataatttgggtatgggttcttttgtatacattacctgcccattgaggaaaggggcaagtccattatgcaacttctctccaaacccttcatattctggatatgatacttaaagagccatgagcagctacattctgcctatcagaaggcatttattaaatgactgcttgctgaagatgtgtccaaagagatcctacattaaggtcatttgtcagaatgatgtttgtgtttgtttagagttggctgacctccaactcctggggtcaaggaatcctactgccttagcttcccaaatagctaggactataggcatgcacccggccatgtgttttatttatagctcttaaagcccagatgaagaaatcacatttttgcccatagtgaagaaacatttggccattgattagtccttattttcagtgactgtcctgttttcattagattagagagaccctgtgtgggccacagttaatataaaccattatcacttttaagtaaacctgcacatcttagatttcataatttccttattgttctgactcaaaatgaactaagagcttttcactttttgtttgtaagttctcagagagtcgggtctgcaagtgcttttgcctgccaggattttgtactcaaataaatgctatttggcaact

SEQ ID NO: 5840 - protein, 246 aa, Homo sapiens; identical to SEQ ID NO: 5818

SEQ ID NO: 5841 - DNA, 4293 bp, Homo sapiens
agtgtctgatgtttgcctgaactgtttgtacctctgggccatattgcagaaccctgcccttctttgttgactgaggaaagctcgctccctgcccaggtttttcattgttgatcgaaattaacaccaggtggtgaatagagcccctcctaaggttgctcaggataaatcatttattaaataggtctgcttatcaggaggggcgtgaaggctcccaaaaggaaatgctggcacctgggcccagaagccagggcctctaactcctggggttgatttcttcagtgaagttgcaccctacaaagggaatatggccaaagcggcactcaactgaaggctgatatcaggcgattagacagccatgcattctgcgtttgtctggaatggattgtagagagatggacttatatgaggactaccagtccccgtttgattttgatgcaggagtgaacaaaagctatctctacttgtctcctagtggaaattcatctccacccggatcacctactcttcagaaatttggtctgctgagaacagacccagtccctgaggaaggagaagatgttgctgccacgatcagtgccacagagaccctctcggaagaggagcaggaagagctaagaagagaacttgcaaaggtagaagaagaaatccagactctgtctcaagtgttagcagcaaaagagaagcatctagcagagatcaagcggaaacttggaatcaattctctacaggaactaaaacagaacattgccaaagggtggcaagacgtgacagcaacatctgcttacaagaagacatctgaaaccttatcccaggctggacagaaggcctcagctgctttttcgtctgttggctcagtcatcaccaaaaagctggaagatgtaaaaaactccccaacttttaaatcatttgaagaaaaggtcgaaaacttaaaggcaatagggggaaccaagcctgctggtggtgattttggagaagtcttgaattcggctgcaaatgctagtgccaccaccacggagcctcttccagaaaagacacaggagagcctgtgagattcctacctttgttctgctacccactgccagatgctgcaagcgaggtccaagcacatcttgtcaacatgcattgccatgaatttctaccagatgtgcttttatttagctttacatattcctttgaccaaatagtttgtgggttaaacaaaatgaaaatatcttcacctctattcttgggaaacaccctttagtgtacatttatgttcctttatttaggaaacaccattataaaaacacttatagtaaatggggacattcactataatgatctaagaagctacagattgtcatagttgttttcctgctttacaaaattgctccagatctggaatgccagtttgacctttgtcttctataatatttcctttttttcccctctttgaatctctgtatatttgattcttaactaaaattgttctcttaaatattctgaatcctggtaattaaaagtttgggtgtattttctttacctccaaggaaagaactactagctacaaaaaatattttggaataagcattgttttggtataaggtacatattttggttgaagacaccagactgaagtaaacagctgtgcatccaatttattatagttttgtaagtaacaatatgtaatcaaacttctaggtgacttgagagtggaacctcctatatcattatttagcaccgtttgtgacagtaaccatttcagtgtattgtttattataccacttatatcaacttatttttcaccaggttaaaattttaatttctacaaaataacattctgaatcaagcacactgtatgttcagtaggttgaactatgaacactgtcatcaatgttcagttcaaaagcctgaaagtttagatctagaagctggtaaaaatgacaatatcaatcacattaggggaaccattgttgtcttcacttaatccatttagcactatttaaaataagcacaccaagttatatgactaatataacttgaaaattttttatactgaggggttggtgataactcttgaggatgtaatgcattaataaaaatcaactcatcattttctacttgttttcaatgtgttggaaactgtaaaatgatactgtagaacctgtctcctactttgaaaactgaatgtcagggctgagtgaatcaaagtgtctagacatatttgcatagaggccaaggtattctattctaataactgcttactcaacactaccaccttttccttatactgtatatgattatggcctacaatgttgtatttgttatttattaaattgtgattgttttattattgtttatgccaaatgttaactgccaagcttggagtgacctaaagcattttttaaaagcatggctagatttacttcagtataaattatcttatgaaaaccaaattttaaaagccacaggtgttgattgttataaaataacatgctgccattcttgattgctagagtttttgttagtactttggatgcaattaaaactatgtgctatcacatgtgaaaagcttaataaattccatctatcagtagtataggtctcaatatttattatgagaccagtggtctggaaacagcttgttgtaccgaatcaactggagtctatgcttaaaaaaaaaaaatttttttttaaccatccttaaattattgcttaatggtatcatattaacatattctaaataagggctttaaggcacaggctgttgaagcattttctcagaggagtggatctgtagaagtctgtctttctatagaaatattgtgcttactcaagtgttaaattattttttctatgaactagtctacttcttaaaattcaaacatattcttttgatcacattgtttcttgagcatcctgccctgctactaacttttcaacaaggcaaaatggagtaaagtggcaatttctttagatgagtgaaataccctcaagtctcttttctgcccaaaaagggaaaagtgatagaaatgggggtggcaagtggggtgagtggatgaaggtgggtattgggggtggctgtgaaagaaaataatggagaatcacttttctagacatctacctatacttaatctaagaaacaaagtaatctactgtaaagtactctgccccttgaaagaagtattaaaaagagtgaggatggatttagaaaaaaacatgaatttagaaatattcaaaatggtttttgtggcagattcaatattatgaattcacagatatttaaagaatgagaaacatagtaattagtagaaatgccagaaacagttcctggttcctcttgtgtttgacactaagaaaatagcaagagtgtgaaatctcagatacttatgaaatctcacagatgtaaggactcaagtgtagaagaaaatatccccttcttacaaaaagaaatgtcaatttatggagtttgtgggaaatagggcaagaattcttatgcttatgagagccaagtagtcagtggaagagagtagagctcaaaactggattatcaccttagcaacttagaatagtttgaaatagaaaaaaagtatttaatttggatctggatctgttaagatatgcacagtctattttttgtatagtattggaaaataaaaatgctataatttgggtatgggttcttttgtatacattacctgcccattgaggaaaggggcaagtccattatgcaacttctctccaaacccttcatattctggatatgatacttaaagagccatgagcagctacattctgcctatcagaaggcatttattaaatgactgcttgctgaagatgtgtccaaagagatcctacattaaggtcatttgtcagaatgatgtttgtgtttgtttagagttggctgacctccaactcctggggtcaaggaatcctactgccttagcttcccaaatagctaggactataggcatgcacccggccatgtgttttatttatagctcttaaagcccagatgaagaaatcacatttttgcccatagtgaagaaacatttggccattgattagtccttattttcagtgactgtcctgttttcattagattagagagaccctgtgtgggccacagttaatataaaccattatcacttttaagtaaacctgcacatcttagatttcataatttccttattgttctgactcaaaatgaactaagagcttttcactttttgtttgtaagttctcagagagtcgggtctgcaagtgcttttgcctgccaggattttgtactcaaataaatgctatttggcaact

SEQ ID NO: 5842 - protein, 223 aa, Homo sapiens; identical to SEQ ID NO: 5820

SEQ ID NO: 5843 - DNA, 4363 bp, Homo sapiens
agtgtctgatgtttgcctgaactgtttgtacctctgggccatattgcagaaccctgcccttctttgttgactgaggaaagctcgctccctgcccaggtttttcattgttgatcgaaattaacaccaggtggtgaatagagcccctcctaaggttgctcaggataaatcatttattaaataggtctgcttatcaggaggggcgtgaaggctcccaaaaggaaatgctggcacctgggcccagaagccagggcctctaactcctggggttgatttcttcagtgaagttgcaccctacaaagggaatatggccaaagcggcactcaactgaaggctgatatcaggcgattagacagccatgcattctgcgtttgtctggaatggattgtagagagatggacttatatgaggactaccagtccccgtttgattttgatgcaggagtgaacaaaagctatctctacttgtctcctagtggaaattcatctccacccggatcacctactcttcagaaatttggtctgctgagaacagacccagtccctgaggaaggagaagatgttgctgccacgatcagtgccacagagaccctctcggaagaggagcaggaagagctaagaagagaacttgcaaaggtagaagaagaaatccagactctgtctcaagtgttagcagcaaaagagaagcatctagcagagatcaagcggaaacttggaatcaattctctacaggaactaaaacagaacattgccaaagggtggcaagacgtgacagcaacatctgcgaggagcaagcttctagcagcagaaaccgaactgctctgtcttctgtattgagagccatctgcagagctgttacaagaagacatctgaaaccttatcccaggctggacagaaggcctcagctgctttttcgtctgttggctcagtcatcaccaaaaagctggaagatgtaaaaaactccccaacttttaaatcatttgaagaaaaggtcgaaaacttaaaggcaatagggggaaccaagcctgctggtggtgattttggagaagtcttgaattcggctgcaaatgctagtgccaccaccacggagcctcttccagaaaagacacaggagagcctgtgagattcctacctttgttctgctacccactgccagatgctgcaagcgaggtccaagcacatcttgtcaacatgcattgccatgaatttctaccagatgtgcttttatttagctttacatattcctttgaccaaatagtttgtgggttaaacaaaatgaaaatatcttcacctctattcttgggaaacaccctttagtgtacatttatgttcctttatttaggaaacaccattataaaaacacttatagtaaatggggacattcactataatgatctaagaagctacagattgtcatagttgttttcctgctttacaaaattgctccagatctggaatgccagtttgacctttgtcttctataatatttcctttttttcccctctttgaatctctgtatatttgattcttaactaaaattgttctcttaaatattctgaatcctggtaattaaaagtttgggtgtattttctttacctccaaggaaagaactactagctacaaaaaatattttggaataagcattgttttggtataaggtacatattttggttgaagacaccagactgaagtaaacagctgtgcatccaatttattatagttttgtaagtaacaatatgtaatcaaacttctaggtgacttgagagtggaacctcctatatcattatttagcaccgtttgtgacagtaaccatttcagtgtattgtttattataccacttatatcaacttatttttcaccaggttaaaattttaatttctacaaaataacattctgaatcaagcacactgtatgttcagtaggttgaactatgaacactgtcatcaatgttcagttcaaaagcctgaaagtttagatctagaagctggtaaaaatgacaatatcaatcacattaggggaaccattgttgtcttcacttaatccatttagcactatttaaaataagcacaccaagttatatgactaatataacttgaaaattttttatactgaggggttggtgataactcttgaggatgtaatgcattaataaaaatcaactcatcattttctacttgttttcaatgtgttggaaactgtaaaatgatactgtagaacctgtctcctactttgaaaactgaatgtcagggctgagtgaatcaaagtgtctagacatatttgcatagaggccaaggtattctattctaataactgcttactcaacactaccaccttttccttatactgtatatgattatggcctacaatgttgtatttgttatttattaaattgtgattgttttattattgtttatgccaaatgttaactgccaagcttggagtgacctaaagcattttttaaaagcatggctagatttacttcagtataaattatcttatgaaaaccaaattttaaaagccacaggtgttgattgttataaaataacatgctgccattcttgattgctagagtttttgttagtactttggatgcaattaaaactatgtgctatcacatgtgaaaagcttaataaattccatctatcagtagtataggtctcaatatttattatgagaccagtggtctggaaacagcttgttgtaccgaatcaactggagtctatgcttaaaaaaaaaaaatttttttttaaccatccttaaattattgcttaatggtatcatattaacatattctaaataagggctttaaggcacaggctgttgaagcattttctcagaggagtggatctgtagaagtctgtctttctatagaaatattgtgcttactcaagtgttaaattattttttctatgaactagtctacttcttaaaattcaaacatattcttttgatcacattgtttcttgagcatcctgccctgctactaacttttcaacaaggcaaaatggagtaaagtggcaatttctttagatgagtgaaataccctcaagtctcttttctgcccaaaaagggaaaagtgatagaaatgggggtggcaagtggggtgagtggatgaaggtgggtattgggggtggctgtgaaagaaaataatggagaatcacttttctagacatctacctatacttaatctaagaaacaaagtaatctactgtaaagtactctgccccttgaaagaagtattaaaaagagtgaggatggatttagaaaaaaacatgaatttagaaatattcaaaatggtttttgtggcagattcaatattatgaattcacagatatttaaagaatgagaaacatagtaattagtagaaatgccagaaacagttcctggttcctcttgtgtttgacactaagaaaatagcaagagtgtgaaatctcagatacttatgaaatctcacagatgtaaggactcaagtgtagaagaaaatatccccttcttacaaaaagaaatgtcaatttatggagtttgtgggaaatagggcaagaattcttatgcttatgagagccaagtagtcagtggaagagagtagagctcaaaactggattatcaccttagcaacttagaatagtttgaaatagaaaaaaagtatttaatttggatctggatctgttaagatatgcacagtctattttttgtatagtattggaaaataaaaatgctataatttgggtatgggttcttttgtatacattacctgcccattgaggaaaggggcaagtccattatgcaacttctctccaaacccttcatattctggatatgatacttaaagagccatgagcagctacattctgcctatcagaaggcatttattaaatgactgcttgctgaagatgtgtccaaagagatcctacattaaggtcatttgtcagaatgatgtttgtgtttgtttagagttggctgacctccaactcctggggtcaaggaatcctactgccttagcttcccaaatagctaggactataggcatgcacccggccatgtgttttatttatagctcttaaagcccagatgaagaaatcacatttttgcccatagtgaagaaacatttggccattgattagtccttattttcagtgactgtcctgttttcattagattagagagaccctgtgtgggccacagttaatataaaccattatcacttttaagtaaacctgcacatcttagatttcataatttccttattgttctgactcaaaatgaactaagagcttttcactttttgtttgtaagttctcagagagtcgggtctgcaagtgcttttgcctgccaggattttgtactcaaataaatgctatttggcaact

SEQ ID NO: 5844 - protein, 151 aa, Homo sapiens; identical to SEQ ID NO: 5816

SEQ ID NO: 5845 - DNA, 3793 bp, Homo sapiens
gggagtcgccggcggaggcgaggaggagctctgcgcggcgcggcgggcgatccgagccgggacgggctgcaggcgggggtgctgcagaggacacgaggcggcgggctggagacatggaccgcggcgagcaaggtagaagaagaaatccagactctgtctcaagtgttagcagcaaaagagaagcatctagcagagatcaagcggaaacttggaatcaattctctacaggaactaaaacagaacattgccaaagggtggcaagacgtgacagcaacatctgcttacaagaagacatctgaaaccttatcccaggctggacagaaggcctcagctgctttttcgtctgttggctcagtcatcaccaaaaagctggaagatgtaaaaaactccccaacttttaaatcatttgaagaaaaggtcgaaaacttaaaggcaatagggggaaccaagcctgctggtggtgattttggagaagtcttgaattcggctgcaaatgctagtgccaccaccacggagcctcttccagaaaagacacaggagagcctgtgagattcctacctttgttctgctacccactgccagatgctgcaagcgaggtccaagcacatcttgtcaacatgcattgccatgaatttctaccagatgtgcttttatttagctttacatattcctttgaccaaatagtttgtgggttaaacaaaatgaaaatatcttcacctctattcttgggaaacaccctttagtgtacatttatgttcctttatttaggaaacaccattataaaaacacttatagtaaatggggacattcactataatgatctaagaagctacagattgtcatagttgttttcctgctttacaaaattgctccagatctggaatgccagtttgacctttgtcttctataatatttcctttttttcccctctttgaatctctgtatatttgattcttaactaaaattgttctcttaaatattctgaatcctggtaattaaaagtttgggtgtattttctttacctccaaggaaagaactactagctacaaaaaatattttggaataagcattgttttggtataaggtacatattttggttgaagacaccagactgaagtaaacagctgtgcatccaatttattatagttttgtaagtaacaatatgtaatcaaacttctaggtgacttgagagtggaacctcctatatcattatttagcaccgtttgtgacagtaaccatttcagtgtattgtttattataccacttatatcaacttatttttcaccaggttaaaattttaatttctacaaaataacattctgaatcaagcacactgtatgttcagtaggttgaactatgaacactgtcatcaatgttcagttcaaaagcctgaaagtttagatctagaagctggtaaaaatgacaatatcaatcacattaggggaaccattgttgtcttcacttaatccatttagcactatttaaaataagcacaccaagttatatgactaatataacttgaaaattttttatactgaggggttggtgataactcttgaggatgtaatgcattaataaaaatcaactcatcattttctacttgttttcaatgtgttggaaactgtaaaatgatactgtagaacctgtctcctactttgaaaactgaatgtcagggctgagtgaatcaaagtgtctagacatatttgcatagaggccaaggtattctattctaataactgcttactcaacactaccaccttttccttatactgtatatgattatggcctacaatgttgtatttgttatttattaaattgtgattgttttattattgtttatgccaaatgttaactgccaagcttggagtgacctaaagcattttttaaaagcatggctagatttacttcagtataaattatcttatgaaaaccaaattttaaaagccacaggtgttgattgttataaaataacatgctgccattcttgattgctagagtttttgttagtactttggatgcaattaaaactatgtgctatcacatgtgaaaagcttaataaattccatctatcagtagtataggtctcaatatttattatgagaccagtggtctggaaacagcttgttgtaccgaatcaactggagtctatgcttaaaaaaaaaaaatttttttttaaccatccttaaattattgcttaatggtatcatattaacatattctaaataagggctttaaggcacaggctgttgaagcattttctcagaggagtggatctgtagaagtctgtctttctatagaaatattgtgcttactcaagtgttaaattattttttctatgaactagtctacttcttaaaattcaaacatattcttttgatcacattgtttcttgagcatcctgccctgctactaacttttcaacaaggcaaaatggagtaaagtggcaatttctttagatgagtgaaataccctcaagtctcttttctgcccaaaaagggaaaagtgatagaaatgggggtggcaagtggggtgagtggatgaaggtgggtattgggggtggctgtgaaagaaaataatggagaatcacttttctagacatctacctatacttaatctaagaaacaaagtaatctactgtaaagtactctgccccttgaaagaagtattaaaaagagtgaggatggatttagaaaaaaacatgaatttagaaatattcaaaatggtttttgtggcagattcaatattatgaattcacagatatttaaagaatgagaaacatagtaattagtagaaatgccagaaacagttcctggttcctcttgtgtttgacactaagaaaatagcaagagtgtgaaatctcagatacttatgaaatctcacagatgtaaggactcaagtgtagaagaaaatatccccttcttacaaaaagaaatgtcaatttatggagtttgtgggaaatagggcaagaattcttatgcttatgagagccaagtagtcagtggaagagagtagagctcaaaactggattatcaccttagcaacttagaatagtttgaaatagaaaaaaagtatttaatttggatctggatctgttaagatatgcacagtctattttttgtatagtattggaaaataaaaatgctataatttgggtatgggttcttttgtatacattacctgcccattgaggaaaggggcaagtccattatgcaacttctctccaaacccttcatattctggatatgatacttaaagagccatgagcagctacattctgcctatcagaaggcatttattaaatgactgcttgctgaagatgtgtccaaagagatcctacattaaggtcatttgtcagaatgatgtttgtgtttgtttagagttggctgacctccaactcctggggtcaaggaatcctactgccttagcttcccaaatagctaggactataggcatgcacccggccatgtgttttatttatagctcttaaagcccagatgaagaaatcacatttttgcccatagtgaagaaacatttggccattgattagtccttattttcagtgactgtcctgttttcattagattagagagaccctgtgtgggccacagttaatataaaccattatcacttttaagtaaacctgcacatcttagatttcataatttccttattgttctgactcaaaatgaactaagagcttttcactttttgtttgtaagttctcagagagtcgggtctgcaagtgcttttgcctgccaggattttgtactcaaataaatgctatttggcaact

SEQ ID NO: 5846 - protein, 61 aa, Homo sapiens; identical to SEQ ID NO: 5822

SEQ ID NO: 5847 - DNA, 3954 bp, Homo sapiens
gggcggcgccgccgcgcccgacgcctctgggggtggggacttcgcgggagtcgccggcggaggcgaggaggagctctgcgcggcgcggcgggcgatccgagccgggacgggctgcaggcgggggtgctgcagaggacacgaggcggcgggctggagacatggaccgcggcgagcaaggtctgctgagaacagacccagtccctgaggaaggagaagatgttgctgccacgatcagtgccacagagaccctctcggaagaggagcaggaagagctaagaagagaacttgcaaaggtagaagaagaaatccagactctgtctcaagtgttagcagcaaaagagaagcatctagcagagatcaagcggaaacttggaatcaattctctacaggaactaaaacagaacattgccaaagggtggcaagacgtgacagcaacatctgcttacaagaagacatctgaaaccttatcccaggctggacagaaggcctcagctgctttttcgtctgttggctcagtcatcaccaaaaagctggaagatgtaaaaaactccccaacttttaaatcatttgaagaaaaggtcgaaaacttaaaggcaatagggggaaccaagcctgctggtggtgattttggagaagtcttgaattcggctgcaaatgctagtgccaccaccacggagcctcttccagaaaagacacaggagagcctgtgagattcctacctttgttctgctacccactgccagatgctgcaagcgaggtccaagcacatcttgtcaacatgcattgccatgaatttctaccagatgtgcttttatttagctttacatattcctttgaccaaatagtttgtgggttaaacaaaatgaaaatatcttcacctctattcttgggaaacaccctttagtgtacatttatgttcctttatttaggaaacaccattataaaaacacttatagtaaatggggacattcactataatgatctaagaagctacagattgtcatagttgttttcctgctttacaaaattgctccagatctggaatgccagtttgacctttgtcttctataatatttcctttttttcccctctttgaatctctgtatatttgattcttaactaaaattgttctcttaaatattctgaatcctggtaattaaaagtttgggtgtattttctttacctccaaggaaagaactactagctacaaaaaatattttggaataagcattgttttggtataaggtacatattttggttgaagacaccagactgaagtaaacagctgtgcatccaatttattatagttttgtaagtaacaatatgtaatcaaacttctaggtgacttgagagtggaacctcctatatcattatttagcaccgtttgtgacagtaaccatttcagtgtattgtttattataccacttatatcaacttatttttcaccaggttaaaattttaatttctacaaaataacattctgaatcaagcacactgtatgttcagtaggttgaactatgaacactgtcatcaatgttcagttcaaaagcctgaaagtttagatctagaagctggtaaaaatgacaatatcaatcacattaggggaaccattgttgtcttcacttaatccatttagcactatttaaaataagcacaccaagttatatgactaatataacttgaaaattttttatactgaggggttggtgataactcttgaggatgtaatgcattaataaaaatcaactcatcattttctacttgttttcaatgtgttggaaactgtaaaatgatactgtagaacctgtctcctactttgaaaactgaatgtcagggctgagtgaatcaaagtgtctagacatatttgcatagaggccaaggtattctattctaataactgcttactcaacactaccaccttttccttatactgtatatgattatggcctacaatgttgtatttgttatttattaaattgtgattgttttattattgtttatgccaaatgttaactgccaagcttggagtgacctaaagcattttttaaaagcatggctagatttacttcagtataaattatcttatgaaaaccaaattttaaaagccacaggtgttgattgttataaaataacatgctgccattcttgattgctagagtttttgttagtactttggatgcaattaaaactatgtgctatcacatgtgaaaagcttaataaattccatctatcagtagtataggtctcaatatttattatgagaccagtggtctggaaacagcttgttgtaccgaatcaactggagtctatgcttaaaaaaaaaaaatttttttttaaccatccttaaattattgcttaatggtatcatattaacatattctaaataagggctttaaggcacaggctgttgaagcattttctcagaggagtggatctgtagaagtctgtctttctatagaaatattgtgcttactcaagtgttaaattattttttctatgaactagtctacttcttaaaattcaaacatattcttttgatcacattgtttcttgagcatcctgccctgctactaacttttcaacaaggcaaaatggagtaaagtggcaatttctttagatgagtgaaataccctcaagtctcttttctgcccaaaaagggaaaagtgatagaaatgggggtggcaagtggggtgagtggatgaaggtgggtattgggggtggctgtgaaagaaaataatggagaatcacttttctagacatctacctatacttaatctaagaaacaaagtaatctactgtaaagtactctgccccttgaaagaagtattaaaaagagtgaggatggatttagaaaaaaacatgaatttagaaatattcaaaatggtttttgtggcagattcaatattatgaattcacagatatttaaagaatgagaaacatagtaattagtagaaatgccagaaacagttcctggttcctcttgtgtttgacactaagaaaatagcaagagtgtgaaatctcagatacttatgaaatctcacagatgtaaggactcaagtgtagaagaaaatatccccttcttacaaaaagaaatgtcaatttatggagtttgtgggaaatagggcaagaattcttatgcttatgagagccaagtagtcagtggaagagagtagagctcaaaactggattatcaccttagcaacttagaatagtttgaaatagaaaaaaagtatttaatttggatctggatctgttaagatatgcacagtctattttttgtatagtattggaaaataaaaatgctataatttgggtatgggttcttttgtatacattacctgcccattgaggaaaggggcaagtccattatgcaacttctctccaaacccttcatattctggatatgatacttaaagagccatgagcagctacattctgcctatcagaaggcatttattaaatgactgcttgctgaagatgtgtccaaagagatcctacattaaggtcatttgtcagaatgatgtttgtgtttgtttagagttggctgacctccaactcctggggtcaaggaatcctactgccttagcttcccaaatagctaggactataggcatgcacccggccatgtgttttatttatagctcttaaagcccagatgaagaaatcacatttttgcccatagtgaagaaacatttggccattgattagtccttattttcagtgactgtcctgttttcattagattagagagaccctgtgtgggccacagttaatataaaccattatcacttttaagtaaacctgcacatcttagatttcataatttccttattgttctgactcaaaatgaactaagagcttttcactttttgtttgtaagttctcagagagtcgggtctgcaagtgcttttgcctgccaggattttgtactcaaataaatgctatttggcaact

SEQ ID NO: 5848 - protein, 183 aa, Homo sapiens; identical to SEQ ID NO: 5824

SEQ ID NO: 5849 - DNA, 4063 bp, Homo sapiens
ggttgggtgacgccccaggaaagcgctccaggccgagggcgggcggcgccgccgcgcccgacgcctctgggggtggggacttcgcgggagtcgccggcggaggcgaggaggagctctgcgcggcgcggcgggcgatccgagccgggacgggctgcaggcgggggtgctgcagaggacacgaggcggcgggctggagacatggaccgcggcgagcaaggtctgctgagaacagacccagtccctgaggaaggagaagatgttgctgccacgatcagtgccacagagaccctctcggaagaggagcaggaagagctaagaagagaacttgcaaaggtagaagaagaaatccagactctgtctcaagtgttagcagcaaaagagaagcatctagcagagatcaagcggaaacttggaatcaattctctacaggaactaaaacagaacattgccaaagggtggcaagacgtgacagcaacatctgcttacaagaagacatctgaaaccttatcccaggctggacagaaggcctcagctgctttttcgtctgttggctcagtcatcaccaaaaagctggaagatgtaaaattgcaagccttttcacattcctttagtatacgttccattcagcattcaattagcatgcctgctatgagaaactccccaacttttaaatcatttgaagaaaaggtcgaaaacttaaaggcaatagggggaaccaagcctgctggtggtgattttggagaagtcttgaattcggctgcaaatgctagtgccaccaccacggagcctcttccagaaaagacacaggagagcctgtgagattcctacctttgttctgctacccactgccagatgctgcaagcgaggtccaagcacatcttgtcaacatgcattgccatgaatttctaccagatgtgcttttatttagctttacatattcctttgaccaaatagtttgtgggttaaacaaaatgaaaatatcttcacctctattcttgggaaacaccctttagtgtacatttatgttcctttatttaggaaacaccattataaaaacacttatagtaaatggggacattcactataatgatctaagaagctacagattgtcatagttgttttcctgctttacaaaattgctccagatctggaatgccagtttgacctttgtcttctataatatttcctttttttcccctctttgaatctctgtatatttgattcttaactaaaattgttctcttaaatattctgaatcctggtaattaaaagtttgggtgtattttctttacctccaaggaaagaactactagctacaaaaaatattttggaataagcattgttttggtataaggtacatattttggttgaagacaccagactgaagtaaacagctgtgcatccaatttattatagttttgtaagtaacaatatgtaatcaaacttctaggtgacttgagagtggaacctcctatatcattatttagcaccgtttgtgacagtaaccatttcagtgtattgtttattataccacttatatcaacttatttttcaccaggttaaaattttaatttctacaaaataacattctgaatcaagcacactgtatgttcagtaggttgaactatgaacactgtcatcaatgttcagttcaaaagcctgaaagtttagatctagaagctggtaaaaatgacaatatcaatcacattaggggaaccattgttgtcttcacttaatccatttagcactatttaaaataagcacaccaagttatatgactaatataacttgaaaattttttatactgaggggttggtgataactcttgaggatgtaatgcattaataaaaatcaactcatcattttctacttgttttcaatgtgttggaaactgtaaaatgatactgtagaacctgtctcctactttgaaaactgaatgtcagggctgagtgaatcaaagtgtctagacatatttgcatagaggccaaggtattctattctaataactgcttactcaacactaccaccttttccttatactgtatatgattatggcctacaatgttgtatttgttatttattaaattgtgattgttttattattgtttatgccaaatgttaactgccaagcttggagtgacctaaagcattttttaaaagcatggctagatttacttcagtataaattatcttatgaaaaccaaattttaaaagccacaggtgttgattgttataaaataacatgctgccattcttgattgctagagtttttgttagtactttggatgcaattaaaactatgtgctatcacatgtgaaaagcttaataaattccatctatcagtagtataggtctcaatatttattatgagaccagtggtctggaaacagcttgttgtaccgaatcaactggagtctatgcttaaaaaaaaaaaatttttttttaaccatccttaaattattgcttaatggtatcatattaacatattctaaataagggctttaaggcacaggctgttgaagcattttctcagaggagtggatctgtagaagtctgtctttctatagaaatattgtgcttactcaagtgttaaattattttttctatgaactagtctacttcttaaaattcaaacatattcttttgatcacattgtttcttgagcatcctgccctgctactaacttttcaacaaggcaaaatggagtaaagtggcaatttctttagatgagtgaaataccctcaagtctcttttctgcccaaaaagggaaaagtgatagaaatgggggtggcaagtggggtgagtggatgaaggtgggtattgggggtggctgtgaaagaaaataatggagaatcacttttctagacatctacctatacttaatctaagaaacaaagtaatctactgtaaagtactctgccccttgaaagaagtattaaaaagagtgaggatggatttagaaaaaaacatgaatttagaaatattcaaaatggtttttgtggcagattcaatattatgaattcacagatatttaaagaatgagaaacatagtaattagtagaaatgccagaaacagttcctggttcctcttgtgtttgacactaagaaaatagcaagagtgtgaaatctcagatacttatgaaatctcacagatgtaaggactcaagtgtagaagaaaatatccccttcttacaaaaagaaatgtcaatttatggagtttgtgggaaatagggcaagaattcttatgcttatgagagccaagtagtcagtggaagagagtagagctcaaaactggattatcaccttagcaacttagaatagtttgaaatagaaaaaaagtatttaatttggatctggatctgttaagatatgcacagtctattttttgtatagtattggaaaataaaaatgctataatttgggtatgggttcttttgtatacattacctgcccattgaggaaaggggcaagtccattatgcaacttctctccaaacccttcatattctggatatgatacttaaagagccatgagcagctacattctgcctatcagaaggcatttattaaatgactgcttgctgaagatgtgtccaaagagatcctacattaaggtcatttgtcagaatgatgtttgtgtttgtttagagttggctgacctccaactcctggggtcaaggaatcctactgccttagcttcccaaatagctaggactataggcatgcacccggccatgtgttttatttatagctcttaaagcccagatgaagaaatcacatttttgcccatagtgaagaaacatttggccattgattagtccttattttcagtgactgtcctgttttcattagattagagagaccctgtgtgggccacagttaatataaaccattatcacttttaagtaaacctgcacatcttagatttcataatttccttattgttctgactcaaaatgaactaagagcttttcactttttgtttgtaagttctcagagagtcgggtctgcaagtgcttttgcctgccaggattttgtactcaaataaatgctatttggcaact

SEQ ID NO: 5850 - protein, 206 aa, Homo sapiens; identical to SEQ ID NO: 5826

SEQ ID NO: 5851 - DNA, 1817 bp, Homo sapiens
aatgttatgcaagtgtagagacagacagttcactaggtactttaaaataatagaccttacaaagttttctagacagacttcctgtgaagaacaaggagcagggggaaaggggaaggggtagaatttaccaatctgaatatttcagcaagggagaatgcatgagttttactataaaaccacactgaacattgcaacaatactaaattccatacatatataataatcactgagctataaggttgctgatgtatttgttcttgaaagtgaattagagttactttatgcagaatcagctagttttatgtttcataatgtctttcccttttttgaacttttttttaagtctaaagtagggggaaccaagcctgctggtggtgattttggagaagtcttgaattcggctgcaaatgctagtgccaccaccacggagcctcttccagaaaagacacaggagagcctgtgagattcctacctttgttctgctacccactgccagatgctgcaagcgaggtccaagcacatcttgtcaacatgcattgccatgaatttctaccagatgtgcttttatttagctttacatattcttatgaaaaccaaattttaaaagccacaggtgttgattgttataaaataacatgctgccattcttgattgctagagtttttgttagtactttggatgcaattaaaactatgtgctatcacatgtgaaaagcttaataaattccatctatcagtagtataggtctcaatatttattatgagaccagtggtctggaaacagcttgttgtaccgaatcaactggagtctatgcttaaaaaaaaaaaatttttttttaaccatccttaaattattgcttaatggtatcatattaacatattctaaataagggctttaaggcacaggctgttgaagcattttctcagaggagtggatctgtagaagtctgtctttctatagaaatattgtgcttactcaagtgttaaattattttttctatgaactagtctacttcttaaaattcaaacatattcttttgatcacattgtttcttgagcatcctgccctgctactaacttttcaacaaggcaaaatggagtaaagtggcaatttctttagatgagtgaaataccctcaagtctcttttctgcccaaaaagggaaaagtgatagaaatgggggtggcaagtggggtgagtggatgaaggtgggtattgggggtggctgtgaaagaaaataatggagaatcacttttctagacatctacctatacttaatctaagaaacaaagtaatctactgtaaagtactctgccccttgaaagaagtattaaaaagagtgaggatggatttagaaaaaaacatgaatttagaaatattcaaaatggtttttgtggcagattcaatattatgaattcacagatatttaaagaatgagaaacatagtaattagtagaaatgccagaaacagttcctggttcctcttgtgtttgacactaagaaaatagcaagagtgtgaaatctcagatacttatgaaatctcacagatgtaaggactcaagtgtagaagaaaatatccccttcttacaaaaagaaatgtcaatttatggagtttgtgggaaatagggcaagaattcttatgcttatgagagccaagtagtcagtggaagagagtagagctcaaaactggattatcaccttagcaacttagaatagtttgaaatagaaaaaaagtatttaatttggatctggatctgttaagatatgcacagtctattttttgtatagtattggaaaataaaaatgctataatttgggt

SEQ ID NO: 5852 - protein, 39 aa, Homo sapiens; identical to SEQ ID NO: 5804

SEQ ID NO: 5853 - DNA, 3014 bp, Homo sapiens
attacttatgtctgagactggccctgttcatggaatcaaatgcatactcttaaaatattagatcagaaattgagaatcttacattataaatacttgtatgtacctgcacatatatggtacagattatatctgttcttttgccgattgagaataatgttgaagaggaatcaattatattttcaaactagttggattttttttcagtatttgtatttactatttgtttttcttttctctccatagaaactccccaacttttaaatcatttgaagaaaaggtcgaaaacttaaaggcaatagggggaaccaagcctgctggtggtgattttggagaagtcttgaattcggctgcaaatgctagtgccaccaccacggagcctcttccagaaaagacacaggagagcctgtgagattcctacctttgttctgctacccactgccagatgctgcaagcgaggtccaagcacatcttgtcaacatgcattgccatgaatttctaccagatgtgcttttatttagctttacatattcctttgaccaaatagtttgtgggttaaacaaaatgaaaatatcttcacctctattcttgggaaacaccctttagtgtacatttatgttcctttatttaggaaacaccattataaaaacacttatagtaaatggggacattcactataatgatctaagaagctacagattgtcatagttgttttcctgctttacaaaattgctccagatctggaatgccagtttgacctttgtcttctataatatttcctttttttcccctctttgaatctctgtatatttgattcttaactaaaattgttctcttaaatattctgaatcctggtaattaaaagtttgggtgtattttctttacctccaaggaaagaactactagctacaaaaaatattttggaataagcattgttttggtataaggtacatattttggttgaagacaccagactgaagtaaacagctgtgcatccaatttattatagttttgtaagtaacaatatgtaatcaaacttctaggtgacttgagagtggaacctcctatatcattatttagcaccgtttgtgacagtaaccatttcagtgtattgtttattataccacttatatcaacttatttttcaccaggttaaaattttaatttctacaaaataacattctgaatcaagcacactgtatgttcagtaggttgaactatgaacactgtcatcaatgttcagttcaaaagcctgaaagtttagatctagaagctggtaaaaatgacaatatcaatcacattaggggaaccattgttgtcttcacttaatccatttagcactatttaaaataagcacaccaagttatatgactaatataacttgaaaattttttatactgaggggttggtgataactcttgaggatgtaatgcattaataaaaatcaactcatcattttctacttgttttcaatgtgttggaaactgtaaaatgatactgtagaacctgtctcctactttgaaaactgaatgtcagggctgagtgaatcaaagtgtctagacatatttgcatagaggccaaggtattctattctaataactgcttactcaacactaccaccttttccttatactgtatatgattatggcctacaatgttgtatttgttatttattaaattgtgattgttttattattgtttatgccaaatgttaactgccaagcttggagtgacctaaagcattttttaaaagcatggctagatttacttcagtataaattatcttatgaaaaccaaattttaaaagccacaggtgttgattgttataaaataacatgctgccattcttgattgctagagtttttgttagtactttggatgcaattaaaactatgtgctatcacatgtgaaaagcttaataaattccatctatcagtagtataggtctcaatatttattatgagaccagtggtctggaaacagcttgttgtaccgaatcaactggagtctatgcttaaaaaaaaaaaatttttttttaaccatccttaaattattgcttaatggtatcatattaacatattctaaataagggctttaaggcacaggctgttgaagcattttctcagaggagtggatctgtagaagtctgtctttctatagaaatattgtgcttactcaagtgttaaattattttttctatgaactagtctacttcttaaaattcaaacatattcttttgatcacattgtttcttgagcatcctgccctgctactaacttttcaacaaggcaaaatggagtaaagtggcaatttctttagatgagtgaaataccctcaagtctcttttctgcccaaaaagggaaaagtgatagaaatgggggtggcaagtggggtgagtggatgaaggtgggtattgggggtggctgtgaaagaaaataatggagaatcacttttctagacatctacctatacttaatctaagaaacaaagtaatctactgtaaagtactctgccccttgaaagaagtattaaaaagagtgaggatggatttagaaaaaaacatgaatttagaaatattcaaaatggtttttgtggcagattcaatattatgaattcacagatatttaaagaatgagaaacatagtaattagtagaaatgccagaaacagttcctggttcctcttgtgtttgacactaagaaaatagcaagagtgtgaaatctcagatacttatgaaatctcacagatgtaaggactcaagtgtagaagaaaatatccccttcttacaaaaagaaatgtcaatttatggagtttgtgggaaatagggcaagaattcttatgcttatgagagccaagtagtcagtggaagagagtagagctcaaaactggattatcaccttagcaacttagaatagtttgaaatagaaaaaaagtatttaatttggatctggatctgttaagatatgcacagtctattttttgtatagtattggaaaataaaaatgctataatttgggt

SEQ ID NO: 5854 - protein, 67 aa, Homo sapiens
MHTLKILDQKLRILHYKYLYVPAHIWYRLYLFFCRLRIMLKRNQLYFQTSWIFFQYLYLLFVFLFSP

SEQ ID NO: 5855 - DNA, 2948 bp, Homo sapiens
actccttcaaaccagtacctggaaggctcatctaaggtcttctaggcctagcattctaacatcaaatgatcatctgatgatcatttaaggttgttgaaaaattctggttgtgaacttctttgtctttttagttcttcatgatcatgcaggattgcaagccttttcacattcctttagaaactccccaacttttaaatcatttgaagaaaaggtcgaaaacttaaaggcaatagggggaaccaagcctgctggtggtgattttggagaagtcttgaattcggctgcaaatgctagtgccaccaccacggagcctcttccagaaaagacacaggagagcctgtgagattcctacctttgttctgctacccactgccagatgctgcaagcgaggtccaagcacatcttgtcaacatgcattgccatgaatttctaccagatgtgcttttatttagctttacatattcctttgaccaaatagtttgtgggttaaacaaaatgaaaatatcttcacctctattcttgggaaacaccctttagtgtacatttatgttcctttatttaggaaacaccattataaaaacacttatagtaaatggggacattcactataatgatctaagaagctacagattgtcatagttgttttcctgctttacaaaattgctccagatctggaatgccagtttgacctttgtcttctataatatttcctttttttcccctctttgaatctctgtatatttgattcttaactaaaattgttctcttaaatattctgaatcctggtaattaaaagtttgggtgtattttctttacctccaaggaaagaactactagctacaaaaaatattttggaataagcattgttttggtataaggtacatattttggttgaagacaccagactgaagtaaacagctgtgcatccaatttattatagttttgtaagtaacaatatgtaatcaaacttctaggtgacttgagagtggaacctcctatatcattatttagcaccgtttgtgacagtaaccatttcagtgtattgtttattataccacttatatcaacttatttttcaccaggttaaaattttaatttctacaaaataacattctgaatcaagcacactgtatgttcagtaggttgaactatgaacactgtcatcaatgttcagttcaaaagcctgaaagtttagatctagaagctggtaaaaatgacaatatcaatcacattaggggaaccattgttgtcttcacttaatccatttagcactatttaaaataagcacaccaagttatatgactaatataacttgaaaattttttatactgaggggttggtgataactcttgaggatgtaatgcattaataaaaatcaactcatcattttctacttgttttcaatgtgttggaaactgtaaaatgatactgtagaacctgtctcctactttgaaaactgaatgtcagggctgagtgaatcaaagtgtctagacatatttgcatagaggccaaggtattctattctaataactgcttactcaacactaccaccttttccttatactgtatatgattatggcctacaatgttgtatttgttatttattaaattgtgattgttttattattgtttatgccaaatgttaactgccaagcttggagtgacctaaagcattttttaaaagcatggctagatttacttcagtataaattatcttatgaaaaccaaattttaaaagccacaggtgttgattgttataaaataacatgctgccattcttgattgctagagtttttgttagtactttggatgcaattaaaactatgtgctatcacatgtgaaaagcttaataaattccatctatcagtagtataggtctcaatatttattatgagaccagtggtctggaaacagcttgttgtaccgaatcaactggagtctatgcttaaaaaaaaaaaatttttttttaaccatccttaaattattgcttaatggtatcatattaacatattctaaataagggctttaaggcacaggctgttgaagcattttctcagaggagtggatctgtagaagtctgtctttctatagaaatattgtgcttactcaagtgttaaattattttttctatgaactagtctacttcttaaaattcaaacatattcttttgatcacattgtttcttgagcatcctgccctgctactaacttttcaacaaggcaaaatggagtaaagtggcaatttctttagatgagtgaaataccctcaagtctcttttctgcccaaaaagggaaaagtgatagaaatgggggtggcaagtggggtgagtggatgaaggtgggtattgggggtggctgtgaaagaaaataatggagaatcacttttctagacatctacctatacttaatctaagaaacaaagtaatctactgtaaagtactctgccccttgaaagaagtattaaaaagagtgaggatggatttagaaaaaaacatgaatttagaaatattcaaaatggtttttgtggcagattcaatattatgaattcacagatatttaaagaatgagaaacatagtaattagtagaaatgccagaaacagttcctggttcctcttgtgtttgacactaagaaaatagcaagagtgtgaaatctcagatacttatgaaatctcacagatgtaaggactcaagtgtagaagaaaatatccccttcttacaaaaagaaatgtcaatttatggagtttgtgggaaatagggcaagaattcttatgcttatgagagccaagtagtcagtggaagagagtagagctcaaaactggattatcaccttagcaacttagaatagtttgaaatagaaaaaaagtatttaatttggatctggatctgttaagatatgcacagtctattttttgtatagtattggaaaataaaaatgctataatttgggt

SEQ ID NO: 5856 - protein, 57 aa, Homo sapiens [sequence omitted]

SEQ ID NO: 5857 - DNA, 2936 bp, Homo sapiens
agagtgagggagggcactccttcaaaccagtacctggaaggctcatctaaggtcttctaggcctagcattctaacatcaaatgatcatctgatgatcatttaaggttgttgaaaaattctggttgtgaacttctttgtctttttagttcttcatgatcatgcaggaaactccccaacttttaaatcatttgaagaaaaggtcgaaaacttaaaggcaatagggggaaccaagcctgctggtggtgattttggagaagtcttgaattcggctgcaaatgctagtgccaccaccacggagcctcttccagaaaagacacaggagagcctgtgagattcctacctttgttctgctacccactgccagatgctgcaagcgaggtccaagcacatcttgtcaacatgcattgccatgaatttctaccagatgtgcttttatttagctttacatattcctttgaccaaatagtttgtgggttaaacaaaatgaaaatatcttcacctctattcttgggaaacaccctttagtgtacatttatgttcctttatttaggaaacaccattataaaaacacttatagtaaatggggacattcactataatgatctaagaagctacagattgtcatagttgttttcctgctttacaaaattgctccagatctggaatgccagtttgacctttgtcttctataatatttcctttttttcccctctttgaatctctgtatatttgattcttaactaaaattgttctcttaaatattctgaatcctggtaattaaaagtttgggtgtattttctttacctccaaggaaagaactactagctacaaaaaatattttggaataagcattgttttggtataaggtacatattttggttgaagacaccagactgaagtaaacagctgtgcatccaatttattatagttttgtaagtaacaatatgtaatcaaacttctaggtgacttgagagtggaacctcctatatcattatttagcaccgtttgtgacagtaaccatttcagtgtattgtttattataccacttatatcaacttatttttcaccaggttaaaattttaatttctacaaaataacattctgaatcaagcacactgtatgttcagtaggttgaactatgaacactgtcatcaatgttcagttcaaaagcctgaaagtttagatctagaagctggtaaaaatgacaatatcaatcacattaggggaaccattgttgtcttcacttaatccatttagcactatttaaaataagcacaccaagttatatgactaatataacttgaaaattttttatactgaggggttggtgataactcttgaggatgtaatgcattaataaaaatcaactcatcattttctacttgttttcaatgtgttggaaactgtaaaatgatactgtagaacctgtctcctactttgaaaactgaatgtcagggctgagtgaatcaaagtgtctagacatatttgcatagaggccaaggtattctattctaataactgcttactcaacactaccaccttttccttatactgtatatgattatggcctacaatgttgtatttgttatttattaaattgtgattgttttattattgtttatgccaaatgttaactgccaagcttggagtgacctaaagcattttttaaaagcatggctagatttacttcagtataaattatcttatgaaaaccaaattttaaaagccacaggtgttgattgttataaaataacatgctgccattcttgattgctagagtttttgttagtactttggatgcaattaaaactatgtgctatcacatgtgaaaagcttaataaattccatctatcagtagtataggtctcaatatttattatgagaccagtggtctggaaacagcttgttgtaccgaatcaactggagtctatgcttaaaaaaaaaaaatttttttttaaccatccttaaattattgcttaatggtatcatattaacatattctaaataagggctttaaggcacaggctgttgaagcattttctcagaggagtggatctgtagaagtctgtctttctatagaaatattgtgcttactcaagtgttaaattattttttctatgaactagtctacttcttaaaattcaaacatattcttttgatcacattgtttcttgagcatcctgccctgctactaacttttcaacaaggcaaaatggagtaaagtggcaatttctttagatgagtgaaataccctcaagtctcttttctgcccaaaaagggaaaagtgatagaaatgggggtggcaagtggggtgagtggatgaaggtgggtattgggggtggctgtgaaagaaaataatggagaatcacttttctagacatctacctatacttaatctaagaaacaaagtaatctactgtaaagtactctgccccttgaaagaagtattaaaaagagtgaggatggatttagaaaaaaacatgaatttagaaatattcaaaatggtttttgtggcagattcaatattatgaattcacagatatttaaagaatgagaaacatagtaattagtagaaatgccagaaacagttcctggttcctcttgtgtttgacactaagaaaatagcaagagtgtgaaatctcagatacttatgaaatctcacagatgtaaggactcaagtgtagaagaaaatatccccttcttacaaaaagaaatgtcaatttatggagtttgtgggaaatagggcaagaattcttatgcttatgagagccaagtagtcagtggaagagagtagagctcaaaactggattatcaccttagcaacttagaatagtttgaaatagaaaaaaagtatttaatttggatctggatctgttaagatatgcacagtctattttttgtatagtattggaaaataaaaatgctataatttgggt

SEQ ID NO: 5858 - protein, 57 aa, Homo sapiens [sequence omitted]

SEQ ID NO: 5859 - DNA, 3104 bp, Homo sapiens
ctttctggctggactagggcactgcagaagattgtgcctgagcttagggttgagcatacgaagatgtggtgatgccgctctgctggttatgaaggattttagaagttctgaaaaatgttttctctttttgagagttctccagcaggtggtgaccactgcacttgaaacaattgatattagaaaagatgagctgacccttcttttgctctgtgtgtttataatttaatatagttacaagaagacatctgaaaccttatcccaggctggacagaaggcctcagctgctttttcgtctgttggctcagtcatcaccaaaaagctggaagatgtaaaaaactccccaacttttaaatcatttgaagaaaaggtcgaaaacttaaaggcaatagggggaaccaagcctgctggtggtgattttggagaagtcttgaattcggctgcaaatgctagtgccaccaccacggagcctcttccagaaaagacacaggagagcctgtgagattcctacctttgttctgctacccactgccagatgctgcaagcgaggtccaagcacatcttgtcaacatgcattgccatgaatttctaccagatgtgcttttatttagctttacatattcctttgaccaaatagtttgtgggttaaacaaaatgaaaatatcttcacctctattcttgggaaacaccctttagtgtacatttatgttcctttatttaggaaacaccattataaaaacacttatagtaaatggggacattcactataatgatctaagaagctacagattgtcatagttgttttcctgctttacaaaattgctccagatctggaatgccagtttgacctttgtcttctataatatttcctttttttcccctctttgaatctctgtatatttgattcttaactaaaattgttctcttaaatattctgaatcctggtaattaaaagtttgggtgtattttctttacctccaaggaaagaactactagctacaaaaaatattttggaataagcattgttttggtataaggtacatattttggttgaagacaccagactgaagtaaacagctgtgcatccaatttattatagttttgtaagtaacaatatgtaatcaaacttctaggtgacttgagagtggaacctcctatatcattatttagcaccgtttgtgacagtaaccatttcagtgtattgtttattataccacttatatcaacttatttttcaccaggttaaaattttaatttctacaaaataacattctgaatcaagcacactgtatgttcagtaggttgaactatgaacactgtcatcaatgttcagttcaaaagcctgaaagtttagatctagaagctggtaaaaatgacaatatcaatcacattaggggaaccattgttgtcttcacttaatccatttagcactatttaaaataagcacaccaagttatatgactaatataacttgaaaattttttatactgaggggttggtgataactcttgaggatgtaatgcattaataaaaatcaactcatcattttctacttgttttcaatgtgttggaaactgtaaaatgatactgtagaacctgtctcctactttgaaaactgaatgtcagggctgagtgaatcaaagtgtctagacatatttgcatagaggccaaggtattctattctaataactgcttactcaacactaccaccttttccttatactgtatatgattatggcctacaatgttgtatttgttatttattaaattgtgattgttttattattgtttatgccaaatgttaactgccaagcttggagtgacctaaagcattttttaaaagcatggctagatttacttcagtataaattatcttatgaaaaccaaattttaaaagccacaggtgttgattgttataaaataacatgctgccattcttgattgctagagtttttgttagtactttggatgcaattaaaactatgtgctatcacatgtgaaaagcttaataaattccatctatcagtagtataggtctcaatatttattatgagaccagtggtctggaaacagcttgttgtaccgaatcaactggagtctatgcttaaaaaaaaaaaatttttttttaaccatccttaaattattgcttaatggtatcatattaacatattctaaataagggctttaaggcacaggctgttgaagcattttctcagaggagtggatctgtagaagtctgtctttctatagaaatattgtgcttactcaagtgttaaattattttttctatgaactagtctacttcttaaaattcaaacatattcttttgatcacattgtttcttgagcatcctgccctgctactaacttttcaacaaggcaaaatggagtaaagtggcaatttctttagatgagtgaaataccctcaagtctcttttctgcccaaaaagggaaaagtgatagaaatgggggtggcaagtggggtgagtggatgaaggtgggtattgggggtggctgtgaaagaaaataatggagaatcacttttctagacatctacctatacttaatctaagaaacaaagtaatctactgtaaagtactctgccccttgaaagaagtattaaaaagagtgaggatggatttagaaaaaaacatgaatttagaaatattcaaaatggtttttgtggcagattcaatattatgaattcacagatatttaaagaatgagaaacatagtaattagtagaaatgccagaaacagttcctggttcctcttgtgtttgacactaagaaaatagcaagagtgtgaaatctcagatacttatgaaatctcacagatgtaaggactcaagtgtagaagaaaatatccccttcttacaaaaagaaatgtcaatttatggagtttgtgggaaatagggcaagaattcttatgcttatgagagccaagtagtcagtggaagagagtagagctcaaaactggattatcaccttagcaacttagaatagtttgaaatagaaaaaaagtatttaatttggatctggatctgttaagatatgcacagtctattttttgtatagtattggaaaataaaaatgctataatttgggt

SEQ ID NO: 5860 - protein, 57 aa, Homo sapiens [sequence omitted]

SEQ ID NO: 5861 - DNA, 3202 bp, Homo sapiens
ggagcttaaatagggattttacttagattttgcactttaaaaaatggtttaaatccccaaccaggtctgctgagaacagacccagtccctgaggaaggagaagatgttgctgccacgatcagtgccacagagaccctctcggaagaggagcaggaagagctaagaagagaacttgcaaaggtagaagaagaaatccagactctgtctcaagtgttagcagcaaaagagaagcatctagcagagatcaagcggaaacttggaatcaattctctacaggaactaaaacagaacattgccaaagggtggcaagacgtgacagcaacatctgcttacaagaagacatctgaaaccttatcccaggctggacagaaggcctcagctgctttttcgtctgttggctcagtcatcaccaaaaagctggaagatgtaaaaaactccccaacttttaaatcatttgaagaaaaggtcgaaaacttaaaggcaatagggggaaccaagcctgctggtggtgattttggagaagtcttgaattcggctgcaaatgctagtgccaccaccacggagcctcttccagaaaagacacaggagagcctgtgagattcctacctttgttctgctacccactgccagatgctgcaagcgaggtccaagcacatcttgtcaacatgcattgccatgaatttctaccagatgtgcttttatttagctttacatattcctttgaccaaatagtttgtgggttaaacaaaatgaaaatatcttcacctctattcttgggaaacaccctttagtgtacatttatgttcctttatttaggaaacaccattataaaaacacttatagtaaatggggacattcactataatgatctaagaagctacagattgtcatagttgttttcctgctttacaaaattgctccagatctggaatgccagtttgacctttgtcttctataatatttcctttttttcccctctttgaatctctgtatatttgattcttaactaaaattgttctcttaaatattctgaatcctggtaattaaaagtttgggtgtattttctttacctccaaggaaagaactactagctacaaaaaatattttggaataagcattgttttggtataaggtacatattttggttgaagacaccagactgaagtaaacagctgtgcatccaatttattatagttttgtaagtaacaatatgtaatcaaacttctaggtgacttgagagtggaacctcctatatcattatttagcaccgtttgtgacagtaaccatttcagtgtattgtttattataccacttatatcaacttatttttcaccaggttaaaattttaatttctacaaaataacattctgaatcaagcacactgtatgttcagtaggttgaactatgaacactgtcatcaatgttcagttcaaaagcctgaaagtttagatctagaagctggtaaaaatgacaatatcaatcacattaggggaaccattgttgtcttcacttaatccatttagcactatttaaaataagcacaccaagttatatgactaatataacttgaaaattttttatactgaggggttggtgataactcttgaggatgtaatgcattaataaaaatcaactcatcattttctacttgttttcaatgtgttggaaactgtaaaatgatactgtagaacctgtctcctactttgaaaactgaatgtcagggctgagtgaatcaaagtgtctagacatatttgcatagaggccaaggtattctattctaataactgcttactcaacactaccaccttttccttatactgtatatgattatggcctacaatgttgtatttgttatttattaaattgtgattgttttattattgtttatgccaaatgttaactgccaagcttggagtgacctaaagcattttttaaaagcatggctagatttacttcagtataaattatcttatgaaaaccaaattttaaaagccacaggtgttgattgttataaaataacatgctgccattcttgattgctagagtttttgttagtactttggatgcaattaaaactatgtgctatcacatgtgaaaagcttaataaattccatctatcagtagtataggtctcaatatttattatgagaccagtggtctggaaacagcttgttgtaccgaatcaactggagtctatgcttaaaaaaaaaaaatttttttttaaccatccttaaattattgcttaatggtatcatattaacatattctaaataagggctttaaggcacaggctgttgaagcattttctcagaggagtggatctgtagaagtctgtctttctatagaaatattgtgcttactcaagtgttaaattattttttctatgaactagtctacttcttaaaattcaaacatattcttttgatcacattgtttcttgagcatcctgccctgctactaacttttcaacaaggcaaaatggagtaaagtggcaatttctttagatgagtgaaataccctcaagtctcttttctgcccaaaaagggaaaagtgatagaaatgggggtggcaagtggggtgagtggatgaaggtgggtattgggggtggctgtgaaagaaaataatggagaatcacttttctagacatctacctatacttaatctaagaaacaaagtaatctactgtaaagtactctgccccttgaaagaagtattaaaaagagtgaggatggatttagaaaaaaacatgaatttagaaatattcaaaatggtttttgtggcagattcaatattatgaattcacagatatttaaagaatgagaaacatagtaattagtagaaatgccagaaacagttcctggttcctcttgtgtttgacactaagaaaatagcaagagtgtgaaatctcagatacttatgaaatctcacagatgtaaggactcaagtgtagaagaaaatatccccttcttacaaaaagaaatgtcaatttatggagtttgtgggaaatagggcaagaattcttatgcttatgagagccaagtagtcagtggaagagagtagagctcaaaactggattatcaccttagcaacttagaatagtttgaaatagaaaaaaagtatttaatttggatctggatctgttaagatatgcacagtctattttttgtatagtattggaaaataaaaatgctataatttgggt

SEQ ID NO: 5862 - protein, 57 aa, Homo sapiens [sequence omitted]

SEQ ID NO: 5863 - DNA, 3724 bp, Homo sapiens
agtgtctgatgtttgcctgaactgtttgtacctctgggccatattgcagaaccctgcccttctttgttgactgaggaaagctcgctccctgcccaggtttttcattgttgatcgaaattaacaccaggtggtgaatagagcccctcctaaggttgctcaggataaatcatttattaaataggtctgcttatcaggaggggcgtgaaggctcccaaaaggaaatgctggcacctgggcccagaagccagggcctctaactcctggggttgatttcttcagtgaagttgcaccctacaaagggaatatggccaaagcggcactcaactgaaggctgatatcaggcgattagacagccatgcattctgcgtttgtctggaatggattgtagagagatggacttatatgaggactaccagtccccgtttgattttgatgcaggagtgaacaaaagctatctctacttgtctcctagtggaaattcatctccacccggatcacctactcttcagaaatttggtctgctgagaacagacccagtccctgaggaaggagaagatgttgctgccacgatcagtgccacagagaccctctcggaagaggagcaggaagagctaagaagagaacttgcaaaggtagaagaagaaatccagactctgtctcaagtgttagcagcaaaagagaagcatctagcagagatcaagcggaaacttggaatcaattctctacaggaactaaaacagaacattgccaaagggtggcaagacgtgacagcaacatctgcgaggagcaagcttctagcagcagaaaccgaactgctctgtcttctgtattgagagccatctgcagagctgttacaagaagacatctgaaaccttatcccaggctggacagaaggcctcagctgctttttcgtctgttggctcagtcatcaccaaaaagctggaagatgtaaaaaactccccaacttttaaatcatttgaagaaaaggtcgaaaacttaaaggcaatagggggaaccaagcctgctggtggtgattttggagaagtcttgaattcggctgcaaatgctagtgccaccaccacggagcctcttccagaaaagacacaggagagcctgtgagattcctacctttgttctgctacccactgccagatgctgcaagcgaggtccaagcacatcttgtcaacatgcattgccatgaatttctaccagatgtgcttttatttagctttacatattcctttgaccaaatagtttgtgggttaaacaaaatgaaaatatcttcacctctattcttgggaaacaccctttagtgtacatttatgttcctttatttaggaaacaccattataaaaacacttatagtaaatggggacattcactataatgatctaagaagctacagattgtcatagttgttttcctgctttacaaaattgctccagatctggaatgccagtttgacctttgtcttctataatatttcctttttttcccctctttgaatctctgtatatttgattcttaactaaaattgttctcttaaatattctgaatcctggtaattaaaagtttgggtgtattttctttacctccaaggaaagaactactagctacaaaaaatattttggaataagcattgttttggtataaggtacatattttggttgaagacaccagactgaagtaaacagctgtgcatccaatttattatagttttgtaagtaacaatatgtaatcaaacttctaggtgacttgagagtggaacctcctatatcattatttagcaccgtttgtgacagtaaccatttcagtgtattgtttattataccacttatatcaacttatttttcaccaggttaaaattttaatttctacaaaataacattctgaatcaagcacactgtatgttcagtaggttgaactatgaacactgtcatcaatgttcagttcaaaagcctgaaagtttagatctagaagctggtaaaaatgacaatatcaatcacattaggggaaccattgttgtcttcacttaatccatttagcactatttaaaataagcacaccaagttatatgactaatataacttgaaaattttttatactgaggggttggtgataactcttgaggatgtaatgcattaataaaaatcaactcatcattttctacttgttttcaatgtgttggaaactgtaaaatgatactgtagaacctgtctcctactttgaaaactgaatgtcagggctgagtgaatcaaagtgtctagacatatttgcatagaggccaaggtattctattctaataactgcttactcaacactaccaccttttccttatactgtatatgattatggcctacaatgttgtatttgttatttattaaattgtgattgttttattattgtttatgccaaatgttaactgccaagcttggagtgacctaaagcattttttaaaagcatggctagatttacttcagtataaattatcttatgaaaaccaaattttaaaagccacaggtgttgattgttataaaataacatgctgccattcttgattgctagagtttttgttagtactttggatgcaattaaaactatgtgctatcacatgtgaaaagcttaataaattccatctatcagtagtataggtctcaatatttattatgagaccagtggtctggaaacagcttgttgtaccgaatcaactggagtctatgcttaaaaaaaaaaaatttttttttaaccatccttaaattattgcttaatggtatcatattaacatattctaaataagggctttaaggcacaggctgttgaagcattttctcagaggagtggatctgtagaagtctgtctttctatagaaatattgtgcttactcaagtgttaaattattttttctatgaactagtctacttcttaaaattcaaacatattcttttgatcacattgtttcttgagcatcctgccctgctactaacttttcaacaaggcaaaatggagtaaagtggcaatttctttagatgagtgaaataccctcaagtctcttttctgcccaaaaagggaaaagtgatagaaatgggggtggcaagtggggtgagtggatgaaggtgggtattgggggtggctgtgaaagaaaataatggagaatcacttttctagacatctacctatacttaatctaagaaacaaagtaatctactgtaaagtactctgccccttgaaagaagtattaaaaagagtgaggatggatttagaaaaaaacatgaatttagaaatattcaaaatggtttttgtggcagattcaatattatgaattcacagatatttaaagaatgagaaacatagtaattagtagaaatgccagaaacagttcctggttcctcttgtgtttgacactaagaaaatagcaagagtgtgaaatctcagatacttatgaaatctcacagatgtaaggactcaagtgtagaagaaaatatccccttcttacaaaaagaaatgtcaatttatggagtttgtgggaaatagggcaagaattcttatgcttatgagagccaagtagtcagtggaagagagtagagctcaaaactggattatcaccttagcaacttagaatagtttgaaatagaaaaaaagtatttaatttggatctggatctgttaagatatgcacagtctattttttgtatagtattggaaaataaaaatgctataatttgggt

SEQ ID NO: 5864 - protein, 151 aa, Homo sapiens; identical to SEQ ID NO: 5816

SEQ ID NO: 5865 - DNA, 3723 bp, Homo sapiens
agtgtctgatgtttgcctgaactgtttgtacctctgggccatattgcagaaccctgcccttctttgttgactgaggaaagctcgctccctgcccaggtttttcattgttgatcgaaattaacaccaggtggtgaatagagcccctcctaaggttgctcaggataaatcatttattaaataggtctgcttatcaggaggggcgtgaaggctcccaaaaggaaatgctggcacctgggcccagaagccagggcctctaactcctggggttgatttcttcagtgaagttgcaccctacaaagggaatatggccaaagcggcactcaactgaaggctgatatcaggcgattagacagccatgcattctgcgtttgtctggaatggattgtagagagatggacttatatgaggactaccagtccccgtttgattttgatgcaggagtgaacaaaagctatctctacttgtctcctagtggaaattcatctccacccggatcacctactcttcagaaatttggtctgctgagaacagacccagtccctgaggaaggagaagatgttgctgccacgatcagtgccacagagaccctctcggaagaggagcaggaagagctaagaagagaacttgcaaaggtagaagaagaaatccagactctgtctcaagtgttagcagcaaaagagaagcatctagcagagatcaagcggaaacttggaatcaattctctacaggaactaaaacagaacattgccaaagggtggcaagacgtgacagcaacatctgcttacaagaagacatctgaaaccttatcccaggctggacagaaggcctcagctgctttttcgtctgttggctcagtcatcaccaaaaagctggaagatgtaaaattgcaagccttttcacattcctttagtatacgttccattcagcattcaattagcatgcctgctatgagaaactccccaacttttaaatcatttgaagaaaaggtcgaaaacttaaaggcaatagggggaaccaagcctgctggtggtgattttggagaagtcttgaattcggctgcaaatgctagtgccaccaccacggagcctcttccagaaaagacacaggagagcctgtgagattcctacctttgttctgctacccactgccagatgctgcaagcgaggtccaagcacatcttgtcaacatgcattgccatgaatttctaccagatgtgcttttatttagctttacatattcctttgaccaaatagtttgtgggttaaacaaaatgaaaatatcttcacctctattcttgggaaacaccctttagtgtacatttatgttcctttatttaggaaacaccattataaaaacacttatagtaaatggggacattcactataatgatctaagaagctacagattgtcatagttgttttcctgctttacaaaattgctccagatctggaatgccagtttgacctttgtcttctataatatttcctttttttcccctctttgaatctctgtatatttgattcttaactaaaattgttctcttaaatattctgaatcctggtaattaaaagtttgggtgtattttctttacctccaaggaaagaactactagctacaaaaaatattttggaataagcattgttttggtataaggtacatattttggttgaagacaccagactgaagtaaacagctgtgcatccaatttattatagttttgtaagtaacaatatgtaatcaaacttctaggtgacttgagagtggaacctcctatatcattatttagcaccgtttgtgacagtaaccatttcagtgtattgtttattataccacttatatcaacttatttttcaccaggttaaaattttaatttctacaaaataacattctgaatcaagcacactgtatgttcagtaggttgaactatgaacactgtcatcaatgttcagttcaaaagcctgaaagtttagatctagaagctggtaaaaatgacaatatcaatcacattaggggaaccattgttgtcttcacttaatccatttagcactatttaaaataagcacaccaagttatatgactaatataacttgaaaattttttatactgaggggttggtgataactcttgaggatgtaatgcattaataaaaatcaactcatcattttctacttgttttcaatgtgttggaaactgtaaaatgatactgtagaacctgtctcctactttgaaaactgaatgtcagggctgagtgaatcaaagtgtctagacatatttgcatagaggccaaggtattctattctaataactgcttactcaacactaccaccttttccttatactgtatatgattatggcctacaatgttgtatttgttatttattaaattgtgattgttttattattgtttatgccaaatgttaactgccaagcttggagtgacctaaagcattttttaaaagcatggctagatttacttcagtataaattatcttatgaaaaccaaattttaaaagccacaggtgttgattgttataaaataacatgctgccattcttgattgctagagtttttgttagtactttggatgcaattaaaactatgtgctatcacatgtgaaaagcttaataaattccatctatcagtagtataggtctcaatatttattatgagaccagtggtctggaaacagcttgttgtaccgaatcaactggagtctatgcttaaaaaaaaaaaatttttttttaaccatccttaaattattgcttaatggtatcatattaacatattctaaataagggctttaaggcacaggctgttgaagcattttctcagaggagtggatctgtagaagtctgtctttctatagaaatattgtgcttactcaagtgttaaattattttttctatgaactagtctacttcttaaaattcaaacatattcttttgatcacattgtttcttgagcatcctgccctgctactaacttttcaacaaggcaaaatggagtaaagtggcaatttctttagatgagtgaaataccctcaagtctcttttctgcccaaaaagggaaaagtgatagaaatgggggtggcaagtggggtgagtggatgaaggtgggtattgggggtggctgtgaaagaaaataatggagaatcacttttctagacatctacctatacttaatctaagaaacaaagtaatctactgtaaagtactctgccccttgaaagaagtattaaaaagagtgaggatggatttagaaaaaaacatgaatttagaaatattcaaaatggtttttgtggcagattcaatattatgaattcacagatatttaaagaatgagaaacatagtaattagtagaaatgccagaaacagttcctggttcctcttgtgtttgacactaagaaaatagcaagagtgtgaaatctcagatacttatgaaatctcacagatgtaaggactcaagtgtagaagaaaatatccccttcttacaaaaagaaatgtcaatttatggagtttgtgggaaatagggcaagaattcttatgcttatgagagccaagtagtcagtggaagagagtagagctcaaaactggattatcaccttagcaacttagaatagtttgaaatagaaaaaaagtatttaatttggatctggatctgttaagatatgcacagtctattttttgtatagtattggaaaataaaaatgctataatttgggt

SEQ ID NO: 5866 - protein, 246 aa, Homo sapiens; identical to SEQ ID NO: 5818

SEQ ID NO: 5867 - DNA, 3654 bp, Homo sapiens
agtgtctgatgtttgcctgaactgtttgtacctctgggccatattgcagaaccctgcccttctttgttgactgaggaaagctcgctccctgcccaggtttttcattgttgatcgaaattaacaccaggtggtgaatagagcccctcctaaggttgctcaggataaatcatttattaaataggtctgcttatcaggaggggcgtgaaggctcccaaaaggaaatgctggcacctgggcccagaagccagggcctctaactcctggggttgatttcttcagtgaagttgcaccctacaaagggaatatggccaaagcggcactcaactgaaggctgatatcaggcgattagacagccatgcattctgcgtttgtctggaatggattgtagagagatggacttatatgaggactaccagtccccgtttgattttgatgcaggagtgaacaaaagctatctctacttgtctcctagtggaaattcatctccacccggatcacctactcttcagaaatttggtctgctgagaacagacccagtccctgaggaaggagaagatgttgctgccacgatcagtgccacagagaccctctcggaagaggagcaggaagagctaagaagagaacttgcaaaggtagaagaagaaatccagactctgtctcaagtgttagcagcaaaagagaagcatctagcagagatcaagcggaaacttggaatcaattctctacaggaactaaaacagaacattgccaaagggtggcaagacgtgacagcaacatctgcttacaagaagacatctgaaaccttatcccaggctggacagaaggcctcagctgctttttcgtctgttggctcagtcatcaccaaaaagctggaagatgtaaaaaactccccaacttttaaatcatttgaagaaaaggtcgaaaacttaaaggcaatagggggaaccaagcctgctggtggtgattttggagaagtcttgaattcggctgcaaatgctagtgccaccaccacggagcctcttccagaaaagacacaggagagcctgtgagattcctacctttgttctgctacccactgccagatgctgcaagcgaggtccaagcacatcttgtcaacatgcattgccatgaatttctaccagatgtgcttttatttagctttacatattcctttgaccaaatagtttgtgggttaaacaaaatgaaaatatcttcacctctattcttgggaaacaccctttagtgtacatttatgttcctttatttaggaaacaccattataaaaacacttatagtaaatggggacattcactataatgatctaagaagctacagattgtcatagttgttttcctgctttacaaaattgctccagatctggaatgccagtttgacctttgtcttctataatatttcctttttttcccctctttgaatctctgtatatttgattcttaactaaaattgttctcttaaatattctgaatcctggtaattaaaagtttgggtgtattttctttacctccaaggaaagaactactagctacaaaaaatattttggaataagcattgttttggtataaggtacatattttggttgaagacaccagactgaagtaaacagctgtgcatccaatttattatagttttgtaagtaacaatatgtaatcaaacttctaggtgacttgagagtggaacctcctatatcattatttagcaccgtttgtgacagtaaccatttcagtgtattgtttattataccacttatatcaacttatttttcaccaggttaaaattttaatttctacaaaataacattctgaatcaagcacactgtatgttcagtaggttgaactatgaacactgtcatcaatgttcagttcaaaagcctgaaagtttagatctagaagctggtaaaaatgacaatatcaatcacattaggggaaccattgttgtcttcacttaatccatttagcactatttaaaataagcacaccaagttatatgactaatataacttgaaaattttttatactgaggggttggtgataactcttgaggatgtaatgcattaataaaaatcaactcatcattttctacttgttttcaatgtgttggaaactgtaaaatgatactgtagaacctgtctcctactttgaaaactgaatgtcagggctgagtgaatcaaagtgtctagacatatttgcatagaggccaaggtattctattctaataactgcttactcaacactaccaccttttccttatactgtatatgattatggcctacaatgttgtatttgttatttattaaattgtgattgttttattattgtttatgccaaatgttaactgccaagcttggagtgacctaaagcattttttaaaagcatggctagatttacttcagtataaattatcttatgaaaaccaaattttaaaagccacaggtgttgattgttataaaataacatgctgccattcttgattgctagagtttttgttagtactttggatgcaattaaaactatgtgctatcacatgtgaaaagcttaataaattccatctatcagtagtataggtctcaatatttattatgagaccagtggtctggaaacagcttgttgtaccgaatcaactggagtctatgcttaaaaaaaaaaaatttttttttaaccatccttaaattattgcttaatggtatcatattaacatattctaaataagggctttaaggcacaggctgttgaagcattttctcagaggagtggatctgtagaagtctgtctttctatagaaatattgtgcttactcaagtgttaaattattttttctatgaactagtctacttcttaaaattcaaacatattcttttgatcacattgtttcttgagcatcctgccctgctactaacttttcaacaaggcaaaatggagtaaagtggcaatttctttagatgagtgaaataccctcaagtctcttttctgcccaaaaagggaaaagtgatagaaatgggggtggcaagtggggtgagtggatgaaggtgggtattgggggtggctgtgaaagaaaataatggagaatcacttttctagacatctacctatacttaatctaagaaacaaagtaatctactgtaaagtactctgccccttgaaagaagtattaaaaagagtgaggatggatttagaaaaaaacatgaatttagaaatattcaaaatggtttttgtggcagattcaatattatgaattcacagatatttaaagaatgagaaacatagtaattagtagaaatgccagaaacagttcctggttcctcttgtgtttgacactaagaaaatagcaagagtgtgaaatctcagatacttatgaaatctcacagatgtaaggactcaagtgtagaagaaaatatccccttcttacaaaaagaaatgtcaatttatggagtttgtgggaaatagggcaagaattcttatgcttatgagagccaagtagtcagtggaagagagtagagctcaaaactggattatcaccttagcaacttagaatagtttgaaatagaaaaaaagtatttaatttggatctggatctgttaagatatgcacagtctattttttgtatagtattggaaaataaaaatgctataatttgggt

SEQ ID NO: 5868 - protein, 223 aa, Homo sapiens; identical to SEQ ID NO: 5820

SEQ ID NO: 5869 - DNA, 3154 bp, Homo sapiens
gggagtcgccggcggaggcgaggaggagctctgcgcggcgcggcgggcgatccgagccgggacgggctgcaggcgggggtgctgcagaggacacgaggcggcgggctggagacatggaccgcggcgagcaaggtagaagaagaaatccagactctgtctcaagtgttagcagcaaaagagaagcatctagcagagatcaagcggaaacttggaatcaattctctacaggaactaaaacagaacattgccaaagggtggcaagacgtgacagcaacatctgcttacaagaagacatctgaaaccttatcccaggctggacagaaggcctcagctgctttttcgtctgttggctcagtcatcaccaaaaagctggaagatgtaaaaaactccccaacttttaaatcatttgaagaaaaggtcgaaaacttaaaggcaatagggggaaccaagcctgctggtggtgattttggagaagtcttgaattcggctgcaaatgctagtgccaccaccacggagcctcttccagaaaagacacaggagagcctgtgagattcctacctttgttctgctacccactgccagatgctgcaagcgaggtccaagcacatcttgtcaacatgcattgccatgaatttctaccagatgtgcttttatttagctttacatattcctttgaccaaatagtttgtgggttaaacaaaatgaaaatatcttcacctctattcttgggaaacaccctttagtgtacatttatgttcctttatttaggaaacaccattataaaaacacttatagtaaatggggacattcactataatgatctaagaagctacagattgtcatagttgttttcctgctttacaaaattgctccagatctggaatgccagtttgacctttgtcttctataatatttcctttttttcccctctttgaatctctgtatatttgattcttaactaaaattgttctcttaaatattctgaatcctggtaattaaaagtttgggtgtattttctttacctccaaggaaagaactactagctacaaaaaatattttggaataagcattgttttggtataaggtacatattttggttgaagacaccagactgaagtaaacagctgtgcatccaatttattatagttttgtaagtaacaatatgtaatcaaacttctaggtgacttgagagtggaacctcctatatcattatttagcaccgtttgtgacagtaaccatttcagtgtattgtttattataccacttatatcaacttatttttcaccaggttaaaattttaatttctacaaaataacattctgaatcaagcacactgtatgttcagtaggttgaactatgaacactgtcatcaatgttcagttcaaaagcctgaaagtttagatctagaagctggtaaaaatgacaatatcaatcacattaggggaaccattgttgtcttcacttaatccatttagcactatttaaaataagcacaccaagttatatgactaatataacttgaaaattttttatactgaggggttggtgataactcttgaggatgtaatgcattaataaaaatcaactcatcattttctacttgttttcaatgtgttggaaactgtaaaatgatactgtagaacctgtctcctactttgaaaactgaatgtcagggctgagtgaatcaaagtgtctagacatatttgcatagaggccaaggtattctattctaataactgcttactcaacactaccaccttttccttatactgtatatgattatggcctacaatgttgtatttgttatttattaaattgtgattgttttattattgtttatgccaaatgttaactgccaagcttggagtgacctaaagcattttttaaaagcatggctagatttacttcagtataaattatcttatgaaaaccaaattttaaaagccacaggtgttgattgttataaaataacatgctgccattcttgattgctagagtttttgttagtactttggatgcaattaaaactatgtgctatcacatgtgaaaagcttaataaattccatctatcagtagtataggtctcaatatttattatgagaccagtggtctggaaacagcttgttgtaccgaatcaactggagtctatgcttaaaaaaaaaaaatttttttttaaccatccttaaattattgcttaatggtatcatattaacatattctaaataagggctttaaggcacaggctgttgaagcattttctcagaggagtggatctgtagaagtctgtctttctatagaaatattgtgcttactcaagtgttaaattattttttctatgaactagtctacttcttaaaattcaaacatattcttttgatcacattgtttcttgagcatcctgccctgctactaacttttcaacaaggcaaaatggagtaaagtggcaatttctttagatgagtgaaataccctcaagtctcttttctgcccaaaaagggaaaagtgatagaaatgggggtggcaagtggggtgagtggatgaaggtgggtattgggggtggctgtgaaagaaaataatggagaatcacttttctagacatctacctatacttaatctaagaaacaaagtaatctactgtaaagtactctgccccttgaaagaagtattaaaaagagtgaggatggatttagaaaaaaacatgaatttagaaatattcaaaatggtttttgtggcagattcaatattatgaattcacagatatttaaagaatgagaaacatagtaattagtagaaatgccagaaacagttcctggttcctcttgtgtttgacactaagaaaatagcaagagtgtgaaatctcagatacttatgaaatctcacagatgtaaggactcaagtgtagaagaaaatatccccttcttacaaaaagaaatgtcaatttatggagtttgtgggaaatagggcaagaattcttatgcttatgagagccaagtagtcagtggaagagagtagagctcaaaactggattatcaccttagcaacttagaatagtttgaaatagaaaaaaagtatttaatttggatctggatctgttaagatatgcacagtctattttttgtatagtattggaaaataaaaatgctataatttgggt

SEQ ID NO: 5870 - protein, 61 aa, Homo sapiens; identical to SEQ ID NO: 5822

SEQ ID NO: 5871 - DNA, 3279 bp, Homo sapiens
ggacttcgcgggagtcgccggcggaggcgaggaggagctctgcgcggcgcggcgggcgatccgagccgggacgggctgcaggcgggggtgctgcagaggacacgaggcggcgggctggagacatggaccgcggcgagcaaggtctgctgagaacagacccagtccctgaggaaggagaagatgttgctgccacgatcagtgccacagagaccctctcggaagaggagcaggaagagctaagaagagaacttgcaaaggtagaagaagaaatccagactctgtctcaagtgttagcagcaaaagagaagcatctagcagagatcaagcggaaacttggaatcaattctctacaggaactaaaacagaacattgccaaagggtggcaagacgtgacagcaacatctgcttacaagaagacatctgaaaccttatcccaggctggacagaaggcctcagctgctttttcgtctgttggctcagtcatcaccaaaaagctggaagatgtaaaaaactccccaacttttaaatcatttgaagaaaaggtcgaaaacttaaaggcaatagggggaaccaagcctgctggtggtgattttggagaagtcttgaattcggctgcaaatgctagtgccaccaccacggagcctcttccagaaaagacacaggagagcctgtgagattcctacctttgttctgctacccactgccagatgctgcaagcgaggtccaagcacatcttgtcaacatgcattgccatgaatttctaccagatgtgcttttatttagctttacatattcctttgaccaaatagtttgtgggttaaacaaaatgaaaatatcttcacctctattcttgggaaacaccctttagtgtacatttatgttcctttatttaggaaacaccattataaaaacacttatagtaaatggggacattcactataatgatctaagaagctacagattgtcatagttgttttcctgctttacaaaattgctccagatctggaatgccagtttgacctttgtcttctataatatttcctttttttcccctctttgaatctctgtatatttgattcttaactaaaattgttctcttaaatattctgaatcctggtaattaaaagtttgggtgtattttctttacctccaaggaaagaactactagctacaaaaaatattttggaataagcattgttttggtataaggtacatattttggttgaagacaccagactgaagtaaacagctgtgcatccaatttattatagttttgtaagtaacaatatgtaatcaaacttctaggtgacttgagagtggaacctcctatatcattatttagcaccgtttgtgacagtaaccatttcagtgtattgtttattataccacttatatcaacttatttttcaccaggttaaaattttaatttctacaaaataacattctgaatcaagcacactgtatgttcagtaggttgaactatgaacactgtcatcaatgttcagttcaaaagcctgaaagtttagatctagaagctggtaaaaatgacaatatcaatcacattaggggaaccattgttgtcttcacttaatccatttagcactatttaaaataagcacaccaagttatatgactaatataacttgaaaattttttatactgaggggttggtgataactcttgaggatgtaatgcattaataaaaatcaactcatcattttctacttgttttcaatgtgttggaaactgtaaaatgatactgtagaacctgtctcctactttgaaaactgaatgtcagggctgagtgaatcaaagtgtctagacatatttgcatagaggccaaggtattctattctaataactgcttactcaacactaccaccttttccttatactgtatatgattatggcctacaatgttgtatttgttatttattaaattgtgattgttttattattgtttatgccaaatgttaactgccaagcttggagtgacctaaagcattttttaaaagcatggctagatttacttcagtataaattatcttatgaaaaccaaattttaaaagccacaggtgttgattgttataaaataacatgctgccattcttgattgctagagtttttgttagtactttggatgcaattaaaactatgtgctatcacatgtgaaaagcttaataaattccatctatcagtagtataggtctcaatatttattatgagaccagtggtctggaaacagcttgttgtaccgaatcaactggagtctatgcttaaaaaaaaaaaatttttttttaaccatccttaaattattgcttaatggtatcatattaacatattctaaataagggctttaaggcacaggctgttgaagcattttctcagaggagtggatctgtagaagtctgtctttctatagaaatattgtgcttactcaagtgttaaattattttttctatgaactagtctacttcttaaaattcaaacatattcttttgatcacattgtttcttgagcatcctgccctgctactaacttttcaacaaggcaaaatggagtaaagtggcaatttctttagatgagtgaaataccctcaagtctcttttctgcccaaaaagggaaaagtgatagaaatgggggtggcaagtggggtgagtggatgaaggtgggtattgggggtggctgtgaaagaaaataatggagaatcacttttctagacatctacctatacttaatctaagaaacaaagtaatctactgtaaagtactctgccccttgaaagaagtattaaaaagagtgaggatggatttagaaaaaaacatgaatttagaaatattcaaaatggtttttgtggcagattcaatattatgaattcacagatatttaaagaatgagaaacatagtaattagtagaaatgccagaaacagttcctggttcctcttgtgtttgacactaagaaaatagcaagagtgtgaaatctcagatacttatgaaatctcacagatgtaaggactcaagtgtagaagaaaatatccccttcttacaaaaagaaatgtcaatttatggagtttgtgggaaatagggcaagaattcttatgcttatgagagccaagtagtcagtggaagagagtagagctcaaaactggattatcaccttagcaacttagaatagtttgaaatagaaaaaaagtatttaatttggatctggatctgttaagatatgcacagtctattttttgtatagtattggaaaataaaaatgctataatttgggt

SEQ ID NO: 5872 - protein, 183 aa, Homo sapiens; identical to SEQ ID NO: 5824

SEQ ID NO: 5873 - DNA, 3424 bp, Homo sapiens
ggttgggtgacgccccaggaaagcgctccaggccgagggcgggcggcgccgccgcgcccgacgcctctgggggtggggacttcgcgggagtcgccggcggaggcgaggaggagctctgcgcggcgcggcgggcgatccgagccgggacgggctgcaggcgggggtgctgcagaggacacgaggcggcgggctggagacatggaccgcggcgagcaaggtctgctgagaacagacccagtccctgaggaaggagaagatgttgctgccacgatcagtgccacagagaccctctcggaagaggagcaggaagagctaagaagagaacttgcaaaggtagaagaagaaatccagactctgtctcaagtgttagcagcaaaagagaagcatctagcagagatcaagcggaaacttggaatcaattctctacaggaactaaaacagaacattgccaaagggtggcaagacgtgacagcaacatctgcttacaagaagacatctgaaaccttatcccaggctggacagaaggcctcagctgctttttcgtctgttggctcagtcatcaccaaaaagctggaagatgtaaaattgcaagccttttcacattcctttagtatacgttccattcagcattcaattagcatgcctgctatgagaaactccccaacttttaaatcatttgaagaaaaggtcgaaaacttaaaggcaatagggggaaccaagcctgctggtggtgattttggagaagtcttgaattcggctgcaaatgctagtgccaccaccacggagcctcttccagaaaagacacaggagagcctgtgagattcctacctttgttctgctacccactgccagatgctgcaagcgaggtccaagcacatcttgtcaacatgcattgccatgaatttctaccagatgtgcttttatttagctttacatattcctttgaccaaatagtttgtgggttaaacaaaatgaaaatatcttcacctctattcttgggaaacaccctttagtgtacatttatgttcctttatttaggaaacaccattataaaaacacttatagtaaatggggacattcactataatgatctaagaagctacagattgtcatagttgttttcctgctttacaaaattgctccagatctggaatgccagtttgacctttgtcttctataatatttcctttttttcccctctttgaatctctgtatatttgattcttaactaaaattgttctcttaaatattctgaatcctggtaattaaaagtttgggtgtattttctttacctccaaggaaagaactactagctacaaaaaatattttggaataagcattgttttggtataaggtacatattttggttgaagacaccagactgaagtaaacagctgtgcatccaatttattatagttttgtaagtaacaatatgtaatcaaacttctaggtgacttgagagtggaacctcctatatcattatttagcaccgtttgtgacagtaaccatttcagtgtattgtttattataccacttatatcaacttatttttcaccaggttaaaattttaatttctacaaaataacattctgaatcaagcacactgtatgttcagtaggttgaactatgaacactgtcatcaatgttcagttcaaaagcctgaaagtttagatctagaagctggtaaaaatgacaatatcaatcacattaggggaaccattgttgtcttcacttaatccatttagcactatttaaaataagcacaccaagttatatgactaatataacttgaaaattttttatactgaggggttggtgataactcttgaggatgtaatgcattaataaaaatcaactcatcattttctacttgttttcaatgtgttggaaactgtaaaatgatactgtagaacctgtctcctactttgaaaactgaatgtcagggctgagtgaatcaaagtgtctagacatatttgcatagaggccaaggtattctattctaataactgcttactcaacactaccaccttttccttatactgtatatgattatggcctacaatgttgtatttgttatttattaaattgtgattgttttattattgtttatgccaaatgttaactgccaagcttggagtgacctaaagcattttttaaaagcatggctagatttacttcagtataaattatcttatgaaaaccaaattttaaaagccacaggtgttgattgttataaaataacatgctgccattcttgattgctagagtttttgttagtactttggatgcaattaaaactatgtgctatcacatgtgaaaagcttaataaattccatctatcagtagtataggtctcaatatttattatgagaccagtggtctggaaacagcttgttgtaccgaatcaactggagtctatgcttaaaaaaaaaaaatttttttttaaccatccttaaattattgcttaatggtatcatattaacatattctaaataagggctttaaggcacaggctgttgaagcattttctcagaggagtggatctgtagaagtctgtctttctatagaaatattgtgcttactcaagtgttaaattattttttctatgaactagtctacttcttaaaattcaaacatattcttttgatcacattgtttcttgagcatcctgccctgctactaacttttcaacaaggcaaaatggagtaaagtggcaatttctttagatgagtgaaataccctcaagtctcttttctgcccaaaaagggaaaagtgatagaaatgggggtggcaagtggggtgagtggatgaaggtgggtattgggggtggctgtgaaagaaaataatggagaatcacttttctagacatctacctatacttaatctaagaaacaaagtaatctactgtaaagtactctgccccttgaaagaagtattaaaaagagtgaggatggatttagaaaaaaacatgaatttagaaatattcaaaatggtttttgtggcagattcaatattatgaattcacagatatttaaagaatgagaaacatagtaattagtagaaatgccagaaacagttcctggttcctcttgtgtttgacactaagaaaatagcaagagtgtgaaatctcagatacttatgaaatctcacagatgtaaggactcaagtgtagaagaaaatatccccttcttacaaaaagaaatgtcaatttatggagtttgtgggaaatagggcaagaattcttatgcttatgagagccaagtagtcagtggaagagagtagagctcaaaactggattatcaccttagcaacttagaatagtttgaaatagaaaaaaagtatttaatttggatctggatctgttaagatatgcacagtctattttttgtatagtattggaaaataaaaatgctataatttgggt

SEQ ID NO: 5874 - protein, 206 aa, Homo sapiens; identical to SEQ ID NO: 5826

SEQ ID NO: 5875 - DNA, 1936 bp, Homo sapiens
attacttatgtctgagactggccctgttcatggaatcaaatgcatactcttaaaatattagatcagaaattgagaatcttacattataaatacttgtatgtacctgcacatatatggtacagattatatctgttcttttgccgattgagaataatgttgaagaggaatcaattatattttcaaactagttggattttttttcagtatttgtatttactatttgtttttcttttctctccatagaaactccccaacttttaaatcatttgaagaaaaggtcgaaaacttaaaggcaatagggggaaccaagcctgctggtggtgattttggagaagtcttgaattcggctgcaaatgctagtgccaccaccacggagcctcttccagaaaagacacaggagagcctgtgagattcctacctttgttctgctacccactgccagatgctgcaagcgaggtccaagcacatcttgtcaacatgcattgccatgaatttctaccagatgtgcttttatttagctttacatattcctttgaccaaatagtttgtgggttaaacaaaatgaaaatatcttcacctctattcttgggaaacaccctttagtgtacatttatgttcctttatttaggaaacaccattataaaaacacttatagtaaatggggacattcactataatgatctaagaagctacagattgtcatagttgttttcctgctttacaaaattgctccagatctggaatgccagtttgacctttgtcttctataatatttcctttttttcccctctttgaatctctgtatatttgattcttaactaaaattgttctcttaaatattctgaatcctggtaattaaaagtttgggtgtattttctttacctccaaggaaagaactactagctacaaaaaatattttggaataagcattgttttggtataaggtacatattttggttgaagacaccagactgaagtaaacagctgtgcatccaatttattatagttttgtaagtaacaatatgtaatcaaacttctaggtgacttgagagtggaacctcctatatcattatttagcaccgtttgtgacagtaaccatttcagtgtattgtttattataccacttatatcaacttatttttcaccaggttaaaattttaatttctacaaaataacattctgaatcaagcacactgtatgttcagtaggttgaactatgaacactgtcatcaatgttcagttcaaaagcctgaaagtttagatctagaagctggtaaaaatgacaatatcaatcacattaggggaaccattgttgtcttcacttaatccatttagcactatttaaaataagcacaccaagttatatgactaatataacttgaaaattttttatactgaggggttggtgataactcttgaggatgtaatgcattaataaaaatcaactcatcattttctacttgttttcaatgtgttggaaactgtaaaatgatactgtagaacctgtctcctactttgaaaactgaatgtcagggctgagtgaatcaaagtgtctagacatatttgcatagaggccaaggtattctattctaataactgcttactcaacactaccaccttttccttatactgtatatgattatggcctacaatgttgtatttgttatttattaaattgtgattgttttattattgtttatgccaaatgttaactgccaagcttggagtgacctaaagcattttttaaaagcatggctagatttacttcagtataaattatcttatgaaaaccaaattttaaaagccacaggtgttgattgttataaaataacatgctgccattcttgattgctagagtttttgttagtactttggatgcaattaaaactatgtgctatcacatgtgaaaagcttaataaattccatctatcagtag

SEQ ID NO: 5876 - protein, 67 aa, Homo sapiens; identical to SEQ ID NO: 5854

SEQ ID NO: 5877 - DNA, 1870 bp, Homo sapiens
actccttcaaaccagtacctggaaggctcatctaaggtcttctaggcctagcattctaacatcaaatgatcatctgatgatcatttaaggttgttgaaaaattctggttgtgaacttctttgtctttttagttcttcatgatcatgcaggattgcaagccttttcacattcctttagaaactccccaacttttaaatcatttgaagaaaaggtcgaaaacttaaaggcaatagggggaaccaagcctgctggtggtgattttggagaagtcttgaattcggctgcaaatgctagtgccaccaccacggagcctcttccagaaaagacacaggagagcctgtgagattcctacctttgttctgctacccactgccagatgctgcaagcgaggtccaagcacatcttgtcaacatgcattgccatgaatttctaccagatgtgcttttatttagctttacatattcctttgaccaaatagtttgtgggttaaacaaaatgaaaatatcttcacctctattcttgggaaacaccctttagtgtacatttatgttcctttatttaggaaacaccattataaaaacacttatagtaaatggggacattcactataatgatctaagaagctacagattgtcatagttgttttcctgctttacaaaattgctccagatctggaatgccagtttgacctttgtcttctataatatttcctttttttcccctctttgaatctctgtatatttgattcttaactaaaattgttctcttaaatattctgaatcctggtaattaaaagtttgggtgtattttctttacctccaaggaaagaactactagctacaaaaaatattttggaataagcattgttttggtataaggtacatattttggttgaagacaccagactgaagtaaacagctgtgcatccaatttattatagttttgtaagtaacaatatgtaatcaaacttctaggtgacttgagagtggaacctcctatatcattatttagcaccgtttgtgacagtaaccatttcagtgtattgtttattataccacttatatcaacttatttttcaccaggttaaaattttaatttctacaaaataacattctgaatcaagcacactgtatgttcagtaggttgaactatgaacactgtcatcaatgttcagttcaaaagcctgaaagtttagatctagaagctggtaaaaatgacaatatcaatcacattaggggaaccattgttgtcttcacttaatccatttagcactatttaaaataagcacaccaagttatatgactaatataacttgaaaattttttatactgaggggttggtgataactcttgaggatgtaatgcattaataaaaatcaactcatcattttctacttgttttcaatgtgttggaaactgtaaaatgatactgtagaacctgtctcctactttgaaaactgaatgtcagggctgagtgaatcaaagtgtctagacatatttgcatagaggccaaggtattctattctaataactgcttactcaacactaccaccttttccttatactgtatatgattatggcctacaatgttgtatttgttatttattaaattgtgattgttttattattgtttatgccaaatgttaactgccaagcttggagtgacctaaagcattttttaaaagcatggctagatttacttcagtataaattatcttatgaaaaccaaattttaaaagccacaggtgttgattgttataaaataacatgctgccattcttgattgctagagtttttgttagtactttggatgcaattaaaactatgtgctatcacatgtgaaaagcttaataaattccatctatcagtag

SEQ ID NO: 5878 - protein, 49 aa, Homo sapiens
MPNVNCQAWSDLKHFLKAWLDLLQYKLSYENQILKATGVDCYKITCCHS

SEQ ID NO: 5879 - DNA, 1858 bp, Homo sapiens
agagtgagggagggcactccttcaaaccagtacctggaaggctcatctaaggtcttctaggcctagcattctaacatcaaatgatcatctgatgatcatttaaggttgttgaaaaattctggttgtgaacttctttgtctttttagttcttcatgatcatgcaggaaactccccaacttttaaatcatttgaagaaaaggtcgaaaacttaaaggcaatagggggaaccaagcctgctggtggtgattttggagaagtcttgaattcggctgcaaatgctagtgccaccaccacggagcctcttccagaaaagacacaggagagcctgtgagattcctacctttgttctgctacccactgccagatgctgcaagcgaggtccaagcacatcttgtcaacatgcattgccatgaatttctaccagatgtgcttttatttagctttacatattcctttgaccaaatagtttgtgggttaaacaaaatgaaaatatcttcacctctattcttgggaaacaccctttagtgtacatttatgttcctttatttaggaaacaccattataaaaacacttatagtaaatggggacattcactataatgatctaagaagctacagattgtcatagttgttttcctgctttacaaaattgctccagatctggaatgccagtttgacctttgtcttctataatatttcctttttttcccctctttgaatctctgtatatttgattcttaactaaaattgttctcttaaatattctgaatcctggtaattaaaagtttgggtgtattttctttacctccaaggaaagaactactagctacaaaaaatattttggaataagcattgttttggtataaggtacatattttggttgaagacaccagactgaagtaaacagctgtgcatccaatttattatagttttgtaagtaacaatatgtaatcaaacttctaggtgacttgagagtggaacctcctatatcattatttagcaccgtttgtgacagtaaccatttcagtgtattgtttattataccacttatatcaacttatttttcaccaggttaaaattttaatttctacaaaataacattctgaatcaagcacactgtatgttcagtaggttgaactatgaacactgtcatcaatgttcagttcaaaagcctgaaagtttagatctagaagctggtaaaaatgacaatatcaatcacattaggggaaccattgttgtcttcacttaatccatttagcactatttaaaataagcacaccaagttatatgactaatataacttgaaaattttttatactgaggggttggtgataactcttgaggatgtaatgcattaataaaaatcaactcatcattttctacttgttttcaatgtgttggaaactgtaaaatgatactgtagaacctgtctcctactttgaaaactgaatgtcagggctgagtgaatcaaagtgtctagacatatttgcatagaggccaaggtattctattctaataactgcttactcaacactaccaccttttccttatactgtatatgattatggcctacaatgttgtatttgttatttattaaattgtgattgttttattattgtttatgccaaatgttaactgccaagcttggagtgacctaaagcattttttaaaagcatggctagatttacttcagtataaattatcttatgaaaaccaaattttaaaagccacaggtgttgattgttataaaataacatgctgccattcttgattgctagagtttttgttagtactttggatgcaattaaaactatgtgctatcacatgtgaaaagcttaataaattccatctatcagtag

SEQ ID NO: 5880 - protein, 49 aa, Homo sapiens; identical to SEQ ID NO: 5878

SEQ ID NO: 5881 - DNA, 2026 bp, Homo sapiens
ctttctggctggactagggcactgcagaagattgtgcctgagcttagggttgagcatacgaagatgtggtgatgccgctctgctggttatgaaggattttagaagttctgaaaaatgttttctctttttgagagttctccagcaggtggtgaccactgcacttgaaacaattgatattagaaaagatgagctgacccttcttttgctctgtgtgtttataatttaatatagttacaagaagacatctgaaaccttatcccaggctggacagaaggcctcagctgctttttcgtctgttggctcagtcatcaccaaaaagctggaagatgtaaaaaactccccaacttttaaatcatttgaagaaaaggtcgaaaacttaaaggcaatagggggaaccaagcctgctggtggtgattttggagaagtcttgaattcggctgcaaatgctagtgccaccaccacggagcctcttccagaaaagacacaggagagcctgtgagattcctacctttgttctgctacccactgccagatgctgcaagcgaggtccaagcacatcttgtcaacatgcattgccatgaatttctaccagatgtgcttttatttagctttacatattcctttgaccaaatagtttgtgggttaaacaaaatgaaaatatcttcacctctattcttgggaaacaccctttagtgtacatttatgttcctttatttaggaaacaccattataaaaacacttatagtaaatggggacattcactataatgatctaagaagctacagattgtcatagttgttttcctgctttacaaaattgctccagatctggaatgccagtttgacctttgtcttctataatatttcctttttttcccctctttgaatctctgtatatttgattcttaactaaaattgttctcttaaatattctgaatcctggtaattaaaagtttgggtgtattttctttacctccaaggaaagaactactagctacaaaaaatattttggaataagcattgttttggtataaggtacatattttggttgaagacaccagactgaagtaaacagctgtgcatccaatttattatagttttgtaagtaacaatatgtaatcaaacttctaggtgacttgagagtggaacctcctatatcattatttagcaccgtttgtgacagtaaccatttcagtgtattgtttattataccacttatatcaacttatttttcaccaggttaaaattttaatttctacaaaataacattctgaatcaagcacactgtatgttcagtaggttgaactatgaacactgtcatcaatgttcagttcaaaagcctgaaagtttagatctagaagctggtaaaaatgacaatatcaatcacattaggggaaccattgttgtcttcacttaatccatttagcactatttaaaataagcacaccaagttatatgactaatataacttgaaaattttttatactgaggggttggtgataactcttgaggatgtaatgcattaataaaaatcaactcatcattttctacttgttttcaatgtgttggaaactgtaaaatgatactgtagaacctgtctcctactttgaaaactgaatgtcagggctgagtgaatcaaagtgtctagacatatttgcatagaggccaaggtattctattctaataactgcttactcaacactaccaccttttccttatactgtatatgattatggcctacaatgttgtatttgttatttattaaattgtgattgttttattattgtttatgccaaatgttaactgccaagcttggagtgacctaaagcattttttaaaagcatggctagatttacttcagtataaattatcttatgaaaaccaaattttaaaagccacaggtgttgattgttataaaataacatgctgccattcttgattgctagagtttttgttagtactttggatgcaattaaaactatgtgctatcacatgtgaaaagcttaataaattccatctatcagtag

SEQ ID NO: 5882 - protein, 49 aa, Homo sapiens; identical to SEQ ID NO: 5878

SEQ ID NO: 5883 - DNA, 2124 bp, Homo sapiens
ggagcttaaatagggattttacttagattttgcactttaaaaaatggtttaaatccccaaccaggtctgctgagaacagacccagtccctgaggaaggagaagatgttgctgccacgatcagtgccacagagaccctctcggaagaggagcaggaagagctaagaagagaacttgcaaaggtagaagaagaaatccagactctgtctcaagtgttagcagcaaaagagaagcatctagcagagatcaagcggaaacttggaatcaattctctacaggaactaaaacagaacattgccaaagggtggcaagacgtgacagcaacatctgcttacaagaagacatctgaaaccttatcccaggctggacagaaggcctcagctgctttttcgtctgttggctcagtcatcaccaaaaagctggaagatgtaaaaaactccccaacttttaaatcatttgaagaaaaggtcgaaaacttaaaggcaatagggggaaccaagcctgctggtggtgattttggagaagtcttgaattcggctgcaaatgctagtgccaccaccacggagcctcttccagaaaagacacaggagagcctgtgagattcctacctttgttctgctacccactgccagatgctgcaagcgaggtccaagcacatcttgtcaacatgcattgccatgaatttctaccagatgtgcttttatttagctttacatattcctttgaccaaatagtttgtgggttaaacaaaatgaaaatatcttcacctctattcttgggaaacaccctttagtgtacatttatgttcctttatttaggaaacaccattataaaaacacttatagtaaatggggacattcactataatgatctaagaagctacagattgtcatagttgttttcctgctttacaaaattgctccagatctggaatgccagtttgacctttgtcttctataatatttcctttttttcccctctttgaatctctgtatatttgattcttaactaaaattgttctcttaaatattctgaatcctggtaattaaaagtttgggtgtattttctttacctccaaggaaagaactactagctacaaaaaatattttggaataagcattgttttggtataaggtacatattttggttgaagacaccagactgaagtaaacagctgtgcatccaatttattatagttttgtaagtaacaatatgtaatcaaacttctaggtgacttgagagtggaacctcctatatcattatttagcaccgtttgtgacagtaaccatttcagtgtattgtttattataccacttatatcaacttatttttcaccaggttaaaattttaatttctacaaaataacattctgaatcaagcacactgtatgttcagtaggttgaactatgaacactgtcatcaatgttcagttcaaaagcctgaaagtttagatctagaagctggtaaaaatgacaatatcaatcacattaggggaaccattgttgtcttcacttaatccatttagcactatttaaaataagcacaccaagttatatgactaatataacttgaaaattttttatactgaggggttggtgataactcttgaggatgtaatgcattaataaaaatcaactcatcattttctacttgttttcaatgtgttggaaactgtaaaatgatactgtagaacctgtctcctactttgaaaactgaatgtcagggctgagtgaatcaaagtgtctagacatatttgcatagaggccaaggtattctattctaataactgcttactcaacactaccaccttttccttatactgtatatgattatggcctacaatgttgtatttgttatttattaaattgtgattgttttattattgtttatgccaaatgttaactgccaagcttggagtgacctaaagcattttttaaaagcatggctagatttacttcagtataaattatcttatgaaaaccaaattttaaaagccacaggtgttgattgttataaaataacatgctgccattcttgattgctagagtttttgttagtactttggatgcaattaaaactatgtgctatcacatgtgaaaagcttaataaattccatctatcagtag

SEQ ID NO: 5884 - protein, 49 aa, Homo sapiens; identical to SEQ ID NO: 5878

SEQ ID NO: 5885 - DNA, 2576 bp, Homo sapiens
agtgtctgatgtttgcctgaactgtttgtacctctgggccatattgcagaaccctgcccttctttgttgactgaggaaagctcgctccctgcccaggtttttcattgttgatcgaaattaacaccaggtggtgaatagagcccctcctaaggttgctcaggataaatcatttattaaataggtctgcttatcaggaggggcgtgaaggctcccaaaaggaaatgctggcacctgggcccagaagccagggcctctaactcctggggttgatttcttcagtgaagttgcaccctacaaagggaatatggccaaagcggcactcaactgaaggctgatatcaggcgattagacagccatgcattctgcgtttgtctggaatggattgtagagagatggacttatatgaggactaccagtccccgtttgattttgatgcaggagtgaacaaaagctatctctacttgtctcctagtggaaattcatctccacccggatcacctactcttcagaaatttggtctgctgagaacagacccagtccctgaggaaggagaagatgttgctgccacgatcagtgccacagagaccctctcggaagaggagcaggaagagctaagaagagaacttgcaaaggtagaagaagaaatccagactctgtctcaagtgttagcagcaaaagagaagcatctagcagagatcaagcggaaacttggaatcaattctctacaggaactaaaacagaacattgccaaagggtggcaagacgtgacagcaacatctgcttacaagaagacatctgaaaccttatcccaggctggacagaaggcctcagctgctttttcgtctgttggctcagtcatcaccaaaaagctggaagatgtaaaaaactccccaacttttaaatcatttgaagaaaaggtcgaaaacttaaaggcaatagggggaaccaagcctgctggtggtgattttggagaagtcttgaattcggctgcaaatgctagtgccaccaccacggagcctcttccagaaaagacacaggagagcctgtgagattcctacctttgttctgctacccactgccagatgctgcaagcgaggtccaagcacatcttgtcaacatgcattgccatgaatttctaccagatgtgcttttatttagctttacatattcctttgaccaaatagtttgtgggttaaacaaaatgaaaatatcttcacctctattcttgggaaacaccctttagtgtacatttatgttcctttatttaggaaacaccattataaaaacacttatagtaaatggggacattcactataatgatctaagaagctacagattgtcatagttgttttcctgctttacaaaattgctccagatctggaatgccagtttgacctttgtcttctataatatttcctttttttcccctctttgaatctctgtatatttgattcttaactaaaattgttctcttaaatattctgaatcctggtaattaaaagtttgggtgtattttctttacctccaaggaaagaactactagctacaaaaaatattttggaataagcattgttttggtataaggtacatattttggttgaagacaccagactgaagtaaacagctgtgcatccaatttattatagttttgtaagtaacaatatgtaatcaaacttctaggtgacttgagagtggaacctcctatatcattatttagcaccgtttgtgacagtaaccatttcagtgtattgtttattataccacttatatcaacttatttttcaccaggttaaaattttaatttctacaaaataacattctgaatcaagcacactgtatgttcagtaggttgaactatgaacactgtcatcaatgttcagttcaaaagcctgaaagtttagatctagaagctggtaaaaatgacaatatcaatcacattaggggaaccattgttgtcttcacttaatccatttagcactatttaaaataagcacaccaagttatatgactaatataacttgaaaattttttatactgaggggttggtgataactcttgaggatgtaatgcattaataaaaatcaactcatcattttctacttgttttcaatgtgttggaaactgtaaaatgatactgtagaacctgtctcctactttgaaaactgaatgtcagggctgagtgaatcaaagtgtctagacatatttgcatagaggccaaggtattctattctaataactgcttactcaacactaccaccttttccttatactgtatatgattatggcctacaatgttgtatttgttatttattaaattgtgattgttttattattgtttatgccaaatgttaactgccaagcttggagtgacctaaagcattttttaaaagcatggctagatttacttcagtataaattatcttatgaaaaccaaattttaaaagccacaggtgttgattgttataaaataacatgctgccattcttgattgctagagtttttgttagtactttggatgcaattaaaactatgtgctatcacatgtgaaaagcttaataaattccatctatcagtag

SEQ ID NO: 5886 - protein, 223 aa, Homo sapiens; identical to SEQ ID NO: 5820

SEQ ID NO: 5887 - DNA, 2645 bp, Homo sapiens
agtgtctgatgtttgcctgaactgtttgtacctctgggccatattgcagaaccctgcccttctttgttgactgaggaaagctcgctccctgcccaggtttttcattgttgatcgaaattaacaccaggtggtgaatagagcccctcctaaggttgctcaggataaatcatttattaaataggtctgcttatcaggaggggcgtgaaggctcccaaaaggaaatgctggcacctgggcccagaagccagggcctctaactcctggggttgatttcttcagtgaagttgcaccctacaaagggaatatggccaaagcggcactcaactgaaggctgatatcaggcgattagacagccatgcattctgcgtttgtctggaatggattgtagagagatggacttatatgaggactaccagtccccgtttgattttgatgcaggagtgaacaaaagctatctctacttgtctcctagtggaaattcatctccacccggatcacctactcttcagaaatttggtctgctgagaacagacccagtccctgaggaaggagaagatgttgctgccacgatcagtgccacagagaccctctcggaagaggagcaggaagagctaagaagagaacttgcaaaggtagaagaagaaatccagactctgtctcaagtgttagcagcaaaagagaagcatctagcagagatcaagcggaaacttggaatcaattctctacaggaactaaaacagaacattgccaaagggtggcaagacgtgacagcaacatctgcttacaagaagacatctgaaaccttatcccaggctggacagaaggcctcagctgctttttcgtctgttggctcagtcatcaccaaaaagctggaagatgtaaaattgcaagccttttcacattcctttagtatacgttccattcagcattcaattagcatgcctgctatgagaaactccccaacttttaaatcatttgaagaaaaggtcgaaaacttaaaggcaatagggggaaccaagcctgctggtggtgattttggagaagtcttgaattcggctgcaaatgctagtgccaccaccacggagcctcttccagaaaagacacaggagagcctgtgagattcctacctttgttctgctacccactgccagatgctgcaagcgaggtccaagcacatcttgtcaacatgcattgccatgaatttctaccagatgtgcttttatttagctttacatattcctttgaccaaatagtttgtgggttaaacaaaatgaaaatatcttcacctctattcttgggaaacaccctttagtgtacatttatgttcctttatttaggaaacaccattataaaaacacttatagtaaatggggacattcactataatgatctaagaagctacagattgtcatagttgttttcctgctttacaaaattgctccagatctggaatgccagtttgacctttgtcttctataatatttcctttttttcccctctttgaatctctgtatatttgattcttaactaaaattgttctcttaaatattctgaatcctggtaattaaaagtttgggtgtattttctttacctccaaggaaagaactactagctacaaaaaatattttggaataagcattgttttggtataaggtacatattttggttgaagacaccagactgaagtaaacagctgtgcatccaatttattatagttttgtaagtaacaatatgtaatcaaacttctaggtgacttgagagtggaacctcctatatcattatttagcaccgtttgtgacagtaaccatttcagtgtattgtttattataccacttatatcaacttatttttcaccaggttaaaattttaatttctacaaaataacattctgaatcaagcacactgtatgttcagtaggttgaactatgaacactgtcatcaatgttcagttcaaaagcctgaaagtttagatctagaagctggtaaaaatgacaatatcaatcacattaggggaaccattgttgtcttcacttaatccatttagcactatttaaaataagcacaccaagttatatgactaatataacttgaaaattttttatactgaggggttggtgataactcttgaggatgtaatgcattaataaaaatcaactcatcattttctacttgttttcaatgtgttggaaactgtaaaatgatactgtagaacctgtctcctactttgaaaactgaatgtcagggctgagtgaatcaaagtgtctagacatatttgcatagaggccaaggtattctattctaataactgcttactcaacactaccaccttttccttatactgtatatgattatggcctacaatgttgtatttgttatttattaaattgtgattgttttattattgtttatgccaaatgttaactgccaagcttggagtgacctaaagcattttttaaaagcatggctagatttacttcagtataaattatcttatgaaaaccaaattttaaaagccacaggtgttgattgttataaaataacatgctgccattcttgattgctagagtttttgttagtactttggatgcaattaaaactatgtgctatcacatgtgaaaagcttaataaattccatctatcagtag

SEQ ID NO: 5888 - protein, 246 aa, Homo sapiens; identical to SEQ ID NO: 5818

SEQ ID NO: 5889 - DNA, 2646 bp, Homo sapiens
agtgtctgatgtttgcctgaactgtttgtacctctgggccatattgcagaaccctgcccttctttgttgactgaggaaagctcgctccctgcccaggtttttcattgttgatcgaaattaacaccaggtggtgaatagagcccctcctaaggttgctcaggataaatcatttattaaataggtctgcttatcaggaggggcgtgaaggctcccaaaaggaaatgctggcacctgggcccagaagccagggcctctaactcctggggttgatttcttcagtgaagttgcaccctacaaagggaatatggccaaagcggcactcaactgaaggctgatatcaggcgattagacagccatgcattctgcgtttgtctggaatggattgtagagagatggacttatatgaggactaccagtccccgtttgattttgatgcaggagtgaacaaaagctatctctacttgtctcctagtggaaattcatctccacccggatcacctactcttcagaaatttggtctgctgagaacagacccagtccctgaggaaggagaagatgttgctgccacgatcagtgccacagagaccctctcggaagaggagcaggaagagctaagaagagaacttgcaaaggtagaagaagaaatccagactctgtctcaagtgttagcagcaaaagagaagcatctagcagagatcaagcggaaacttggaatcaattctctacaggaactaaaacagaacattgccaaagggtggcaagacgtgacagcaacatctgcgaggagcaagcttctagcagcagaaaccgaactgctctgtcttctgtattgagagccatctgcagagctgttacaagaagacatctgaaaccttatcccaggctggacagaaggcctcagctgctttttcgtctgttggctcagtcatcaccaaaaagctggaagatgtaaaaaactccccaacttttaaatcatttgaagaaaaggtcgaaaacttaaaggcaatagggggaaccaagcctgctggtggtgattttggagaagtcttgaattcggctgcaaatgctagtgccaccaccacggagcctcttccagaaaagacacaggagagcctgtgagattcctacctttgttctgctacccactgccagatgctgcaagcgaggtccaagcacatcttgtcaacatgcattgccatgaatttctaccagatgtgcttttatttagctttacatattcctttgaccaaatagtttgtgggttaaacaaaatgaaaatatcttcacctctattcttgggaaacaccctttagtgtacatttatgttcctttatttaggaaacaccattataaaaacacttatagtaaatggggacattcactataatgatctaagaagctacagattgtcatagttgttttcctgctttacaaaattgctccagatctggaatgccagtttgacctttgtcttctataatatttcctttttttcccctctttgaatctctgtatatttgattcttaactaaaattgttctcttaaatattctgaatcctggtaattaaaagtttgggtgtattttctttacctccaaggaaagaactactagctacaaaaaatattttggaataagcattgttttggtataaggtacatattttggttgaagacaccagactgaagtaaacagctgtgcatccaatttattatagttttgtaagtaacaatatgtaatcaaacttctaggtgacttgagagtggaacctcctatatcattatttagcaccgtttgtgacagtaaccatttcagtgtattgtttattataccacttatatcaacttatttttcaccaggttaaaattttaatttctacaaaataacattctgaatcaagcacactgtatgttcagtaggttgaactatgaacactgtcatcaatgttcagttcaaaagcctgaaagtttagatctagaagctggtaaaaatgacaatatcaatcacattaggggaaccattgttgtcttcacttaatccatttagcactatttaaaataagcacaccaagttatatgactaatataacttgaaaattttttatactgaggggttggtgataactcttgaggatgtaatgcattaataaaaatcaactcatcattttctacttgttttcaatgtgttggaaactgtaaaatgatactgtagaacctgtctcctactttgaaaactgaatgtcagggctgagtgaatcaaagtgtctagacatatttgcatagaggccaaggtattctattctaataactgcttactcaacactaccaccttttccttatactgtatatgattatggcctacaatgttgtatttgttatttattaaattgtgattgttttattattgtttatgccaaatgttaactgccaagcttggagtgacctaaagcattttttaaaagcatggctagatttacttcagtataaattatcttatgaaaaccaaattttaaaagccacaggtgttgattgttataaaataacatgctgccattcttgattgctagagtttttgttagtactttggatgcaattaaaactatgtgctatcacatgtgaaaagcttaataaattccatctatcagtag

SEQ ID NO: 5890 - protein, 151 aa, Homo sapiens; identical to SEQ ID NO: 5816

SEQ ID NO: 5891 - DNA, 2076 bp, Homo sapiens
gggagtcgccggcggaggcgaggaggagctctgcgcggcgcggcgggcgatccgagccgggacgggctgcaggcgggggtgctgcagaggacacgaggcggcgggctggagacatggaccgcggcgagcaaggtagaagaagaaatccagactctgtctcaagtgttagcagcaaaagagaagcatctagcagagatcaagcggaaacttggaatcaattctctacaggaactaaaacagaacattgccaaagggtggcaagacgtgacagcaacatctgcttacaagaagacatctgaaaccttatcccaggctggacagaaggcctcagctgctttttcgtctgttggctcagtcatcaccaaaaagctggaagatgtaaaaaactccccaacttttaaatcatttgaagaaaaggtcgaaaacttaaaggcaatagggggaaccaagcctgctggtggtgattttggagaagtcttgaattcggctgcaaatgctagtgccaccaccacggagcctcttccagaaaagacacaggagagcctgtgagattcctacctttgttctgctacccactgccagatgctgcaagcgaggtccaagcacatcttgtcaacatgcattgccatgaatttctaccagatgtgcttttatttagctttacatattcctttgaccaaatagtttgtgggttaaacaaaatgaaaatatcttcacctctattcttgggaaacaccctttagtgtacatttatgttcctttatttaggaaacaccattataaaaacacttatagtaaatggggacattcactataatgatctaagaagctacagattgtcatagttgttttcctgctttacaaaattgctccagatctggaatgccagtttgacctttgtcttctataatatttcctttttttcccctctttgaatctctgtatatttgattcttaactaaaattgttctcttaaatattctgaatcctggtaattaaaagtttgggtgtattttctttacctccaaggaaagaactactagctacaaaaaatattttggaataagcattgttttggtataaggtacatattttggttgaagacaccagactgaagtaaacagctgtgcatccaatttattatagttttgtaagtaacaatatgtaatcaaacttctaggtgacttgagagtggaacctcctatatcattatttagcaccgtttgtgacagtaaccatttcagtgtattgtttattataccacttatatcaacttatttttcaccaggttaaaattttaatttctacaaaataacattctgaatcaagcacactgtatgttcagtaggttgaactatgaacactgtcatcaatgttcagttcaaaagcctgaaagtttagatctagaagctggtaaaaatgacaatatcaatcacattaggggaaccattgttgtcttcacttaatccatttagcactatttaaaataagcacaccaagttatatgactaatataacttgaaaattttttatactgaggggttggtgataactcttgaggatgtaatgcattaataaaaatcaactcatcattttctacttgttttcaatgtgttggaaactgtaaaatgatactgtagaacctgtctcctactttgaaaactgaatgtcagggctgagtgaatcaaagtgtctagacatatttgcatagaggccaaggtattctattctaataactgcttactcaacactaccaccttttccttatactgtatatgattatggcctacaatgttgtatttgttatttattaaattgtgattgttttattattgtttatgccaaatgttaactgccaagcttggagtgacctaaagcattttttaaaagcatggctagatttacttcagtataaattatcttatgaaaaccaaattttaaaagccacaggtgttgattgttataaaataacatgctgccattcttgattgctagagtttttgttagtactttggatgcaattaaaactatgtgctatcacatgtgaaaagcttaataaattccatctatcagtag

SEQ ID NO: 5892 - protein, 61 aa, Homo sapiens; identical to SEQ ID NO: 5822

SEQ ID NO: 5893 - DNA, 2201 bp, Homo sapiens
ggacttcgcgggagtcgccggcggaggcgaggaggagctctgcgcggcgcggcgggcgatccgagccgggacgggctgcaggcgggggtgctgcagaggacacgaggcggcgggctggagacatggaccgcggcgagcaaggtctgctgagaacagacccagtccctgaggaaggagaagatgttgctgccacgatcagtgccacagagaccctctcggaagaggagcaggaagagctaagaagagaacttgcaaaggtagaagaagaaatccagactctgtctcaagtgttagcagcaaaagagaagcatctagcagagatcaagcggaaacttggaatcaattctctacaggaactaaaacagaacattgccaaagggtggcaagacgtgacagcaacatctgcttacaagaagacatctgaaaccttatcccaggctggacagaaggcctcagctgctttttcgtctgttggctcagtcatcaccaaaaagctggaagatgtaaaaaactccccaacttttaaatcatttgaagaaaaggtcgaaaacttaaaggcaatagggggaaccaagcctgctggtggtgattttggagaagtcttgaattcggctgcaaatgctagtgccaccaccacggagcctcttccagaaaagacacaggagagcctgtgagattcctacctttgttctgctacccactgccagatgctgcaagcgaggtccaagcacatcttgtcaacatgcattgccatgaatttctaccagatgtgcttttatttagctttacatattcctttgaccaaatagtttgtgggttaaacaaaatgaaaatatcttcacctctattcttgggaaacaccctttagtgtacatttatgttcctttatttaggaaacaccattataaaaacacttatagtaaatggggacattcactataatgatctaagaagctacagattgtcatagttgttttcctgctttacaaaattgctccagatctggaatgccagtttgacctttgtcttctataatatttcctttttttcccctctttgaatctctgtatatttgattcttaactaaaattgttctcttaaatattctgaatcctggtaattaaaagtttgggtgtattttctttacctccaaggaaagaactactagctacaaaaaatattttggaataagcattgttttggtataaggtacatattttggttgaagacaccagactgaagtaaacagctgtgcatccaatttattatagttttgtaagtaacaatatgtaatcaaacttctaggtgacttgagagtggaacctcctatatcattatttagcaccgtttgtgacagtaaccatttcagtgtattgtttattataccacttatatcaacttatttttcaccaggttaaaattttaatttctacaaaataacattctgaatcaagcacactgtatgttcagtaggttgaactatgaacactgtcatcaatgttcagttcaaaagcctgaaagtttagatctagaagctggtaaaaatgacaatatcaatcacattaggggaaccattgttgtcttcacttaatccatttagcactatttaaaataagcacaccaagttatatgactaatataacttgaaaattttttatactgaggggttggtgataactcttgaggatgtaatgcattaataaaaatcaactcatcattttctacttgttttcaatgtgttggaaactgtaaaatgatactgtagaacctgtctcctactttgaaaactgaatgtcagggctgagtgaatcaaagtgtctagacatatttgcatagaggccaaggtattctattctaataactgcttactcaacactaccaccttttccttatactgtatatgattatggcctacaatgttgtatttgttatttattaaattgtgattgttttattattgtttatgccaaatgttaactgccaagcttggagtgacctaaagcattttttaaaagcatggctagatttacttcagtataaattatcttatgaaaaccaaattttaaaagccacaggtgttgattgttataaaataacatgctgccattcttgattgctagagtttttgttagtactttggatgcaattaaaactatgtgctatcacatgtgaaaagcttaataaattccatctatcagtag

SEQ ID NO: 5894 - protein, 183 aa, Homo sapiens; identical to SEQ ID NO: 5824

SEQ ID NO: 5895 - DNA, 2346 bp, Homo sapiens
ggttgggtgacgccccaggaaagcgctccaggccgagggcgggcggcgccgccgcgcccgacgcctctgggggtggggacttcgcgggagtcgccggcggaggcgaggaggagctctgcgcggcgcggcgggcgatccgagccgggacgggctgcaggcgggggtgctgcagaggacacgaggcggcgggctggagacatggaccgcggcgagcaaggtctgctgagaacagacccagtccctgaggaaggagaagatgttgctgccacgatcagtgccacagagaccctctcggaagaggagcaggaagagctaagaagagaacttgcaaaggtagaagaagaaatccagactctgtctcaagtgttagcagcaaaagagaagcatctagcagagatcaagcggaaacttggaatcaattctctacaggaactaaaacagaacattgccaaagggtggcaagacgtgacagcaacatctgcttacaagaagacatctgaaaccttatcccaggctggacagaaggcctcagctgctttttcgtctgttggctcagtcatcaccaaaaagctggaagatgtaaaattgcaagccttttcacattcctttagtatacgttccattcagcattcaattagcatgcctgctatgagaaactccccaacttttaaatcatttgaagaaaaggtcgaaaacttaaaggcaatagggggaaccaagcctgctggtggtgattttggagaagtcttgaattcggctgcaaatgctagtgccaccaccacggagcctcttccagaaaagacacaggagagcctgtgagattcctacctttgttctgctacccactgccagatgctgcaagcgaggtccaagcacatcttgtcaacatgcattgccatgaatttctaccagatgtgcttttatttagctttacatattcctttgaccaaatagtttgtgggttaaacaaaatgaaaatatcttcacctctattcttgggaaacaccctttagtgtacatttatgttcctttatttaggaaacaccattataaaaacacttatagtaaatggggacattcactataatgatctaagaagctacagattgtcatagttgttttcctgctttacaaaattgctccagatctggaatgccagtttgacctttgtcttctataatatttcctttttttcccctctttgaatctctgtatatttgattcttaactaaaattgttctcttaaatattctgaatcctggtaattaaaagtttgggtgtattttctttacctccaaggaaagaactactagctacaaaaaatattttggaataagcattgttttggtataaggtacatattttggttgaagacaccagactgaagtaaacagctgtgcatccaatttattatagttttgtaagtaacaatatgtaatcaaacttctaggtgacttgagagtggaacctcctatatcattatttagcaccgtttgtgacagtaaccatttcagtgtattgtttattataccacttatatcaacttatttttcaccaggttaaaattttaatttctacaaaataacattctgaatcaagcacactgtatgttcagtaggttgaactatgaacactgtcatcaatgttcagttcaaaagcctgaaagtttagatctagaagctggtaaaaatgacaatatcaatcacattaggggaaccattgttgtcttcacttaatccatttagcactatttaaaataagcacaccaagttatatgactaatataacttgaaaattttttatactgaggggttggtgataactcttgaggatgtaatgcattaataaaaatcaactcatcattttctacttgttttcaatgtgttggaaactgtaaaatgatactgtagaacctgtctcctactttgaaaactgaatgtcagggctgagtgaatcaaagtgtctagacatatttgcatagaggccaaggtattctattctaataactgcttactcaacactaccaccttttccttatactgtatatgattatggcctacaatgttgtatttgttatttattaaattgtgattgttttattattgtttatgccaaatgttaactgccaagcttggagtgacctaaagcattttttaaaagcatggctagatttacttcagtataaattatcttatgaaaaccaaattttaaaagccacaggtgttgattgttataaaataacatgctgccattcttgattgctagagtttttgttagtactttggatgcaattaaaactatgtgctatcacatgtgaaaagcttaataaattccatctatcagtag

SEQ ID NO: 5896 - protein, 206 aa, Homo sapiens; identical to SEQ ID NO: 5826

SEQ ID NO: 5897 - DNA, 1468 bp, Homo sapiens
attacttatgtctgagactggccctgttcatggaatcaaatgcatactcttaaaatattagatcagaaattgagaatcttacattataaatacttgtatgtacctgcacatatatggtacagattatatctgttcttttgccgattgagaataatgttgaagaggaatcaattatattttcaaactagttggattttttttcagtatttgtatttactatttgtttttcttttctctccatagaaactccccaacttttaaatcatttgaagaaaaggtcgaaaacttaaaggcaatagggggaaccaagcctgctggtggtgattttggagaagtcttgaattcggctgcaaatgctagtgccaccaccacggagcctcttccagaaaagacacaggagagcctgtgagattcctacctttgttctgctacccactgccagatgctgcaagcgaggtccaagcacatcttgtcaacatgcattgccatgaatttctaccagatgtgcttttatttagctttacatattcctttgaccaaatagtttgtgggttaaacaaaatgaaaatatcttcacctctattcttgggaaacaccctttagtgtacatttatgttcctttatttaggaaacaccattataaaaacacttatagtaaatggggacattcactataatgatctaagaagctacagattgtcatagttgttttcctgctttacaaaattgctccagatctggaatgccagtttgacctttgtcttctataatatttcctttttttcccctctttgaatctctgtatatttgattcttaactaaaattgttctcttaaatattctgaatcctggtaattaaaagtttgggtgtattttctttacctccaaggaaagaactactagctacaaaaaatattttggaataagcattgttttggtataaggtacatattttggttgaagacaccagactgaagtaaacagctgtgcatccaatttattatagttttgtaagtaacaatatgtaatcaaacttctaggtgacttgagagtggaacctcctatatcattatttagcaccgtttgtgacagtaaccatttcagtgtattgtttattataccacttatatcaacttatttttcaccaggttaaaattttaatttctacaaaataacattctgaatcaagcacactgtatgttcagtaggttgaactatgaacactgtcatcaatgttcagttcaaaagcctgaaagtttagatctagaagctggtaaaaatgacaatatcaatcacattaggggaaccattgttgtcttcacttaatccatttagcactatttaaaataagcacaccaagttatatgactaatataacttgaaaattttttatactgaggggttggtgataactcttgaggatgtaatgcattaataaaaatcaactcatcattttctacttgttttc

SEQ ID NO: 5898 - protein, 67 aa, Homo sapiens; identical to SEQ ID NO: 5854

SEQ ID NO: 5899 - DNA, 1402 bp, Homo sapiens
actccttcaaaccagtacctggaaggctcatctaaggtcttctaggcctagcattctaacatcaaatgatcatctgatgatcatttaaggttgttgaaaaattctggttgtgaacttctttgtctttttagttcttcatgatcatgcaggattgcaagccttttcacattcctttagaaactccccaacttttaaatcatttgaagaaaaggtcgaaaacttaaaggcaatagggggaaccaagcctgctggtggtgattttggagaagtcttgaattcggctgcaaatgctagtgccaccaccacggagcctcttccagaaaagacacaggagagcctgtgagattcctacctttgttctgctacccactgccagatgctgcaagcgaggtccaagcacatcttgtcaacatgcattgccatgaatttctaccagatgtgcttttatttagctttacatattcctttgaccaaatagtttgtgggttaaacaaaatgaaaatatcttcacctctattcttgggaaacaccctttagtgtacatttatgttcctttatttaggaaacaccattataaaaacacttatagtaaatggggacattcactataatgatctaagaagctacagattgtcatagttgttttcctgctttacaaaattgctccagatctggaatgccagtttgacctttgtcttctataatatttcctttttttcccctctttgaatctctgtatatttgattcttaactaaaattgttctcttaaatattctgaatcctggtaattaaaagtttgggtgtattttctttacctccaaggaaagaactactagctacaaaaaatattttggaataagcattgttttggtataaggtacatattttggttgaagacaccagactgaagtaaacagctgtgcatccaatttattatagttttgtaagtaacaatatgtaatcaaacttctaggtgacttgagagtggaacctcctatatcattatttagcaccgtttgtgacagtaaccatttcagtgtattgtttattataccacttatatcaacttatttttcaccaggttaaaattttaatttctacaaaataacattctgaatcaagcacactgtatgttcagtaggttgaactatgaacactgtcatcaatgttcagttcaaaagcctgaaagtttagatctagaagctggtaaaaatgacaatatcaatcacattaggggaaccattgttgtcttcacttaatccatttagcactatttaaaataagcacaccaagttatatgactaatataacttgaaaattttttatactgaggggttggtgataactcttgaggatgtaatgcattaataaaaatcaactcatcattttctacttgttttc

SEQ ID NO: 5900 - protein, 45 aa, Homo sapiens
MLVPPPRSLFQKRHRRACEIPTFVLLPTARCCKRGPSTSCQHALP

SEQ ID NO: 5901 - DNA, 1390 bp, Homo sapiens
agagtgagggagggcactccttcaaaccagtacctggaaggctcatctaaggtcttctaggcctagcattctaacatcaaatgatcatctgatgatcatttaaggttgttgaaaaattctggttgtgaacttctttgtctttttagttcttcatgatcatgcaggaaactccccaacttttaaatcatttgaagaaaaggtcgaaaacttaaaggcaatagggggaaccaagcctgctggtggtgattttggagaagtcttgaattcggctgcaaatgctagtgccaccaccacggagcctcttccagaaaagacacaggagagcctgtgagattcctacctttgttctgctacccactgccagatgctgcaagcgaggtccaagcacatcttgtcaacatgcattgccatgaatttctaccagatgtgcttttatttagctttacatattcctttgaccaaatagtttgtgggttaaacaaaatgaaaatatcttcacctctattcttgggaaacaccctttagtgtacatttatgttcctttatttaggaaacaccattataaaaacacttatagtaaatggggacattcactataatgatctaagaagctacagattgtcatagttgttttcctgctttacaaaattgctccagatctggaatgccagtttgacctttgtcttctataatatttcctttttttcccctctttgaatctctgtatatttgattcttaactaaaattgttctcttaaatattctgaatcctggtaattaaaagtttgggtgtattttctttacctccaaggaaagaactactagctacaaaaaatattttggaataagcattgttttggtataaggtacatattttggttgaagacaccagactgaagtaaacagctgtgcatccaatttattatagttttgtaagtaacaatatgtaatcaaacttctaggtgacttgagagtggaacctcctatatcattatttagcaccgtttgtgacagtaaccatttcagtgtattgtttattataccacttatatcaacttatttttcaccaggttaaaattttaatttctacaaaataacattctgaatcaagcacactgtatgttcagtaggttgaactatgaacactgtcatcaatgttcagttcaaaagcctgaaagtttagatctagaagctggtaaaaatgacaatatcaatcacattaggggaaccattgttgtcttcacttaatccatttagcactatttaaaataagcacaccaagttatatgactaatataacttgaaaattttttatactgaggggttggtgataactcttgaggatgtaatgcattaataaaaatcaactcatcattttctacttgttttc

SEQ ID NO: 5902 - protein, 45 aa, Homo sapiens; identical to SEQ ID NO: 5900

SEQ ID NO: 5903 - DNA, 1558 bp, Homo sapiens
ctttctggctggactagggcactgcagaagattgtgcctgagcttagggttgagcatacgaagatgtggtgatgccgctctgctggttatgaaggattttagaagttctgaaaaatgttttctctttttgagagttctccagcaggtggtgaccactgcacttgaaacaattgatattagaaaagatgagctgacccttcttttgctctgtgtgtttataatttaatatagttacaagaagacatctgaaaccttatcccaggctggacagaaggcctcagctgctttttcgtctgttggctcagtcatcaccaaaaagctggaagatgtaaaaaactccccaacttttaaatcatttgaagaaaaggtcgaaaacttaaaggcaatagggggaaccaagcctgctggtggtgattttggagaagtcttgaattcggctgcaaatgctagtgccaccaccacggagcctcttccagaaaagacacaggagagcctgtgagattcctacctttgttctgctacccactgccagatgctgcaagcgaggtccaagcacatcttgtcaacatgcattgccatgaatttctaccagatgtgcttttatttagctttacatattcctttgaccaaatagtttgtgggttaaacaaaatgaaaatatcttcacctctattcttgggaaacaccctttagtgtacatttatgttcctttatttaggaaacaccattataaaaacacttatagtaaatggggacattcactataatgatctaagaagctacagattgtcatagttgttttcctgctttacaaaattgctccagatctggaatgccagtttgacctttgtcttctataatatttcctttttttcccctctttgaatctctgtatatttgattcttaactaaaattgttctcttaaatattctgaatcctggtaattaaaagtttgggtgtattttctttacctccaaggaaagaactactagctacaaaaaatattttggaataagcattgttttggtataaggtacatattttggttgaagacaccagactgaagtaaacagctgtgcatccaatttattatagttttgtaagtaacaatatgtaatcaaacttctaggtgacttgagagtggaacctcctatatcattatttagcaccgtttgtgacagtaaccatttcagtgtattgtttattataccacttatatcaacttatttttcaccaggttaaaattttaatttctacaaaataacattctgaatcaagcacactgtatgttcagtaggttgaactatgaacactgtcatcaatgttcagttcaaaagcctgaaagtttagatctagaagctggtaaaaatgacaatatcaatcacattaggggaaccattgttgtcttcacttaatccatttagcactatttaaaataagcacaccaagttatatgactaatataacttgaaaattttttatactgaggggttggtgataactcttgaggatgtaatgcattaataaaaatcaactcatcattttctacttgttttc

SEQ ID NO: 5904 - protein, 45 aa, Homo sapiens
MKDFRSSEKCFLFLRVLQQVVTTALETIDIRKDELTLLLLCVFII

SEQ ID NO: 5905 - DNA, 1656 bp, Homo sapiens
ggagcttaaatagggattttacttagattttgcactttaaaaaatggtttaaatccccaaccaggtctgctgagaacagacccagtccctgaggaaggagaagatgttgctgccacgatcagtgccacagagaccctctcggaagaggagcaggaagagctaagaagagaacttgcaaaggtagaagaagaaatccagactctgtctcaagtgttagcagcaaaagagaagcatctagcagagatcaagcggaaacttggaatcaattctctacaggaactaaaacagaacattgccaaagggtggcaagacgtgacagcaacatctgcttacaagaagacatctgaaaccttatcccaggctggacagaaggcctcagctgctttttcgtctgttggctcagtcatcaccaaaaagctggaagatgtaaaaaactccccaacttttaaatcatttgaagaaaaggtcgaaaacttaaaggcaatagggggaaccaagcctgctggtggtgattttggagaagtcttgaattcggctgcaaatgctagtgccaccaccacggagcctcttccagaaaagacacaggagagcctgtgagattcctacctttgttctgctacccactgccagatgctgcaagcgaggtccaagcacatcttgtcaacatgcattgccatgaatttctaccagatgtgcttttatttagctttacatattcctttgaccaaatagtttgtgggttaaacaaaatgaaaatatcttcacctctattcttgggaaacaccctttagtgtacatttatgttcctttatttaggaaacaccattataaaaacacttatagtaaatggggacattcactataatgatctaagaagctacagattgtcatagttgttttcctgctttacaaaattgctccagatctggaatgccagtttgacctttgtcttctataatatttcctttttttcccctctttgaatctctgtatatttgattcttaactaaaattgttctcttaaatattctgaatcctggtaattaaaagtttgggtgtattttctttacctccaaggaaagaactactagctacaaaaaatattttggaataagcattgttttggtataaggtacatattttggttgaagacaccagactgaagtaaacagctgtgcatccaatttattatagttttgtaagtaacaatatgtaatcaaacttctaggtgacttgagagtggaacctcctatatcattatttagcaccgtttgtgacagtaaccatttcagtgtattgtttattataccacttatatcaacttatttttcaccaggttaaaattttaatttctacaaaataacattctgaatcaagcacactgtatgttcagtaggttgaactatgaacactgtcatcaatgttcagttcaaaagcctgaaagtttagatctagaagctggtaaaaatgacaatatcaatcacattaggggaaccattgttgtcttcacttaatccatttagcactatttaaaataagcacaccaagttatatgactaatataacttgaaaattttttatactgaggggttggtgataactcttgaggatgtaatgcattaataaaaatcaactcatcattttctacttgttttc

SEQ ID NO: 5906 - protein, 45 aa, Homo sapiens; identical to SEQ ID NO: 5900

SEQ ID NO: 5907 - DNA, 2108 bp, Homo sapiens
agtgtctgatgtttgcctgaactgtttgtacctctgggccatattgcagaaccctgcccttctttgttgactgaggaaagctcgctccctgcccaggtttttcattgttgatcgaaattaacaccaggtggtgaatagagcccctcctaaggttgctcaggataaatcatttattaaataggtctgcttatcaggaggggcgtgaaggctcccaaaaggaaatgctggcacctgggcccagaagccagggcctctaactcctggggttgatttcttcagtgaagttgcaccctacaaagggaatatggccaaagcggcactcaactgaaggctgatatcaggcgattagacagccatgcattctgcgtttgtctggaatggattgtagagagatggacttatatgaggactaccagtccccgtttgattttgatgcaggagtgaacaaaagctatctctacttgtctcctagtggaaattcatctccacccggatcacctactcttcagaaatttggtctgctgagaacagacccagtccctgaggaaggagaagatgttgctgccacgatcagtgccacagagaccctctcggaagaggagcaggaagagctaagaagagaacttgcaaaggtagaagaagaaatccagactctgtctcaagtgttagcagcaaaagagaagcatctagcagagatcaagcggaaacttggaatcaattctctacaggaactaaaacagaacattgccaaagggtggcaagacgtgacagcaacatctgcttacaagaagacatctgaaaccttatcccaggctggacagaaggcctcagctgctttttcgtctgttggctcagtcatcaccaaaaagctggaagatgtaaaaaactccccaacttttaaatcatttgaagaaaaggtcgaaaacttaaaggcaatagggggaaccaagcctgctggtggtgattttggagaagtcttgaattcggctgcaaatgctagtgccaccaccacggagcctcttccagaaaagacacaggagagcctgtgagattcctacctttgttctgctacccactgccagatgctgcaagcgaggtccaagcacatcttgtcaacatgcattgccatgaatttctaccagatgtgcttttatttagctttacatattcctttgaccaaatagtttgtgggttaaacaaaatgaaaatatcttcacctctattcttgggaaacaccctttagtgtacatttatgttcctttatttaggaaacaccattataaaaacacttatagtaaatggggacattcactataatgatctaagaagctacagattgtcatagttgttttcctgctttacaaaattgctccagatctggaatgccagtttgacctttgtcttctataatatttcctttttttcccctctttgaatctctgtatatttgattcttaactaaaattgttctcttaaatattctgaatcctggtaattaaaagtttgggtgtattttctttacctccaaggaaagaactactagctacaaaaaatattttggaataagcattgttttggtataaggtacatattttggttgaagacaccagactgaagtaaacagctgtgcatccaatttattatagttttgtaagtaacaatatgtaatcaaacttctaggtgacttgagagtggaacctcctatatcattatttagcaccgtttgtgacagtaaccatttcagtgtattgtttattataccacttatatcaacttatttttcaccaggttaaaattttaatttctacaaaataacattctgaatcaagcacactgtatgttcagtaggttgaactatgaacactgtcatcaatgttcagttcaaaagcctgaaagtttagatctagaagctggtaaaaatgacaatatcaatcacattaggggaaccattgttgtcttcacttaatccatttagcactatttaaaataagcacaccaagttatatgactaatataacttgaaaattttttatactgaggggttggtgataactcttgaggatgtaatgcattaataaaaatcaactcatcattttctacttgttttc

SEQ ID NO: 5908 - protein, 223 aa, Homo sapiens; identical to SEQ ID NO: 5820

SEQ ID NO: 5909 - DNA, 2177 bp, Homo sapiens
agtgtctgatgtttgcctgaactgtttgtacctctgggccatattgcagaaccctgcccttctttgttgactgaggaaagctcgctccctgcccaggtttttcattgttgatcgaaattaacaccaggtggtgaatagagcccctcctaaggttgctcaggataaatcatttattaaataggtctgcttatcaggaggggcgtgaaggctcccaaaaggaaatgctggcacctgggcccagaagccagggcctctaactcctggggttgatttcttcagtgaagttgcaccctacaaagggaatatggccaaagcggcactcaactgaaggctgatatcaggcgattagacagccatgcattctgcgtttgtctggaatggattgtagagagatggacttatatgaggactaccagtccccgtttgattttgatgcaggagtgaacaaaagctatctctacttgtctcctagtggaaattcatctccacccggatcacctactcttcagaaatttggtctgctgagaacagacccagtccctgaggaaggagaagatgttgctgccacgatcagtgccacagagaccctctcggaagaggagcaggaagagctaagaagagaacttgcaaaggtagaagaagaaatccagactctgtctcaagtgttagcagcaaaagagaagcatctagcagagatcaagcggaaacttggaatcaattctctacaggaactaaaacagaacattgccaaagggtggcaagacgtgacagcaacatctgcttacaagaagacatctgaaaccttatcccaggctggacagaaggcctcagctgctttttcgtctgttggctcagtcatcaccaaaaagctggaagatgtaaaattgcaagccttttcacattcctttagtatacgttccattcagcattcaattagcatgcctgctatgagaaactccccaacttttaaatcatttgaagaaaaggtcgaaaacttaaaggcaatagggggaaccaagcctgctggtggtgattttggagaagtcttgaattcggctgcaaatgctagtgccaccaccacggagcctcttccagaaaagacacaggagagcctgtgagattcctacctttgttctgctacccactgccagatgctgcaagcgaggtccaagcacatcttgtcaacatgcattgccatgaatttctaccagatgtgcttttatttagctttacatattcctttgaccaaatagtttgtgggttaaacaaaatgaaaatatcttcacctctattcttgggaaacaccctttagtgtacatttatgttcctttatttaggaaacaccattataaaaacacttatagtaaatggggacattcactataatgatctaagaagctacagattgtcatagttgttttcctgctttacaaaattgctccagatctggaatgccagtttgacctttgtcttctataatatttcctttttttcccctctttgaatctctgtatatttgattcttaactaaaattgttctcttaaatattctgaatcctggtaattaaaagtttgggtgtattttctttacctccaaggaaagaactactagctacaaaaaatattttggaataagcattgttttggtataaggtacatattttggttgaagacaccagactgaagtaaacagctgtgcatccaatttattatagttttgtaagtaacaatatgtaatcaaacttctaggtgacttgagagtggaacctcctatatcattatttagcaccgtttgtgacagtaaccatttcagtgtattgtttattataccacttatatcaacttatttttcaccaggttaaaattttaatttctacaaaataacattctgaatcaagcacactgtatgttcagtaggttgaactatgaacactgtcatcaatgttcagttcaaaagcctgaaagtttagatctagaagctggtaaaaatgacaatatcaatcacattaggggaaccattgttgtcttcacttaatccatttagcactatttaaaataagcacaccaagttatatgactaatataacttgaaaattttttatactgaggggttggtgataactcttgaggatgtaatgcattaataaaaatcaactcatcattttctacttgttttc

SEQ ID NO: 5910 - protein, 246 aa, Homo sapiens; identical to SEQ ID NO: 5818

SEQ ID NO: 5911 - DNA, 1608 bp, Homo sapiens
gggagtcgccggcggaggcgaggaggagctctgcgcggcgcggcgggcgatccgagccgggacgggctgcaggcgggggtgctgcagaggacacgaggcggcgggctggagacatggaccgcggcgagcaaggtagaagaagaaatccagactctgtctcaagtgttagcagcaaaagagaagcatctagcagagatcaagcggaaacttggaatcaattctctacaggaactaaaacagaacattgccaaagggtggcaagacgtgacagcaacatctgcttacaagaagacatctgaaaccttatcccaggctggacagaaggcctcagctgctttttcgtctgttggctcagtcatcaccaaaaagctggaagatgtaaaaaactccccaacttttaaatcatttgaagaaaaggtcgaaaacttaaaggcaatagggggaaccaagcctgctggtggtgattttggagaagtcttgaattcggctgcaaatgctagtgccaccaccacggagcctcttccagaaaagacacaggagagcctgtgagattcctacctttgttctgctacccactgccagatgctgcaagcgaggtccaagcacatcttgtcaacatgcattgccatgaatttctaccagatgtgcttttatttagctttacatattcctttgaccaaatagtttgtgggttaaacaaaatgaaaatatcttcacctctattcttgggaaacaccctttagtgtacatttatgttcctttatttaggaaacaccattataaaaacacttatagtaaatggggacattcactataatgatctaagaagctacagattgtcatagttgttttcctgctttacaaaattgctccagatctggaatgccagtttgacctttgtcttctataatatttcctttttttcccctctttgaatctctgtatatttgattcttaactaaaattgttctcttaaatattctgaatcctggtaattaaaagtttgggtgtattttctttacctccaaggaaagaactactagctacaaaaaatattttggaataagcattgttttggtataaggtacatattttggttgaagacaccagactgaagtaaacagctgtgcatccaatttattatagttttgtaagtaacaatatgtaatcaaacttctaggtgacttgagagtggaacctcctatatcattatttagcaccgtttgtgacagtaaccatttcagtgtattgtttattataccacttatatcaacttatttttcaccaggttaaaattttaatttctacaaaataacattctgaatcaagcacactgtatgttcagtaggttgaactatgaacactgtcatcaatgttcagttcaaaagcctgaaagtttagatctagaagctggtaaaaatgacaatatcaatcacattaggggaaccattgttgtcttcacttaatccatttagcactatttaaaataagcacaccaagttatatgactaatataacttgaaaattttttatactgaggggttggtgataactcttgaggatgtaatgcattaataaaaatcaactcatcattttctacttgttttc

SEQ ID NO: 5912 - protein, 61 aa, Homo sapiens; identical to SEQ ID NO: 5822

SEQ ID NO: 5913 - DNA, 1733 bp, Homo sapiens
ggacttcgcgggagtcgccggcggaggcgaggaggagctctgcgcggcgcggcgggcgatccgagccgggacgggctgcaggcgggggtgctgcagaggacacgaggcggcgggctggagacatggaccgcggcgagcaaggtctgctgagaacagacccagtccctgaggaaggagaagatgttgctgccacgatcagtgccacagagaccctctcggaagaggagcaggaagagctaagaagagaacttgcaaaggtagaagaagaaatccagactctgtctcaagtgttagcagcaaaagagaagcatctagcagagatcaagcggaaacttggaatcaattctctacaggaactaaaacagaacattgccaaagggtggcaagacgtgacagcaacatctgcttacaagaagacatctgaaaccttatcccaggctggacagaaggcctcagctgctttttcgtctgttggctcagtcatcaccaaaaagctggaagatgtaaaaaactccccaacttttaaatcatttgaagaaaaggtcgaaaacttaaaggcaatagggggaaccaagcctgctggtggtgattttggagaagtcttgaattcggctgcaaatgctagtgccaccaccacggagcctcttccagaaaagacacaggagagcctgtgagattcctacctttgttctgctacccactgccagatgctgcaagcgaggtccaagcacatcttgtcaacatgcattgccatgaatttctaccagatgtgcttttatttagctttacatattcctttgaccaaatagtttgtgggttaaacaaaatgaaaatatcttcacctctattcttgggaaacaccctttagtgtacatttatgttcctttatttaggaaacaccattataaaaacacttatagtaaatggggacattcactataatgatctaagaagctacagattgtcatagttgttttcctgctttacaaaattgctccagatctggaatgccagtttgacctttgtcttctataatatttcctttttttcccctctttgaatctctgtatatttgattcttaactaaaattgttctcttaaatattctgaatcctggtaattaaaagtttgggtgtattttctttacctccaaggaaagaactactagctacaaaaaatattttggaataagcattgttttggtataaggtacatattttggttgaagacaccagactgaagtaaacagctgtgcatccaatttattatagttttgtaagtaacaatatgtaatcaaacttctaggtgacttgagagtggaacctcctatatcattatttagcaccgtttgtgacagtaaccatttcagtgtattgtttattataccacttatatcaacttatttttcaccaggttaaaattttaatttctacaaaataacattctgaatcaagcacactgtatgttcagtaggttgaactatgaacactgtcatcaatgttcagttcaaaagcctgaaagtttagatctagaagctggtaaaaatgacaatatcaatcacattaggggaaccattgttgtcttcacttaatccatttagcactatttaaaataagcacaccaagttatatgactaatataacttgaaaattttttatactgaggggttggtgataactcttgaggatgtaatgcattaataaaaatcaactcatcattttctacttgttttc

SEQ ID NO: 5914 - protein, 183 aa, Homo sapiens; identical to SEQ ID NO: 5824

SEQ ID NO: 5915 - DNA, 1878 bp, Homo sapiens
ggttgggtgacgccccaggaaagcgctccaggccgagggcgggcggcgccgccgcgcccgacgcctctgggggtggggacttcgcgggagtcgccggcggaggcgaggaggagctctgcgcggcgcggcgggcgatccgagccgggacgggctgcaggcgggggtgctgcagaggacacgaggcggcgggctggagacatggaccgcggcgagcaaggtctgctgagaacagacccagtccctgaggaaggagaagatgttgctgccacgatcagtgccacagagaccctctcggaagaggagcaggaagagctaagaagagaacttgcaaaggtagaagaagaaatccagactctgtctcaagtgttagcagcaaaagagaagcatctagcagagatcaagcggaaacttggaatcaattctctacaggaactaaaacagaacattgccaaagggtggcaagacgtgacagcaacatctgcttacaagaagacatctgaaaccttatcccaggctggacagaaggcctcagctgctttttcgtctgttggctcagtcatcaccaaaaagctggaagatgtaaaattgcaagccttttcacattcctttagtatacgttccattcagcattcaattagcatgcctgctatgagaaactccccaacttttaaatcatttgaagaaaaggtcgaaaacttaaaggcaatagggggaaccaagcctgctggtggtgattttggagaagtcttgaattcggctgcaaatgctagtgccaccaccacggagcctcttccagaaaagacacaggagagcctgtgagattcctacctttgttctgctacccactgccagatgctgcaagcgaggtccaagcacatcttgtcaacatgcattgccatgaatttctaccagatgtgcttttatttagctttacatattcctttgaccaaatagtttgtgggttaaacaaaatgaaaatatcttcacctctattcttgggaaacaccctttagtgtacatttatgttcctttatttaggaaacaccattataaaaacacttatagtaaatggggacattcactataatgatctaagaagctacagattgtcatagttgttttcctgctttacaaaattgctccagatctggaatgccagtttgacctttgtcttctataatatttcctttttttcccctctttgaatctctgtatatttgattcttaactaaaattgttctcttaaatattctgaatcctggtaattaaaagtttgggtgtattttctttacctccaaggaaagaactactagctacaaaaaatattttggaataagcattgttttggtataaggtacatattttggttgaagacaccagactgaagtaaacagctgtgcatccaatttattatagttttgtaagtaacaatatgtaatcaaacttctaggtgacttgagagtggaacctcctatatcattatttagcaccgtttgtgacagtaaccatttcagtgtattgtttattataccacttatatcaacttatttttcaccaggttaaaattttaatttctacaaaataacattctgaatcaagcacactgtatgttcagtaggttgaactatgaacactgtcatcaatgttcagttcaaaagcctgaaagtttagatctagaagctggtaaaaatgacaatatcaatcacattaggggaaccattgttgtcttcacttaatccatttagcactatttaaaataagcacaccaagttatatgactaatataacttgaaaattttttatactgaggggttggtgataactcttgaggatgtaatgcattaataaaaatcaactcatcattttctacttgttttc

SEQ ID NO: 5916 - protein, 206 aa, Homo sapiens; identical to SEQ ID NO: 5826

SEQ ID NO: 5917 - DNA, 587 bp, Homo sapiens
gatccgagccgggacgggctgcaggcgggggtgctgcagaggacacgaggcggcgggctggagacatggaccgcggcgagcaagctttttatttcatctggaatttctggcttgaattagggaaagatttatcttttctccactcatataaaatgtctgctgagaacagacccagtccctgaggaaggagaagatgttgctgccacgatcagtgccacagagaccctctcggaagaggagcaggaagagctaagaagagaacttgcaaaggtagaagaagaaatccagactctgtctcaagtgttagcagcaaaagagaagcatctagcagagatcaagcggaaacttggaatcaattctctacaggaactaaaacagaacattgccaaagggtggcaagacgtgacagcaacatctgcttacaagaagacatctgaaaccttatcccaggctggacagaaggcctcagctgctttttcgtctgttggctcagtcatcaccaaaaagctggaagatgtaaaattgcaagccttttcacattcctttagtatacgttccattcagcattcaattagcatgcctgctat

SEQ ID NO: 5918 - protein, 38 aa, Homo sapiens
MDRGEQAFYFIWNFWLELGKDLSFLHSYKMSAENRPSP

SEQ ID NO: 5919 - DNA, 564 bp, Homo sapiens
ggaggcgaggaggagctctgcgcggcgcggcgggcgatccgagccgggacgggctgcaggcgggggtgctgcagaggacacgaggcggcgggctggagacatggaccgcggcgagcaaggtctgctgagaacagacccagtccctgaggaaggagaagatgttgctgccacgatcagtgccacagagaccctctcggaagaggagcaggaagagctaagaagagaacttgcaaaggtagaagaagaaatccagactctgtctcaagtgttagcagcaaaagagaagcatctagcagagatcaagcggaaacttggaatcaattctctacaggaactaaaacagaacattgccaaagggtggcaagacgtgacagcaacatctgcttacaagaagacatctgaaaccttatcccaggctggacagaaggcctcagctgctttttcgtctgttggctcagtcatcaccaaaaagctggaagatgtaaagtatgtcctcatttttccttgctcattaagtagctgacgcaaattaaaatgttattgttgttgcatctgtttcctgac

SEQ ID NO: 5920 - protein, 140 aa, Homo sapiens
MDRGEQGLLRTDPVPEEGEDVAATISATETLSEEEQEELRRELAKVEEEIQTLSQVLAAKEKHLAEIKRKLGINSLQELKQNIAKGWQDVTATSAYKKTSETLSQAGQKASAAFSSVGSVITKKLEDVKYVLIFPCSLSS

SEQ ID NO: 5921 - DNA, 1920 bp, Homo sapiens
agtgtctgatgtttgcctgaactgtttgtacctctgggccatattgcagaaccctgcccttctttgttgactgaggaaagctcgctccctgcccaggtttttcattgttgatcgaaattaacaccaggtggtgaatagagcccctcctaaggttgctcaggataaatcatttattaaataggtctgcttatcaggaggggcgtgaaggctcccaaaaggaaatgctggcacctgggcccagaagccagggcctctaactcctggggttgatttcttcagtgaagttgcaccctacaaagggaatatggccaaagcggcactcaactgaaggctgatatcaggcgattagacagccatgcattctgcgtttgtctggaatggattgtagagagatggacttatatgaggactaccagtccccgtttgattttgatgcaggagtgaacaaaagctatctctacttgtctcctagtggaaattcatctccacccggatcacctactcttcagaaatttgactgcaccttttaattttaatgataatgatttgctgccacctacgggctaatgtggaaagagcagaacatgtcattaccaactttcttagatgctgaatataaaatctcaaggtcatcctggcagacttgaagccaactggacaacccgtcatcctcttttctgagagatttattttccttgatagcctagccgcatacttgaatagaaccagaatccccttggattctttttggaattgggcagtatacataaagcattgtgttagcagtcagatactgtatttctccccttgtttgagtagatttgcaaaacagtgtgtatcaaaaaagcatgaaagagtctttgctatttaagtaatggtttggtacctgagttttgcttgttttgttttggagatctgttgtagttggagaacctgggagttctgtacaaaacattaaaaataaaataacgtttaacaggtagctctgttatggttcttactgtgttgccttatatgattgttacttgaatgcttgactctcagtttcaatctcatacaactttcttcacataatctgacatagagggtagatttacaagcacacacagatgctgggaaatggtttctgacagtacatagtacagcacgttgttcacggtgtggtttggcaggagttggagtaagaggtgccaatgccagctagcaggagacgggtccagtaagggctacctgccaacctcaggggtcacactttgctttgaaaacagtaaggaatcaccaaaggattttaagctgaagagtgatacagtcagatttctattatagaaatattatttgggcagtctgttcacaaatattttagaggaagacctgcggaagcaattatgcattgagcttttctacttgctgattgtacctattaaatattttatattcagtcaagagcttaatcatattttttgccagtccgatttgtggtttttgaattttttgtgttacttttatgcctttaacagttctgtgctttccaggtaggcactattttggtgctgccatgctgatgattattattataattattaactgctattaatcagtgagtgtacagtagagcctgtaccaagtgcctttgtaacttgtacaccatgtacataagcatcatctcattgactcatgtaattctctaatgcttgctgcgacgctggctgcttgttccacagtgtggttattctccttcctttttcttctgtgtctgctccctggcgccttgcattgggcaggatgccacattgctgctgtggctgaactggcagttctcagaaatggtcctggggggtagcagggaacaactgcagtggctgtgatgctcactggcaggaagagcaggcagaggagtaaaccttcccctggtttctttgc

SEQ ID NO: 5922 - protein, 50 aa, Homo sapiens
MDCREMDLYEDYQSPFDFDAGVNKSYLYLSPSGNSSPPGSPTLQKFDCTF

SEQ ID NO: 5923 - DNA, 5149 bp, Homo sapiens
aagcaccaacctatcaaggagaagtcccacccagtctgccctgtgcctatataaaggcgacaagtggcggccgcagcactcattgaagccgccagttgggagaggagcagagccaggccggtgctcccgaaggcagcaagatgttgcgagccacagctccctgctggttcccccctggatacccagaagctaagaaggtggccgaggaggcggccctggaggcaagccgccatttgggaggggagcagagccaggccggtgctcccgaaggcagcaagatgttgcgagccacagctccctgctggttccgccctggatacccagaagctaagaaggtggccaaggaggcggccccggaggcaagccgccatttgggagcggagcagagcccggccggtgctcccgaaggcagcaagatgttgcgagccacagctccctgctggttcccacctggatacccagaagctaagaaggtggccgaggaggcggccctcgaggctccagaattcccactgccctctcatcagcctgcccagagcttcgggctctgggtgccccagatgcacaagcaggcctcagcatttgtggacatccaggcggagccccagaacaggggtccggcggtgcccccagcgtggcccaagatggtgacggagtcgtgctacttccctgcgcagaggggatcggcctgccgcttgccagccgccccaaggctgacagagaggccctcgggagtccgcatctcagcccccaggaagaggaagacgatcgcccactcttccagcccttgcttggtcacaggttacacagatgccaagagaacccgggtggccagcagcagccaacgctcccgtggctccaaggtcggcagacagccagggaagactcgcaacaggtcagggatggcatgcaagaccaccgccaccaccagctctaagcgaatcgtccgtcgtccatccttaccgagtttgagtttgaagaaacccattatcctccgaagctctgggtgccaagtccccaccgtcctccgccgaggctatctccaactgttcaccgaagagtgtctcaagttctgcgcctccaagcaggaggccgaggagaaggcgctgaacgaggagaaggtggcctacgactgcagccccaacaagaacaggtacctgaacgtggtcctgaacaccctcaagagactgaagggcctgacccccagctccatgcccggcctcagcagggccgccctgtacagccgcctccaggagttcctgctcacccaggaccagctcaaggagaacggctaccccttcccgcaccccgagcggcccggaggcgccgtcctcttcactggccaggggaaggggcccggcgactcctcctgcagggtctgctgccgttgtggcaccgagtacctggtgtcctcctcgggccgctgtgtacgcgaccagttgtgttattatcactgggggcgggtccgctcgagccaggtggctggaggccgggttagccagtacacctgctgtgcagctgctcctggctctgtgggctgccaggtggcaaagcagcacgtgcgggacggccgcaaggagagcctcgatggcttcgtggagaccttcaagaaagagttgtccagagacgcttatccaggaatctacgccttggactgtgagatgtgctacaccacgcatggcctggagctgacccgcgtcaccgtggtggacgccgacatgcgagtggtgtacgacaccttcgtcaagcccgacaacgagatcgtggactacaacaccaggttttccggagtcaccgaggccgacgtcgccaagacgagcatcacgttgccccaagtccaagccatcctgctgagctttttcagcgcccaaaccatcctcatcgggcacagcctggagagcgacctgctggccctgaagctcatccacaacaccgtggtggacacggccgtgctcttcccgcactacctgggtttcccctacaagcgctccctcaggaatctcgcggccgactacctggcacagatcatccaggacagccaggacggccacaactccagcgaggacgcaaacgcctgcctgcagctggtgatgtggaaggtccgacagcgcgcccagatccagccacgccaccggtccgcctctcccgccgccctggcctgtccttagccccaggcctcttccaaaaccgccatcagtcccgagagctcaccctgcccacctcgccgcaaagcgaaagaaactggagcagccggcggcaggagagggcaaaaagccaagagtaaccccaaccccccactcccggtcccccggaatccctgccgcggcccctcgggcctgtccacatccctctgcccctcccagacctctgtccttccaccaatcgcctcccgcagccccgagccgccactcccagtcccccgagtccctgccgcgcgccctcgcgcctgtccacatccctctgcccatccgagacctctgtccttacaccactagccaccccacgtgggacttccatggcttctgagtacaaggccagccccccggcccaccagctttcggaatgcctgcttacctctttttctgtactatttacggttgttgcttcctaaacatgaactacgtttaggctgatatttcagacaatgaaacctttgagtgcccgtagcgggaagatctcggttgctgagtgcagggaaggaggatgtaattccatcatatatactctctgtgcctaccgcatttggaaccatgcgagtgatacctatttataaaataaaataaaccaagcaaaagtacgaacttagcaacactatattgagttaatagaacggtatcttgtatttcttctgtccaggtatacttataaatgcctgcagggatttcaccacctcagggtggagggactgaatgcttgtgagggaattaggatggtggaatattggtgttaccagggaagggggcgggatgtttgaaaatgctatgtttactcgttcttgggttccaataaaggagaaacagggcacaggagtcggaaggactagtggcaatagtgatgaaaggacctccttatcatgctggcaatgttaattacccaggtgtaggaagccatacactgaggcggaagatcgcaagtcagagtggccggcaggcacaacctcctggcacaccagaggcaggtcttcaatacccactggtttccccaacaggctgcgtaagggaccctgagccacagtgagttggtcaaatgctcctgacagtgtggagaaaccaacagacaaaacgtgggtgcaaaagtgatgagaccccacactttacactcgtggtgacaatgaagctattaagtaacagcttctcaacctatgctgtttcctgttggatgcacataatccatttgcactgcagacaattttaggatgtggtttacagtaaggtggatggtaccttatggcaaaaatctctcagaaatttatgtgtggttttaaagtcattccagtcctagcacgttgtgcttttcagagacgccatagctgtttttccctttgtaatatcaaagcagtaatatgttctctggaggcctgttgggtgaatttaatggaatcaagttaagtaggtgccagaaccattgctgttttccctccatagccctgccacccactgtaaaaaggttgatgagattacttaatgatttccaattaagttgtatttccaaatatcatgatttccattttaatgtagttggtatggagctctgtgagtgtgtgcttcttttattatggatcacgttcagcttctttttatttgcctcctagtcataatagtaaaactctactcctctactccgaggagtccctaccacccatctcatcactttccagcccagcactcttcatgctcattcatttaaagcattcaacattgtgtaaatgaatcttggaaggcaaaagctactgaatttagcgaatttgtggaggcattgccacaaatcagccaggtgaagtttcacacaatcgaagactgcacaactcctagaaggcagcactatgctgcaaacccagacggccactcttctcacccctcgtccgtttgctgttctggataatgaggttcaaaagtcacctaggcaactgccaaaatagctgaaatggagaaagggcttcaggctggtgactagcagaggtccacctgacccccgtaagctgctgaacaagtagggctgccagaaatgtcccactagggaatttggtagagacgaagacatgctcaccggacaagggttcctcccaggatacgcccgagcggaagaagcgggctctgagccacgccctttcaccctcctctaccccgccctgggctggtgaaggtgcgcgccaggatgtggactaccgagccctgaagaaataagtccttccactttgaccccatggaggattgcctgtgaggaacttaaacgagtctaccagtgtctagacacgggggcaggtctgtccggcacagcagctccctcaaggaggagaagagtgaggagaaaggaaactcaagtctcaccattctgtcctgggagagaagaggaggatctcatctctcatctgtccaaacaagtcaaggagactttctctcatctttccaagcaaggcaaggctgtgttgaacattgcccaactcctgggagagaagtgggtgcggtccacttcctgtcctcaatttgtccgcagcggaggagtgcacagagcaaggaaaggcaacccaatcctaggtagcccaattccagtagccattataggactgccctgcagggacagttacttaactcaggaaaagcaacctagctccaagtttagcaaccgggagctccagttgattccattagcgcaccccctgaggcattcccaagctggagtctggtggaagatgaggctcagggtgattggactgaagcaccaacctatcaaggagaagtcccacccagtctgccctgtgcgtatataaaggcgacgcgtggcggccgcagcactcattgaagccgccagttgggagaggagcagagccaggccggtgctcccgaaggcagcaagatgttgcgagccacagctccctgctggttcccacctggatacccagaaactaagaaggtggccgaggaggcggccc

SEQ ID NO: 5924 - protein, 31 aa, Homo sapiens
MASEYKASPPAHQLSECLLTSFSVLFTVVAS

SEQ ID NO: 5925 - DNA, 5402 bp, Homo sapiens
aagcaccaacctatcaaggagaagtcccacccagtctgccctgtgcctatataaaggcgacaagtggcggccgcagcactcattgaagccgccagttgggagaggagcagagccaggccggtgctcccgaaggcagcaagatgttgcgagccacagctccctgctggttcccccctggatacccagaagctaagaaggtggccgaggaggcggccctggaggcaagccgccatttgggaggggagcagagccaggccggtgctcccgaaggcagcaagatgttgcgagccacagctccctgctggttccgccctggatacccagaagctaagaaggtggccaaggaggcggccccggaggcaagccgccatttgggagcggagcagagcccggccggtgctcccgaaggcagcaagatgttgcgagccacagctccctgctggttcccacctggatacccagaagctaagaaggtggccgaggaggcggccctcgaggctccagaattcccactgccctctcatcagcctgcccagagcttcgggctctgggtgccccagatgcacaagcaggcctcagcatttgtggacatccaggcggagccccagaacaggggtccggcggtgcccccagcgtggcccaagatggtgacggagtcgtgctacttccctgcgcagaggggatcggcctgccgcttgccagccgccccaaggctgacagagaggccctcgggagtccgcatctcagcccccaggaagaggaagacgatcgcccactcttccagcccttgcttggtcacaggttacacagatgccaagagaacccgggtggccagcagcagccaacgctcccgtggctccaaggtcggcagacagccagggaagacgcgcaacaggtcagggatggcatgcaagaccaccgccaccaccagctctaagcgaatcgtccgtcgtccatccttaccgagtttgagtttgaagaaacccattatcctccgaagctctgggtgtcaagtccccaccgtcctccgccgaggctatctccaactgttcaccgaagagtgtctcaagttctgcgcctccaagcaggaggccgaggagaaggcgctgaacgaggagaaggtggcctacgactgcagccccaacaagaacaggtacctgaacgtggtcctgaacaccctcaagagactgaagggcctgacccccagctccatgcccggcctcagcagggccgccctgtacagccgcctccaggagttcctgctcacccaggaccagctcaaggagaacggctaccccttcccgcaccccgagcggcccggaggcgccgtcctcttcactggccaggggaaggggcccggcgactcctcctgcagggtctgctgccgttgtggcaccgagtacctggtgtcctcctcgggccgctgtgtacgcgaccagttgtgttattatcactgggggcgggtccgctcgagccaggtggctggaggccgggttagccagtacacctgctgtgcagctgctcctggctctgtgggctgccaggtggcaaagcagcacgtgcgggacggccgcaaggagagcctccatggcttcgtggagaccttcaagaaagagttgtccagagacgcttatccaggaatctacgccttggactgtgagatgtgctacaccacgcatggcctagagctggcccgcgtcaccgtggtggacgccgacatgcgagtggtgtacgacaccttcgtcaagcccgacaacgagatcgtggactacaacaccaggttttccggagtcaccgaggccgacgtcgctaagacgagcatcacgttgccccaagtccaagccatcctgctgagctttttcagcgcccaaaccatcctcatcgggcacagcctggagagcgacctgctggccctgaagctcatccacagcaccgtggtggacacggccgtgctcttcccgcactacctgggtttcccctacaagcgctccctcaggaatctcgcggccgactacctggcacagatcatccaggacagccaggacggccacaactccagcgaggacgcaaacgcctgcctgcagctggtgatgtggaaggtccgacagcgcgcccagatccagccacgccaccggtccgcctctcccgccgccctggcctgtccttagccccaggcctcttccaaaaccgccatcagtcccgagagctcaccctgcccacctcgccgcaaagcgaaagaaactggagcagccggcggcaggagagggcaaaaagccaagagtaaccccaaccccccactcccggtcccccggaatccctgccgcggcccctcgggcctgtccacatccctctgcccctcccagacctctgtccttccaccaatcgcctcccgcagccccgagccgccactcccagtcccccgagtccctgccgcgcgccctcgcgcctgtccacatccctctgcccatccgagacctctgtccttacaccactagccaccccacgtgggacttccatggcttctgagtacaaggccagccccccggcccaccagctttcggaatgcctgcttacctctttttctgtctatttacggttgttgcttcctaaacataaactacgtttaggctgatatttcagacaatgaaacctttgagtgcccgtagcgggaagatctcggttgctgagtgcagggaaggaggatgtaattccatcatatatactctctgtgcctaccgcatttggaaccatgcgagtgatacgtatttataaaataaaataaaccaagcacaagtacgaacttagcaacactatattgagttaatagaacggtatcttgtatttcttctgtccaggtatacttataaatgcctgcagggatttcaccacctcagggtggagagactgaatgcttgtgagggaattaggatggtggaatattggtgttaccagggaagggggcgggatgtttgaaaatgctatgtttactcgttcttgggttccaataaaggagaaacagggcacaggagtcggaaggactagtggcaatagtgatgaaaggacctccttatcatgctggccatgttaattacccaggtgtaggaagccatacactgaggcggaagatcgcaagtcagagtggccggcaggcacaacgtcctggcacaccagaggcaggtcttcaatacccactggtttccccaacaggctgcgtaagggaccctgagccacagtgagttggtcaaatgctcctgacagtgtggagaaaccaacaggcaaaacgtgggtgcaaaagtgatgagaccccacactttacactcgtggtgacaatgaagctattatgtaacagcttctcaacctatgctgtttcctgttggatgcacataatccatttgcactgcagacaattttaggatgtggtttacagtaaggtggatggtaccttatggcaaaaatctctcagaaatttatgtgtggttttaaagtcattccagtcctagcacgttgtgcttttcagagacgccatagctgtttttccctttgtaatatcaaagcagtaatatgttctctggaggcctgttgggtgaatttaatggaatcaagttaagtaggtgccagaaccattgctgttttccctccatagccctgccacccactgtaaaaaggttgatgagattacttaatgatttccaattaagttgtatttccaaatatcatgatttccattttaatgtagttggtatggagctctgtgagtgtgtgcttcttttattatggatcacgttcagcttctttttatttgcctcctagtcataatagtaaaactctactcctctactccgaggagtccctaccacccatctcatcactttccagcccagcactcttcatgctcattcatttaaagcattcaacattgtgtaaatgaatcttggaaggcaaaagctactgaatttagcgaatttgtggaggcattgccacaaatcagccaggtgaagtttcacacaatcgaagactgcacaactcctagaaggcagcactatgctgcaaacccagacggccactcttctcacccctcgtccgtttgctgttctggataatgaggttcaaaagtcacctaggcaactgccaaaatagctgaaatggagaaagggcttcaggctggtgactagcaaaggtccacctgacccccgtaagctgctgaacaagtagggctgccagaaatgtcccactagggaatttggtagagacgaagacatgctcaccggacaagggttcctcccaggatacgcccgagcggaagaagcgggctctgagccacgccctttcaccctcctctaccccgccctgggctggtgaaggtgcgcgccaggatgtggactactgagccctgaagaaataagtccttccactttgaccccatggaggattgcctgtgaggaacttaaacgagtctaccagtgtctagacacgggggcaggtctgtccggcacagcagctccctcaaggaggagaagagtgaggagaaaggaaactcaagtctcaccattctgtcctgggagagaagaggaggatctcatctctcatctgtccaaacaaggcaaggagactttctctcatctttccaagcaaggcaaggacctgtgttgaacattgcccaagtcctgggagagaagtgggtgcggtccgcttcctgtcctcaatttgcccgcagcggcggagtgcacagagcagggaaaggcagccccagagggatcccgccctccagcatgcactaggtagcccaattccagtagccattataggactgccctgcagggacagttacttaactcaggaaaagcaacctagctccaagtttagcaaccgggagttccagttgattccattagcgcaccccctgaggcattcccaagctggagtctggtggaagatgaggctcagtgtgattggactgaagcaccaacctatcaaggagaagtcccacccagtctgccctgtgcctatataaaggcgacaagtggcggccgcagcactcattgaagccgccagttgggagaggagcagagccaggccggtgctcccgaaggcagcaagatgttgcgagccacagctccctgctggttcccccctggatacccagaagctaagaaggtggccgaggaggcggccctggaggcaagccgccatctgggaggggagcagagccaggccggtgctcccgaaggcagcaagatgttgcgagccacagctccctgctggttcccccctggatacccagaagctaagaaggtggccaaggaggcggccccggaggcaagccgccatttgggagcggagcagagcccggccggtgctcccgaaggcagcaagatgttgcgagccacagctccctgctggtt

SEQ ID NO: 5926 - protein, 38 aa, Homo sapiens
MASEYKASPPAHQLSECLLTSFSVYLRLLLPKHKLRLG

SEQ ID NO: 5927 - DNA, 1607 bp, Homo sapiens
ggcggagccccagaacaggggtccggcggtgcccccagcgtggcccaagatggtgacggagtcgtgctacttccctgcgcagaggggatcggcctgccgcttgccagccgccccaaggctgacagagaggccctcgggagtccgcatctcagcccccaggaagaggaagacgatcgcccactcttccagcccttgcttggtcacaggttacacagatgccaagagaacccgggtggccagcagcagccaacgctcccgtggctccaaggtcggcagacagccagggaagacgcgcaacaggtcagggatggcatgcaagaccaccgccaccaccagctctaagcgaatcgtccgtcgtgcatccttaccgagtttgagtttgaagaaacccattatcctccgaagctctgggtgccaagtccccaccgtcctccgccgaggctatctccaactgttcaccgaagagtgtctcaagttctgcgcctccaagcaggaggccgaggagaaggcgctgaacgaggagaaggtggcctacgactgcagccccaacaagaacaggtacctgaacgtggtcctgaacaccctcaagagactgaagggcctgacccccagctccatgcccggcctcagcagggccgccctgtacagccgcctccaggagttcctgctcacccaggaccagctcaaggagaacggctaccccttcccgcaccccgagcggcccggaggcgccgtcctcttcactggccaggggaaggggcccggcgactcctcctgcagggtctgctgccgttgtggcaccgagtacctggtgtcctcctcgggccgctgtgtacgcgaccagttgtgttattatcactgggggcgggtccgctcgagccaggtggctggaggccgggttagccagtacacctgctgtgcagctgctcctggctctgtgggctgccaggtggcaaagcagcacgtgcgggacggccgcaaggagagcctcgatggcttcgtggagaccttcaagaaagagttgtccagagacgcttatccaggaatctacgccttggactgtgagatgtgctacaccacgcatggcctagagctgacccgcgtcaccgtggtggacgccgacatgcgagtggtgtacgacaccttcgtcaagcccgacaacgagatcgtggactacaacaccaggttttccggagtcaccgaggccgacgtcgccaagacgagcatcacgttgccccaagtccaagccatcctgctgagctttttcagcgcccaaaccatcctcatcgggcacagcctggagagcgacctgctggccctgaagctcatccacagcaccgtggtggacacggccgtgctcttcccgcactacctgggtttcccctacaagcgctccctcaggaatctcgcggccgactacctggcacagatcatccaggacagccaggacggccacaactccagcgaggacgcaaacgcctgcctgcagctggtgatgtggaaggtccgacagcgcgcccagatccagccacgccaccggtccgcctctcccgccgccctggcctgtccttagccccaggcctcttccaaaaccgccatcagtcccg

SEQ ID NO: 5928 - protein, 507 aa, Homo sapiens
MVTESCYFPAQRGSACRLPAAPRLTERPSGVRISAPRKRKTIAHSSSPCLVTGYTDAKRTRVASSSQRSRGSKVGRQPGKTRNRSGMACKTTATTSSKRIVRRASLPSLSLKKPIILRSSGCQVPTVLRRGYLQLFTEECLKFCASKQEAEEKALNEEKVAYDCSPNKNRYLNVVLNTLKRLKGLTPSSMPGLSRAALYSRLQEFLLTQDQLKENGYPFPHPERPGGAVLFTGQGKGPGDSSCRVCCRCGTEYLVSSSGRCVRDQLCYYHWGRVRSSQVAGGRVSQYTCCAAAPGSVGCQVAKQHVRDGRKESLDGFVETFKKELSRDAYPGIYALDCEMCYTTHGLELTRVTVVDADMRVVYDTFVKPDNEIVDYNTRFSGVTEADVAKTSITLPQVQAILLSFFSAQTILIGHSLESDLLALKLIHSTVVDTAVLFPHYLGFPYKRSLRNLAADYLAQIIQDSQDGHNSSEDANACLQLVMWKVRQRAQIQPRHRSASPAALACP

SEQ ID NO: 5929 - DNA, 5086 bp, Homo sapiens
atgttgcgagccacagctccctgctggttcccacctggatacccagaagctaagaaggtggccgaggaggcggccctcgaggctccagaattcccactgccctctcatcagcctgcccagagcttcgggctctgggtgccccagatgcacaagcaggcctcagcatttgtggacatccaggcggagccccagaacaggggtccggcggtgcccccagcgtggcccaagatggtgacggagtcgtgctacttccctgcgcagaggggatcggcctgccgcttgccagccgccccaaggctgacagagaggccctcgggagtccgcatctcagcccccaggaagaggaagacgatcgcccactcttccagcccttgcttggtcacaggttacacagatgccaagagaacccgggtggccagcagcagccaacgctccattggctcccaggtcggcagacagccagggaagacgcgcaagaggtcagggatggcatgcaagaccaccgccaccatcagctctaagcgaatcgtccgtcgtctatccttaccgagtttgaagaaacccattatcctccgaagctctgggtgccaagtccccaccatcctccgccgatgctatctccaactgttcaccgaagagtgtctcaagttctgcgcctccaagcaggaggccgaggagaaggcgctgaacgaggagaaggtggcctacgactgcagccccaacaagaacaggtacctgaacgtggtcctgaacaccctcaagagactgaagggcctgacccccagctccatgcccggcctcagcagggccgccctgtacagccgcctccaggagttcctgctcacccaggaccagctcaaggagaacggctaccccttcccgcaccccgagcggcccggaggcgccgtcctcttcactggccaggggaaggggcccggcgactcctcctgcagggtctgctgccgttgtggcaccgagtacctggtgtcctccttgggccgctgtgtacgcgaccagttgtgttattatcactgggggcgggtccgctcgagccaggtggctggaggccgggttagccagtacacctgctgtgcagctgctcctggctctgtgggctgccaggtggcaaagcagcacgtgcgggacggccgcaaggagagcctccatggcttcgtggagaccttcaagaaagagttgtccagagacgcttatccaggaatctacgccttggactgtgagatgtgctacaccacgcatggcctagagctgacccgcgtcaccgtggtggacgccgacatgcgagtggtgtacgacaccttcgtcaagcccgacaacgagatcgtggactacaacaccaggttttccggagtcaccgaggccgacgtcgccaagacgagcatcacgttgccccaagtccaagccatcctgctgagctttttcagcgcccaaaccatcctcatcgggcacagcctggagagcgacctgctggccctgaagctcatccacagcaccgtggtggacacggccgtgctcttcccgcactacctgggtttcccctacaagcgctccctcaggaatctcgcggccgactacctggcacagatcatccaggacagccaggacggccacaactccagcgaggacgcaaacgcctgcctgcagcttggtgatgtggaaggtcaacagcgcgcccagatccagccacgccaccggtccgcctctcccgccgccctggcctgtccttagccccaggcctcttccaaaaccgccatcagtcccgagagctcaccctgcccacctcgccgcaaagcgaaagaaactggagcagccggcggcaggagagggcaaaaagccaagagtaaccccaacccccgactcccggtaccccggaatccctgccgcggcccctcgggcctgtccacatccctctgcccctcccagacctctgaccgtccaccaagcgcctcccgcagccccgagccgccactcccaggcccccgagtccctgccgcgcgccctcgcgccggaccacatccctctgcccatccgagacctctgtccttacaccactagccaccccacgtgggacttccatggcttctgagtacaaggccagccccccggcccaccagctttcggaatgcctgcttacctctttttctgtctatttacggttgttgcttcctaaacataaactacgtttaggctgatatttcagacaatgaaacctttgagtgcccgtagcgggaagatctcggttgctgagtgcagggaaggaggatgtaattccatcatatatactctctgtgcctaccgcatttggaaccatgcgagtgatacgtatttataaaataaaataaaccaagcacaagtacgaacttagcaacactatattgagttaatagaacggtatcttgtatttcttctgtccaggtatacttataaatgcctgcagggatttcaccacctcagggtggagagactgaatgcttgtgagggaattaggatggtggaatattggtgttaccagggaagggggcgggatgtttgaaaatgctatgtttactcgttcttgggttccaataaaggagaaacagggcacaggagtcggaaggactagtggcaatagtgatgaaaggacctccttatcatgctggcaatgttaattacccaggtgtaggaagccatacactgaggcggaagatcgcaagtcagagtggccggcaggcacaacgtcctggcacaccagaggcaggtcttcaatacccactggtttccccaacaggctgcgtaagggaccctgagccacagtgagttggtgaaatgctcctgacagtgtggagaaaccaacaggcaaaacgtgggtgcaaaagtgatgagaccccacactttacactcgtggtgacaatgaagctattaagtaacagcttctcaacctatgctgtttcctgttggatgcacataatccatttgcactgcagacaattttaggatgtggtttacagtaaggtggatggtaccttatggcaaaaatctctcagaaatttatgtgtggttttaaagtcattccagtcctagcacgttgtgcttttcagagacgccatagctgtttttccctttgtaatatcaaagcagtaatatgttctctggaggcctgttgggtgaatttaatggaatcaagttaagtaggtgccagaaccattgctgttttccctccatagccctgccacccactgtaaaaaggttgatgagattacttaatgatttccaattaagttgtatttccaaatatcatgatttccattttaatgtagttggtatggagctctgtgagtgtgtgcttcttttattatggatcacgttcagcttctttttatttgcctcctagtcataatagtaaaactctactcctctactccgaggagtccctaccacccatctcatcactttccagcccagcactcttcatgctcattcatttaaagcattcaacattgtgtaaatgaatcttggaaggcaaaagctactgaatttagcgaatttgtggaggcattgccacaaatcagccaggtgaagtttcacacaatcgaagactgcacaactcctagaaggcagcactatgctgcaaacccagacggccactcttctcacccctcgtccgtttgctgttctggataatgaggttcaaaagtcacctaggcaactgccaaaatagctgaaatggagaaagggcttcaggctggtgactagcagaggtccacctgacccccgtaagctgctgaacaagtagggctgccagaaatgtcccactagggaatttggtagagacgaagacatgctcaccggacaagagttcctcccaggatacgcccgagcggaagaagcgggctctgagccacgccctttcaccctcctctaccccgccctgggctggtgaaggtgcgcgccaggatgtggactactgagccctgaagaaataagtccttccactttgaccccatggaggattgcctgtgaggaacttaaacgagtctaccagtgtctagacacgggggcaggtctgtccggcacagcagctccctcaaggaggagaagagtgaggagaaaggaaactcaagtctcaccattctgtcctgggagagaagaggaggatctcatctctcatctgtccaaacaaggcaaggagactttctctcatctttccaagcaaggcaaggacctgtgttgaacattgcccaagtcctgggagagaagtgggtgcggtccgcttcctgtcctcaatttgcccgcagcggcggagtgcacagagcagggaaaggcagccccagagggatcccgccctccagcatgcagcagactgctggcccagtcctggctccaaggggtgctgtgtgggcccaagcaagttgaccaacctccctgaaccttaatttcatcctaggtagcccaattccagtagccattataggactgccctgcagggacagttacttaactcaggaaaagcaacctagctccaagtttagcaaccgggagttccagttgattccattagcgcaccccctgaggcattcccaagctggagtctggtggaagatgaggctcagtgtgattggactgaagcaccaacctatcaaggagaagtcccacccagtctgccctgtgcctatataaaggcgacaagtggcggccgcagcactcattgaagccgccagttgggagaggagcagagccaggccggtgctcccgaaggcagcaagatgttgcgagccacagctccctgctggttcccccctggatacccagaagctaagaaggtggccgaggaggcggccctggaggcaagccgccatttgggaggggagcagagccaggccggtgctcccgaaggcagcaagatgttgcgagccacagctccctgctggttccgccctggatacccagaagctaagaaggtggccaaggaggcggccccggaggcaagccgccatttgggagcggagcagagcccggccggtgctcccgaaggcagcaagatgttgcgagccacagctccctgctggttcccacctggatacccagaagc

SEQ ID NO: 5930 - protein, 38 aa, Homo sapiens; identical to SEQ ID NO: 5926

SEQ ID NO: 5931 - DNA, 517 bp, Homo sapiens
gccttctcctgtctgccaccacgtgagatgtgcctttcaccttccactatgattgtgaggcctcaccagccatgtggaactagttcaagatttcaacattttaagataatctgaaaaaaattggaatgtgcccccagctgcgctactggtgacttcttcaacagttgagaaactgaactatgtgttcatgaaaatactccatcattaaagtttatgcaatactctctcaacactgtttatcaaaggaaccaatatggaaggaaaaacattgctttgaagggaagatggatggatcccctagtaaactacagcttgaggtgcaatttcctaaagttcaaatgcctgaaaaaggaaacgaaagaaagaaactcaactcttgagacagcttcaatgctagctttgatctcaattatagagttatttatgaaaagtgcatttttacaactaaaaataaattaggatcaaaagcttctagaggctatactatggagtgcttaataaaaagttgagtaaagag

SEQ ID NO: 5932 - protein, 81 aa, Homo sapiens
MQYSLNTVYQRNQYGRKNIALKGRWMDPLVNYSLRCNFLKFKCLKKETKERNSTLETASMLALISIIELFMKSAFLQLKIN

SEQ ID NO: 5933 - DNA, 359 bp, Homo sapiens
gagtcattaaatctcaaggatatctatttggtcatgttttcttgtggtatttcaaggctactggtgacttcttcaacagttgagaaactgaactatgtgttcatgaaaatactccatcattaaagtttatgatcttgtccatcattcttaacaatttgacagcgtgtccagaacattgcgcctaaatgaatctaacaagaggtaagttgaacataatattggtatttgaaagtcttcaatagaattaggcccttaatttagctttttctaagactttaaacattcaaatgtttcttctgcttatacttaaatagtctttaaggcaacttatttgttccctgaacaaacttcagttgctt

SEQ ID NO: 5934 - DNA, 854 bp, Homo sapiens
aacctgggatgagatcctcgtttcagaaaatgatttgatcctcctgaaggcgctccctgctaaggatctaaactcaggagacgggatttcaccatgtttgccaggctggtcttgaactcctgacctgaagtgatctgcccacctcagcctcccaaagtgttgggattacagagcatctctcagggattcttaaaataaaataagtcactgtgaatacacaaaggaaatgaaaacatatacagagtgtgaaataacagccaaaaaggctagtgcaaatcttcaggggccgtccaggactacagagctgtttcaccctaccttggcttcaatctcttcccccatgctcgaaggtgcggagctgtacttcaacgtggaccatggctacctggagggcctggttcgaggatgcaaggccagcctcctgacccagcaagactatatcaacctggtccagtgtgagaccctagaaggtaagtgtagctcttctcaccctttaaaaagaaaaaaaaaaaaatgaaatgatgtccctctccagaagcatggagaaaaaaagcccataatcatatggtttgagagttctgagcagatccttattcctgcagtccagatttctggggtccataaacttgaatgaggaaaaaaaaataaatctctatttttaatctctaagtgaactataacatctttcattactaatgtaggcaacaaatcacagtagttgagataagtagtatctgtgacactgtcaccaacaaaaattcaatgttttcatatccctttaaagttcttgcagataccttgaaatgtcatgtatgttttctctattttgaagtaagataccacactcatccttt

SEQ ID NO: 5935 - protein, 96 aa, Homo sapiens
MKTYTECEITAKKASANLQGPSRTTELFHPTLASISSPMLEGAELYFNVDHGYLEGLVRGCKASLLTQQDYINLVQCETLEGKCSSSHPLKRKKKK

SEQ ID NO: 5936 - DNA, 629 bp, Homo sapiens
gaattgcaaagtcagcaaagataggaggttataagatttgggtgagtggaattaacttggggagaatgaggtcatcaccttctcactccactctaccgctaaagcaatgagatccggtctaatgtctcctgaaccctaagatgtaacttgctttggtgatctcacagatgtgataagaaaactgagaagacagagaggttaaatatctttcctaaggtcacagaactgatatgacatcaaagctcttattgggacaggcagtttcagcagggttgtcagggtagagcagaagaccaccaagaaaccttttgcaataaaagtgatggaaaccagagagagggaaggtagagaagcgtgcgtgtctgagctgagcgtcctgcggcgggttagccatcgttacattgtccagctcatggagatctttgagactgaggatcaagtttacatggtaatggagctggctaccggaggggagctctttgatcgactcattgctcagggatcctttacagagcgggatgccgtcaggatcctccagatggttgctgatgggattaggtatttgcatgcgctgcagataactcataggaatctaaagcctgaaaacctcttatactatcatccaggtg

SEQ ID NO: 5937 - protein, 101 aa, Homo sapiens
METREREGREACVSELSVLRRVSHRYIVQLMEIFETEDQVYMVMELATGGELFDRLIAQGSFTERDAVRILQMVADGIRYLHALQITHRNLKPENLLYYHP

SEQ ID NO: 5938 - DNA, 878 bp, Homo sapiens
gataaaataagttcctatggtgaggaatggaggcctccagctgacagagagcaaagaactgaggcctgcgacaactataggcgtgatcctgggaaccgattctcaacctcatctgagccttgagacgactgctgctctggccgacagcctgacggcaacctcctgagacagctctgagaggagattttccaggttcaagtcccgagacgaggtttcaccgtgctggccaagctggtctccacctcaggtgatctgccccgctaagcctccgcaagtgctgggattacaggctagtgcaaatcttcaggggccgtccaggactacagagctgtttcaccctaccttggcttcaatctcttcccccatgctcgaaggtgcggagctgtacttcaacgtggaccatggctacctggagggcctggttcgaggatgcaaggccagcctcctgacccagcaagactatatcaacctggtccagtgtgagaccctagaaggtaagtgtagctcttctcaccctttaaaaagaaaaaaaaaaaaatgaaatgatgtccctctccagaagcatggagaaaaaaagcccataatcatatggtttgagagttctgagcagatccttattcctgcagtccagatttctggggtccataaacttgaatgaggaaaaaaaaataaatctctatttttaatctctaagtgaactataacatctttcattactaatgtaggcaacaaatcacagtagttgagataagtagtatctgtgacactgtcaccaacaaaaattcaatgttttcatatccctttaaagttcttgcagataccttgaaatgtcatgtatgttttctctattttgaagtaagataccacactcatccttt

SEQ ID NO: 5939 - protein, 58 aa, Homo sapiens [sequence omitted]

SEQ ID NO: 5940 - DNA, 2446 bp, Homo sapiens
acaaaaaccctgactatcacctgatagattgcttgtgctgcctgataattactcgcacttttcccaggctagtgcaaatcttcaggggccgtccaggactacagagctgtttcaccctaccttggcttcaatctcttcccccatgctcgaaggtgcggagctgtacttcaacgtggaccatggctacctggagggcctggttcgaggatgcaaggccagcctcctgacccagcaagactatatcaacctggtccagtgtgagaccctagaagacctgaaaattcatctccagactactgattatggtaactttttggctaatcacacaaatcctcttactgtttccaaaattgacactgagatgaggaaaagactatgtggagaatttgagtatttccggaatcattccctggagcccctcagcacatttctcacctatatgacgtgcagttatatgatagacaatgtgattctgctgatgaatggtgcattgcagaaaaaatctgtgaaagaaattctggggaagtgccaccccttgggccgtttcacagaaatggaagctgtcaacattgcagagacaccttcagatctctttaatgccattctgatcgaaacgccattagctccattcttccaagactgcatgtctgaaaatgctctagatgaactgaatattgaattgctacgcaataaactatacaagtcttaccttgaggcattctataaattctgtaagaatcatggtgatgtcacagcagaagttatgtgtcccattcttgagtttgaggccgacagacgtgcttttatcatcactcttaactcctttggcactgaattgagcaaagaagaccgagagaccctctatccaaccttcggcaaactctatcctgaggggttgcggctgttggctcaagcagaagactttgaccagatgaagaacgtagcggatcattacggagtatacaaacctttatttgaagctgtaggtggcagtgggggaaagacattggaggacgtgttttacgagcgtgaggtacaaatgaatgtgctggcattcaacagacagttccactacggtgtgttttatgcatatgtaaagctgaaggaacaggaaattagaaatattgtgtggatagcagaatgtatttcacagaggcatcgaactaaaatcaacagttacattccaattttataacccaagtaaggttctcaaatgtagaaaattataaatgttaaaaggaagttattgaagaaaataaaagaaattatgttatattatctagactacacaaaagtaagccacactatatcttcatgagttgcaaatccatggaaacacagtaaaccagccctgaaacaaagcatttccttgttttcagtggtattagatcttgtttccacatgtctgtctcattcttcactgggccttacaggttagttttaattaactctatggtatttttcttattcttgtttgatcatgttaaaaattggacctaataaaagtattttattcttgcttttccatgcttctctacaggtccaaatactgaatgtctcctttactttttctcttttaaatttttttctagacagggtctcactctgtcacctaggctacagtgcagtggtgtgatcacagctcactgcagcctcgacttcccaggctcaagtgatcctcccagctctcagcctccaaagtagctggcactacaagtgtacacccccacacaaggctaagttttgtattttttgtagagacagggtttcaacatattatccaggctggtgtcgaattcctgggctccagggatccacagtcccccttggcctcccaaagtgttgggattacatgcatgagccactgtgctgggcttcatttacattttaactgtctgttccttgcctagattcacagaaatccaaagctgtatgtagtcaacatggttcacaagtgttggaaaatgtgttttttgttttgttttgttttgtttcgttttgttttgagacagagtttccctctgtcgcccaggctagagtgcaatggcgtgatctcggctcactgcaacctccacctcccagattcaagcaactctctgcctcagcctcccgagtagctgggattacaagcacccaccactacactcagctaattttttgtatttttagtagagccggggtttcaccatcttggccaggctgatcttgaactcctgagctcatgatccacccgcctcagcctcccaaagtgctgggattacaggccccttgttcagccactgcacctggccccttattttgtttttgttttctaatatactttgatgtaatcagcttgagaaagcaacacaatttcaaatcctatcttctagatgcaagcagtgttaaatttgttaataaatttgcttttcacacctttctttaaataaaaggtatatctctcttt

SEQ ID NO: 5941 - protein, 350 aa, Homo sapiens; identical to SEQ ID NO: 570

SEQ ID NO: 5942 - DNA, 559 bp, Homo sapiens
agctgtttcaccctaccttggcttcaatctcttcccccatgctcgaaggtgcggagatggttcacaagtgttggaaaatgtgttttttgttttgttttgttttgtttcgttttgttttgagacagagtttccctctgtcgcccaggctagagtgcaatggcgtgatctcggctcactgcaacctccacctcccagattcaagcaactctctgcctcagcctcccgagtagctgggattacaagcacccaccactacactcagctaattttttgtatttttagtagagccggggtttcaccatcttggccaggctgatcttgaactcctgagctcatgatccacccgcctcagcctcccaaagtgctgggattacaggccccttgttcagccactgcacctggccccttattttgtttttgttttctaatatactttgatgtaatcagcttgagaaagcaacacaatttcaaatcctatcttctagatgcaagcagtgttaaatttgttaataaatttgcttttcacacctttctttaaataaaaggtatatctctcttt

SEQ ID NO: 5943 - protein, 63 aa, Homo sapiens [sequence omitted]

SEQ ID NO: 5944 - DNA, 277 bp, Homo sapiens
caatctcttcccccatgctcgaaggtgcggagctgtacttcaacgtggaccatggctacctggagggcctggttcgaggatgcaaggccagcctcctgacccagcaagactatatcaacctggccccttattttgtttttgttttctaatatactttgatgtaatcagcttgagaaagcaacacaatttcaaatcctatcttctagatgcaagcagtgttaaatttgttaataaatttgcttttcacacctttctttaaataaaaggtatatctctc

SEQ ID NO: 5945 - protein, 59 aa, Homo sapiens
MQGQPPDPARLYQPGPLFCFCFLIYFDVISLRKQHNFKSYLLDASSVKFVNKFAFHTFL

SEQ ID NO: 5946 - DNA, 1877 bp, Homo sapiens
agaattattttatttcaggaatccatcaacatcctttgcagctacataggcaggaaaatctagaaattgtaatttatatagaattttaaaactcttcaattacaatggatagaggggagaaaatacagctcaagagagtgtttggatattggtggggcacaagttttttgcttattaatatcattggtgcaggaatttttgtgtcccccaaaggtgtgttggcatactcttgcatgaacgtgggagtctccctgtgcgtttgggctggctgtgccatactggccatgacatcaactctttgctctgcagagataagtataagcttcccatgcagtggagctcaatactattttctcaagagatactttggctccacggttgcttttttgaatctctggacatccttgtttctggggtcaggggtagttgctggccaagctctgctccttgctgagtacagcatccagcctttttttcccagctgctctgtcccaaagctgcctaagaaatgtctggcattggccatgttgtggattgtaggaattctgacttctcgtggtgtgaaagaagtgacttggcttcagatagctagctcagtgctgaaagtgtccatacttagcttcatttccctaactggagtagtgttcctgataagagggaaaaaggagaatgtagaacgatttcagaatgcttttgatgctgaacttccagatatctctcaccttatacaagccatcttccaaggatattttgcatattcaggcggggcatgctttacacttatagcaggggagctgaagaagcccagaacaacaattcccaaatgcatatttactgcgttacctctggtgactgtagtttatttactggttaacatttcctatctgactgttctgacacccagggaaattctctcttcagatgctgtagctatcacatgggctgatcgagcttttccctcattagcatggattatgccttttgctatttctacctcattatttagcaaccttctgatttctatatttaaatcatcgagaccaatatatcttgcaagccaagagggccagctgcctttgctatttaatacacttaatagtcactcttctccatttacagctgtgctactacttgtcactttgggatcccttgcaattatcttaacaagtctaattgatttgataaactatatttttttcacgggttcattatggtctatattattaatgataggaatactaaggcggagataccaggaacccaatctatctataccttataaggtgtttttgtcatttccattagcaacaatagtcatcgacgtgggcttggttgtgataccattggtaaagtctccaaatgtgcattatgtctacgtgcttctgttagttctcagcggattactattttacatacctttaatacattttaaaataagattggcttggtttgagaagatgacttgctatttacaattactatttaatatttgcctccctgatgtgtctgaggaatagatgtcggaagtgcaaactcttaaaaaattggccttctaaaaaacatatatcagattccaaatcaaggttaaacatatgatagaacattcatggtgaaattcctatggtaaatatttttttctcaaatgaaataagtaatgtatacaaaagtgcctaagacagtacctggcttcagagtcactaagaaattgctaaaagctctgcttcgcatggtaaaaaacttaagtcctggtttgcgtagcttgatagagtgattatacaacttccattctctcactttttttttctgtatcccaccccttttctactgaatttgtggggatcctataataaaagtgaatgactaaaaattttaaaagc

SEQ ID NO: 5947 - protein, 470 aa, Homo sapiens; identical to SEQ ID NO: 572

SEQ ID NO: 5948 - DNA, 856 bp, Homo sapiens
aattcttatagggggtctgatgggtcagacctcagtggagccagtctggtaccttgaagaggatttcattttactaaatgtcaagagtttgattgtttttgttgatcataatttgacaagcaacatggggcctcagagaagactaagaaccctgaaggagttgtctgaacctcgagctaaggatcagcaggagctcattgaaagcctccttgactttgagtttctcctctggtagaattggggagctgaagaagcccagaacaacaattcccaaatgcatatttactgcgttacctctggtgactgtagtttatttactggttaacatttcctatctgactgttctgacacccagggaaattctctcttcagatgctgtagctatcacatgggctgatcgagcttttccctcattagcatggattatgccttttgctatttctacctcattatttagcaaccttctgatttctatatttaaatcatcgagaccaatatatcttgcaagccaagagggccagctgcctttgctatttaatacacttaatagtcactcttctccatttacagctgtgctactacttgtcactttgggatcccttgcaattatcttaacaagtctaattgatttgataaactatatttttttcacgggttcattatggtctatattattaatgataggaatactaaggcggagataccaggaacccaatctatctataccttataaggtaaaattggatttctaattcttttctgtgtgaaataacagatattgagtataactgtatttaagattataatcagagcatctataagtagatcttctgaatactcagttactgtgaaacac

SEQ ID NO: 5949 - protein, 71 aa, Homo sapiens
MGQTSVEPVWYLEEDFILLNVKSLIVFVDHNLTSNMGPQRRLRTLKELSEPRAKDQQELIESLLDFEFLLW

SEQ ID NO: 5950 - DNA, 526 bp, Homo sapiens
aaggcacagtcataaatacagagggttttcagaaccacctcagagaagatgtttaaatcgctgacaaaagtcaacaaggtgaagcctataggagagaacaatgagaatgaacaaagttctcgtcggaatgaagaaggctctcacccaagtaatcagtctcagcaaaccacagcacaggaagaaaacaaaggtgaagagaaatctctcaaaaccaagtcaactccagtcacgtctgaagagccacacaccaacatacaagacaaactctccaagaaaaattcctctggagatctgaccacaaaccctgaccctcaaaatgcagcagaaccaactggaacagtgccagagcagaaggaaatggaccccgggaaagaaggtccaaacagcccacaaaacaaaccgcctgcagctcctgttataaatgagtatgccgatgcccagctacacaacctggtgaaaagaatgcgtcaaagaacagccctctacaagaaaaagttggtagagggagatctctcctcacccgaag

SEQ ID NO: 5951 - protein, 158 aa, Homo sapiens
MFKSLTKVNKVKPIGENNENEQSSRRNEEGSHPSNQSQQTTAQEENKGEEKSLKTKSTPVTSEEPHTNIQDKLSKKNSSGDLTTNPDPQNAAEPTGTVPEQKEMDPGKEGPNSPQNKPPAAPVINEYADAQLHNLVKRMRQRTALYKKKLVEGDLSSP

SEQ ID NO: 5952 - DNA, 946 bp, Homo sapiens
cataaatacagagggttttcagaaccacctcagagaagatgtttaaatcgctgacaaaagtcaacaaggtgaagcctataggagagaacaatgagaatgaacaaagttctcgtcggaatgaagaaggctctcacccaagtaatcagtctcagcaaaccacagcacaggaagaaaacaaaggtgaagagaaatctctcaaaaccaagtcaactccagtcacgtctgaagagccacacaccaacatacaagacaaactctccaagaaaaattcctctggagatctgaccacaaaccctgaccctcaaaatgcagcagaaccaactggaacagtgccagagcagaaggaaatggaccccgggaaagaaggtccaaacagttgaccctagaacaacaagaatttgaactgtggtaccacttatccctggattttcttccttctctgccatctgtgagacagcaacacgatctctcctcttcttgctcctcctcagcctactcaacatgaggacaactggatgcagacctttctgatgatccacttccacttaggcaatagtaaatatatggtctcttctttatgattttaataacattttctcttctctggcttgctttattgtaagaatgcagtatgtaacatgtataacatgaaatatgtacccatccatatgaacaagtaaggcttctggccaacagtaggctattagtagttaagtttgggaggagtcaaaagtcatatgcaattttcagctacacaggaggtctagtgcccctaacctctacatcatttatgggccaactgtaatttgcaataaattttgactgctagaaataataagaaatattagtttttatgatatttattctttcttatagtgtaatttacatgtccacaatagtaaatttgaaaaatatcacaaaataaaagtaaaaatgacttataatc

SEQ ID NO: 5953 - protein, 113 aa, Homo sapiens
MFKSLTKVNKVKPIGENNENEQSSRRNEEGSHPSNQSQQTTAQEENKGEEKSLKTKSTPVTSEEPHTNIQDKLSKKNSSGDLTTNPDPQNAAEPTGTVPEQKEMDPGKEGPNS

SEQ ID NO: 5954 - DNA, 801 bp, Homo sapiens
agtgaggcagtggggggttagcaagttgaaggcagataatatggggctctgtgggccatcatgaggacttcagcttttacctcggcatgagatgggaaaccactggagaatctagaggagaaagggatgatctgcccttcaacaggatcatccaggctactccggtgaatatagaccatatgagggcaaagattggaagctaggtgagcagttagaaggctactgcaatagctatgtgagagagatgaactaggagagtagcagtggagatctgagatacggcaaagtctagatataacacaaaggaatagccgacagaatttgcttttggattggctgtattgtaggagagaaaaaatagggtgcatttttgggttgagcaaagagaagaatgaagattccttgtactgagatggggaaaactgcaggaggagtgggtctgaaagaggcaagttggttgccatgttgtgagcagcccccttgaaaggcccatgtgatgatgaattgaaacctcctgtcaacagccatgtgagtgacctaggaagcagatcctgcagcccagtcatgcttcagatgaggcatatctgaggcacagagaggttaagttggggactgaagtgtggctccagaatctaagtttctaactgccatgctatggtaagtgagattggtaagtgcacatgaggaactcgtgagcctcaaagtcattcatcaatgcagcattcaatgatggcttacatgaaggtatagaggtaggctcatcacttttacccaaactcaaaaaactgaatttttattaag

SEQ ID NO: 5955 - protein, 30 aa, Homo sapiens
MKIPCTEMGKTAGGVGLKEASWLPCCEQPP

SEQ ID NO: 5956 - DNA, 761 bp, Homo sapiens
gggtgattacacagtggttctcaaagtatggacctccaaccagcagcatcagcagcatctggatacttgctagaaatggaaattctctggccctattccaggccttccaagttggaaactttgtgatggggcccagcactctgtgttttaacaagccctctagccttaaggaaaacaactctgaggacttttgtcacggacttgaaattctcatctgtgcttggacaagactctgaaacataccaactgtgtattttcctgcctttggtaaatctggagctattaactgattctaaagaacatttgacttaaaaagactatggaaagcccaaagaataaagggacacttgtcactggattgaaggcatattctaatttaggacaatgtcttgagatctttaacttaactacatttgcaaagacccaatttccaagtaactggaacattctagataatgaagaccccagtggattattattagcaaatgaaaactggatatcaagaagggcaaaatcttcaaccttatcagcagaaagagtttatgtaaaaatataccacatagaataactaaaaaaataagcaagtgataccttatctgagctcaaaatatctgtttctttgcaaatggataaaggatttattatattatagcaccttgaggacagagactttatgtttctaactacccatcccagcatcatctagttcattcctatgctgaacagcccctaacacattgcctaaataaatactaacatta

SEQ ID NO: 5957 - protein, 82 aa, Homo sapiens
MESPKNKGTLVTGLKAYSNLGQCLEIFNLTTFAKTQFPSNWNILDNEDPSGLLLANENWISRRAKSSTLSAERVYVKIYHIE

SEQ ID NO: 5958 - DNA, 2911 bp, Homo sapiens
gcgcaggggagaggccagcccaggcagccgttgtcgggttcgactggaggggcgggggagtcacctgcgagcggctgcgctggcggccagcccgcccaccgcgtctggatcgcgccggctgcgcggggctgcggacagcacacaccctggaaggccccggcggggaacgggcagagtccgcgccctgcgtccgcgaccaggaggatcggaccttcgccttcgctgtcgccgccgccgccgcccgcggccgtcggggctattagtgaaagatggtggatcgcttggcaaacagtgaagcaaatactagacgtataagtatagtggaaaactgttttggagcagctggtcaacctttaactatacctggacgagttcttattggagaaggagtattgactaagttgtgcaggaaaaagcccaaagcaaggcagtttttcttgtttaatgatattcttgtatatggcaatattgtcatccagaagaaaaaatataacaaacaacatattattcccctggaaaatgtcactattgattccatcaaagatgagggagacttaaggaatggatggctaatcaagacaccaactaaatcttttgcagtttatgctgccactgctacggagaaatcagaatggatgaatcatataaataaatgtgttactgatttactctccaaaagtgggaagacacccagtaatgaacatgctgctgtctgggttcctgactctgaggcaactgtatgtatgcgttgtcagaaagcaaaattcacacctgttaatcgtcgccaccattgccgcaaatgtggttttgttgtctgtgggccctgctctgaaaagagatttcttcttcccagccagtcctctaagcctgtgcggatttgtgacttctgctatgacctgctttctgctggggacatggccacatgccagcctgctagatcagactcttacagccagtcattgaagtctcctttaaatgatatgtctgatgatgatgacgatgatgatagcagtgactaaggacacatttgggagtatttaatcaggtgtggctatctgagaaatcaactttgggggaaatgtaagattctgagctctctctctgttttgttctagccatgaatttgcctgagaaacttgtaacctatgtgcctcaatatattccatagaaagtaggtccccctgccttctcccactcctcacactcttctacagggataggcttttgcaaatatatcagataaattttttgtttcttgtttatttttaggttattttcttggaaggttgggaaaagatgtttgttttaacaggtcatgtactacgttgttgttttcatttctgttataagtaaaactaaaagcacagaatggtgggaaaggggctataatgtggttcattaataatgttagcagcttttttctaaccatcctgtctaatggttaagacaccagtaacaaaaacacatgatttggaaatactttggctttttcatatacctagtggtgccttatcataatagcactgttacatgaaataagcccctaccttcttactttctggtttgttgaaaaaatacactggtgctctttgaagtgataaaatgagtgtttatgaatgggtgtaattaggaaatacttctcatctgacagctacaaataactaagtttggaggtattttcactctatatgaataaatatttttccataaaatagttgtgattatatttttgttttatataggtcccaaattataattgtcaaatatatattttaaattaataaaagttgtcattcttaggaatttggtttgaaatttatcagttatacagaattgtcatactgcattagcttctacctttagtaagacatattttttaggtataaattcttatgctttaacattatttctggattgaaaatcttataaaacccttgaaaataaacagtctcttttttacaaagcctgtgttagagcacagatttacctaggcttgaagatttggaagaaataatatgtaagaatggcctcaaggcagaccactttaagtttggctagacttcatatcgtggaagtattgtctatttcagtgtgaaactatcttgaatttgcaaatatagtgttatattttataaagttttgtaaaatcccaaacaatatttctatttttgtaaaacaattgtatgtataatctgtatttgaaatcattttgcaatctatggaaatagagtagcaattgctatttctaaattgtgaactttaagtcaatctagatttattttgagaagtaattgttcactctttacttttgaggcagccattaggttgaaagtatatatttatcatataaaacttgatgcgttttgcactactctttccatttatatgctgcaaacaactacagtctttgaaatatggaaaatcagcagtctaaagtttgttttaaattctaaatttaaaaaatcttcaaatctgaatataccgcaaatgtcatgagaagtttgattcagtaacttgtgatggaggattctttggtatcttactgtttggttaaggcactaattttacttacctattagattttgaaagtatctgagatatacaaatctccctgtaggaaatgtgaaagaaaagcacaacaaaactagggttttttgttcatttgcttgcttttatgattttttttggtttgttttaatatcaggtggatttttgtttctaagcaatatatacataaaatcaaccaacatatctgaaaaggatcatgaaacctgagaaatgctaatggagatttgctggtacataggaatctagcaaattcaggaaccaaggggaaatgttgtgagataacatttacattgtcaacctttattgactttgtttttacaataaaaaatattttacaacttac

SEQ ID NO: 5959 - protein, 249 aa, Homo sapiens; identical to SEQ ID NO: 576

SEQ ID NO: 5960 - DNA, 2999 bp, Homo sapiens
gcgcaggggagaggccagcccaggcagccgttgtcgggttcgactggaggggcgggggagtcacctgcgagcggctgcgctggcggccagcccgcccaccgcgtctggatcgcgccggctgcgcggggctgcggacagcacacaccctggaaggccccggcggggaacgggcagagtccgcgccctgcgtccgcgaccaggaggatcggaccttcgccttcgctgtcgccgccgccgccgcccgcggccgtcggggctattagtgaaagatggtggatcgcttggcaaacagtgaagcaaatactagacgtataagtatagtggaaaactgttttggagcagctggtcaacctttaactatacctggacgagttcttattggagaaggagtattgactaagttgtgcaggaaaaagcccaaagcaaggcagtttttcttgtttaatgatattcttgtatatggcaatattgtcatccagaagaaaaaatataacaaacaacatattattcccctggaaaatgtcactattgattccatcaaagatgagggagacttaaggaatggatggctaatcaagacaccaactaaatcttttgcagtttatgctgccactgctacggagaaatcagaatggatgaatcatataaataaatgtgttactgatttactctccaaaagtgggaagacacccagtaatgaacatgctgctgtctgggttcctgactctgaggcaactgtatgtatgcgttgtcagaaagcaaaattcacacctgttaatcgtcgccaccattgccgcaaatgtggttttgttgtctgtgggccctgctctgaaaagagatttcttcttcccagccagtcctctaagcctgtgcggatttgtgacttctgctatgacctgctttctgctggggacatggccacatgccagcctgctagatcagactcttacagccagtcattgaagtctcctttaaatgatatgtctgatgatgatgacgatgatgatagcagtgactaaggacacatttgggagtatttaatcaggtgtggctatctgagaaatcaactttgggggaaatgtaagattctgagctctctctctgttttgttctagccatgaatttgcctgagaaacttgtaacctatgtgcctcaatatattccatagaaagtaggtccccctgccttctcccactcctcacactcttctacagggataggcttttgcaaatatatcagataaattttttgtttcttgtttatttttaggttattttcttggaaggttgggaaaagatgtttgttttaacaggtcatgtactacgttgttgttttcatttctgttataagtaaaactaaaagcacagaatggtgggaaaggggctataatgtggttcattaataatgttagcagcttttttctaaccatcctgtctaatggttaagacaccagtaacaaaaacacatgatttggaaatactttggctttttcatatacctagtggtgccttatcataatagcactgttacatgaaataagcccctaccttcttactttctggtttgttgaaaaaatacactggtgctctttgaagtgataaaatgagtgtttatgaatgggtgtaattaggaaatacttctcatctgacagctacaaataactaagtttggaggtattttcactctatatgaataaatatttttccataaaatagttgtgattatatttttgttttatataggtcccaaattataattgtcaaatatatattttaaattaataaaagttgtcattcttaggaatttggtttgaaatttatcagttatacagaattgtcatactgcattagcttctacctttagtaagacatattttttaggtataaattcttatgctttaacattatttctggattgaaaatcttataaaacccttgaaaataaacagtctcttttttacaaagcctgtgttagagcacagatttacctaggcttgaagatttggaagaaataatatgtaagaatggcctcaaggcagaccactttaagtttggctagacttcatatcgtggaagtattgtctatttcagtgtgaaactatcttgaatttgcaaatatagtgttatattttataaagttttgtaaaatcccaaacaatatttctatttttgtaaaacaattgtatgtataatctgtatttgaaatcattttgcaatctatggaaatagagtagcaattgctatttctaaattgtgaactttaagtcaatctagatttattttgagaagtaattgttcactctttacttttgaggcagccattaggttgaaagtatatatttatcatataaaacttgatgcgttttgcactactctttccatttatatgctgcaaacaactacagtctttgaaatatggaaaatcagcagtctaaagtttgttttaaattctaaatttaaaaaatcttcaaatctgaatataccgcaaatgtcatgagaagtttgattcagtaacttgtgatggaggattctttggtatcttactgtttggttaaggcactaattttacttacctattagattttgaaagtatctgagatatacaaatctccctgtaggaaatgtgaaagaaaagcacaacaaaactagggttttttgttcatttgcttgcttttatgattttttttggtttgttttaatatcaggtggatttttgtttctaagcaatatatacataaaatcaaccaacatatctgaaaaggatcatgaaacctgagaaatgctaatggagatttgctggtacataggaatctagcaaattcaggaaccaaggggaaatgttgtgagataacatttacattgtcaacctttattgactttgtttttacaataaaaaatattttacaacttactttctgttctctgtatattgtgacttgaggatttaccccctctgctaagataataaagatattatgcatattttgcctaataattcaa

SEQ ID NO: 5961 - protein, 249 aa, Homo sapiens; identical to SEQ ID NO: 576

SEQ ID NO: 5962 - DNA, 2912 bp, Homo sapiens
ggaggggagacgcgaaactttccgggcgcttcctcccgcggtcccggagccgtcgcagcgccgggaggtgtcgtcgtcgcgggcggtggcggccgacgccatgttggggtctgtgagaaacggggcgctcccggccgctcccctcgcgccggggccggcccgcgggccagttgccgccgccgtcccgccagcccgggagcgagccgcgcccgcccgtaggacgccgccgccgccgcggggggacgggggccgccgggctattagtgaaagatggtggatcgcttggcaaacagtgaagcaaatactagacgtataagtatagtggaaaactgttttggagcagctggtcaacctttaactatacctggacgagttcttattggagaaggagtattgactaagttgtgcaggaaaaagcccaaagcaaggcagtttttcttgtttaatgatattcttgtatatggcaatattgtcatccagaagaaaaaatataacaaacaacatattattcccctggaaaatgtcactattgattccatcaaagatgagggagacttaaggaatggatggctaatcaagacaccaactaaatcttttgcagtttatgctgccactgctacggagaaatcagaatggatgaatcatataaataaatgtgttactgatttactctccaaaagtgggaagacacccagtaatgaacatgctgctgtctgggttcctgactctgaggcaactgtatgtatgcgttgtcagaaagcaaaattcacacctgttaatcgtcgccaccattgccgcaaatgtggttttgttgtctgtgggccctgctctgaaaagagatttcttcttcccagccagtcctctaagcctgtgcggatttgtgacttctgctatgacctgctttctgctggggacatggccacatgccagcctgctagatcagactcttacagccagtcattgaagtctcctttaaatgatatgtctgatgatgatgacgatgatgatagcagtgactaaggacacatttgggagtatttaatcaggtgtggctatctgagaaatcaactttgggggaaatgtaagattctgagctctctctctgttttgttctagccatgaatttgcctgagaaacttgtaacctatgtgcctcaatatattccatagaaagtaggtccccctgccttctcccactcctcacactcttctacagggataggcttttgcaaatatatcagataaattttttgtttcttgtttatttttaggttattttcttggaaggttgggaaaagatgtttgttttaacaggtcatgtactacgttgttgttttcatttctgttataagtaaaactaaaagcacagaatggtgggaaaggggctataatgtggttcattaataatgttagcagcttttttctaaccatcctgtctaatggttaagacaccagtaacaaaaacacatgatttggaaatactttggctttttcatatacctagtggtgccttatcataatagcactgttacatgaaataagcccctaccttcttactttctggtttgttgaaaaaatacactggtgctctttgaagtgataaaatgagtgtttatgaatgggtgtaattaggaaatacttctcatctgacagctacaaataactaagtttggaggtattttcactctatatgaataaatatttttccataaaatagttgtgattatatttttgttttatataggtcccaaattataattgtcaaatatatattttaaattaataaaagttgtcattcttaggaatttggtttgaaatttatcagttatacagaattgtcatactgcattagcttctacctttagtaagacatattttttaggtataaattcttatgctttaacattatttctggattgaaaatcttataaaacccttgaaaataaacagtctcttttttacaaagcctgtgttagagcacagatttacctaggcttgaagatttggaagaaataatatgtaagaatggcctcaaggcagaccactttaagtttggctagacttcatatcgtggaagtattgtctatttcagtgtgaaactatcttgaatttgcaaatatagtgttatattttataaagttttgtaaaatcccaaacaatatttctatttttgtaaaacaattgtatgtataatctgtatttgaaatcattttgcaatctatggaaatagagtagcaattgctatttctaaattgtgaactttaagtcaatctagatttattttgagaagtaattgttcactctttacttttgaggcagccattaggttgaaagtatatatttatcatataaaacttgatgcgttttgcactactctttccatttatatgctgcaaacaactacagtctttgaaatatggaaaatcagcagtctaaagtttgttttaaattctaaatttaaaaaatcttcaaatctgaatataccgcaaatgtcatgagaagtttgattcagtaacttgtgatggaggattctttggtatcttactgtttggttaaggcactaattttacttacctattagattttgaaagtatctgagatatacaaatctccctgtaggaaatgtgaaagaaaagcacaacaaaactagggttttttgttcatttgcttgcttttatgattttttttggtttgttttaatatcaggtggatttttgtttctaagcaatatatacataaaatcaaccaacatatctgaaaaggatcatgaaacctgagaaatgctaatggagatttgctggtacataggaatctagcaaattcaggaaccaaggggaaatgttgtgagataacatttacattgtcaacctttattgactttgtttttacaataaaaaatattttacaacttac

SEQ ID NO: 5963 - protein, 71 aa, Homo sapiens
MLGSVRNGALPAAPLAPGPARGPVAAAVPPARERAAPARRTPPPPRGDGGRRAISERWWIAWQTVKQILDV

SEQ ID NO: 5964 - DNA, 3000 bp, Homo sapiens
ggaggggagacgcgaaactttccgggcgcttcctcccgcggtcccggagccgtcgcagcgccgggaggtgtcgtcgtcgcgggcggtggcggccgacgccatgttggggtctgtgagaaacggggcgctcccggccgctcccctcgcgccggggccggcccgcgggccagttgccgccgccgtcccgccagcccgggagcgagccgcgcccgcccgtaggacgccgccgccgccgcggggggacgggggccgccgggctattagtgaaagatggtggatcgcttggcaaacagtgaagcaaatactagacgtataagtatagtggaaaactgttttggagcagctggtcaacctttaactatacctggacgagttcttattggagaaggagtattgactaagttgtgcaggaaaaagcccaaagcaaggcagtttttcttgtttaatgatattcttgtatatggcaatattgtcatccagaagaaaaaatataacaaacaacatattattcccctggaaaatgtcactattgattccatcaaagatgagggagacttaaggaatggatggctaatcaagacaccaactaaatcttttgcagtttatgctgccactgctacggagaaatcagaatggatgaatcatataaataaatgtgttactgatttactctccaaaagtgggaagacacccagtaatgaacatgctgctgtctgggttcctgactctgaggcaactgtatgtatgcgttgtcagaaagcaaaattcacacctgttaatcgtcgccaccattgccgcaaatgtggttttgttgtctgtgggccctgctctgaaaagagatttcttcttcccagccagtcctctaagcctgtgcggatttgtgacttctgctatgacctgctttctgctggggacatggccacatgccagcctgctagatcagactcttacagccagtcattgaagtctcctttaaatgatatgtctgatgatgatgacgatgatgatagcagtgactaaggacacatttgggagtatttaatcaggtgtggctatctgagaaatcaactttgggggaaatgtaagattctgagctctctctctgttttgttctagccatgaatttgcctgagaaacttgtaacctatgtgcctcaatatattccatagaaagtaggtccccctgccttctcccactcctcacactcttctacagggataggcttttgcaaatatatcagataaattttttgtttcttgtttatttttaggttattttcttggaaggttgggaaaagatgtttgttttaacaggtcatgtactacgttgttgttttcatttctgttataagtaaaactaaaagcacagaatggtgggaaaggggctataatgtggttcattaataatgttagcagcttttttctaaccatcctgtctaatggttaagacaccagtaacaaaaacacatgatttggaaatactttggctttttcatatacctagtggtgccttatcataatagcactgttacatgaaataagcccctaccttcttactttctggtttgttgaaaaaatacactggtgctctttgaagtgataaaatgagtgtttatgaatgggtgtaattaggaaatacttctcatctgacagctacaaataactaagtttggaggtattttcactctatatgaataaatatttttccataaaatagttgtgattatatttttgttttatataggtcccaaattataattgtcaaatatatattttaaattaataaaagttgtcattcttaggaatttggtttgaaatttatcagttatacagaattgtcatactgcattagcttctacctttagtaagacatattttttaggtataaattcttatgctttaacattatttctggattgaaaatcttataaaacccttgaaaataaacagtctcttttttacaaagcctgtgttagagcacagatttacctaggcttgaagatttggaagaaataatatgtaagaatggcctcaaggcagaccactttaagtttggctagacttcatatcgtggaagtattgtctatttcagtgtgaaactatcttgaatttgcaaatatagtgttatattttataaagttttgtaaaatcccaaacaatatttctatttttgtaaaacaattgtatgtataatctgtatttgaaatcattttgcaatctatggaaatagagtagcaattgctatttctaaattgtgaactttaagtcaatctagatttattttgagaagtaattgttcactctttacttttgaggcagccattaggttgaaagtatatatttatcatataaaacttgatgcgttttgcactactctttccatttatatgctgcaaacaactacagtctttgaaatatggaaaatcagcagtctaaagtttgttttaaattctaaatttaaaaaatcttcaaatctgaatataccgcaaatgtcatgagaagtttgattcagtaacttgtgatggaggattctttggtatcttactgtttggttaaggcactaattttacttacctattagattttgaaagtatctgagatatacaaatctccctgtaggaaatgtgaaagaaaagcacaacaaaactagggttttttgttcatttgcttgcttttatgattttttttggtttgttttaatatcaggtggatttttgtttctaagcaatatatacataaaatcaaccaacatatctgaaaaggatcatgaaacctgagaaatgctaatggagatttgctggtacataggaatctagcaaattcaggaaccaaggggaaatgttgtgagataacatttacattgtcaacctttattgactttgtttttacaataaaaaatattttacaacttactttctgttctctgtatattgtgacttgaggatttaccccctctgctaagataataaagatattatgcatattttgcctaataattcaa

SEQ ID NO: 5965 - protein, 71 aa, Homo sapiens; identical to SEQ ID NO: 5963

SEQ ID NO: 5966 - DNA, 1416 bp, Homo sapiens
ggctattagtgaaagatggtggatcgcttggcaaacagtgaagcaaatactagacgtataagtatagtggaaaactgttttggagcagctggtcaacctttaactatacctggacgagttcttattggagaaggagtattgactaagttgtgcaggaaaaagcccaaagcaaggcagtttttcttgtttaatgatattcttgtatatggcaatattgtcatccagaagaaaaaatataacaaacaacatattattcccctggaaaatgtcactattgattccatcaaagatgagggagacttaaggaatggatggctaatcaagacaccaactaaatcttttgcagtttatgctgccactgctacggagaaatcagaatggatgaatcatataaataaatgtgttactgatttactctccaaaagtgggaagacacccagtaatgaacatgctgctgtctgggttcctgactctgaggcaactgtatgtatgcgttgtcagaaagcaaaattcacacctgttaatcgtcgccaccattgccgcaaatgtggttttgttgtctgtgggccctgctctgaaaagagatttcttcttcccagccagtcctctaagcctgtgcggatttgtgacttctgctatgacctgctttctgctggggacatggccacatgccagcctgctagatcagactcttacagccagtcattgaagtctcctttaaatgatatgtctgatgatgatgacgatgatgatagcagtgactaaggacacatttgggagtatttaatcaggtgtggctatctgagaaatcaactttgggggaaatgtaagattctgagctctctctctgttttgttctagccatgaatttgcctgagaaacttgtaacctatgtgcctcaatatattccatagaaagtaggtccccctgccttctcccactcctcacactcttctacagggataggcttttgcaaatatatcagataaattttttgtttcttgtttatttttaggttattttcttggaaggttgggaaaagatgtttgttttaacaggtcatgtactacgttgttgttttcatttctgttataatatctgagatatacaaatctccctgtaggaaatgtgaaagaaaagcacaacaaaactagggttttttgttcatttgcttgcttttatgattttttttggtttgttttaatatcaggtggatttttgtttctaagcaatatatacataaaatcaaccaacatatctgaaaaggatcatgaaacctgagaaatgctaatggagatttgctggtacataggaatctagcaaattcaggaaccaaggggaaatgttgtgagataacatttacattgtcaacctttattgactttgtttttacaataaaaaatattttacaactta

SEQ ID NO: 5967 - protein, 30 aa, Homo sapiens [sequence omitted]

SEQ ID NO: 5968 - DNA, 562 bp, Homo sapiens
acttgcacccagagaaagagagagagagccagagctgtcggtctttgcagatggacagggggagccaggacacagctcagcctactcatgcccagagagagaaagagttcagctgctgaccctgaaggcaagggagagctggccacgcaggtgtgtgtgggagctggctgctgagaggagccgccgagctggagcaggcagccaaaataaaggtgaacagtgtaaacgagctagtgtaagctgctgatgagagagctgctgaataaaattacatttcacctgcctacagcaccccgagtgttctttcagctatctgctcatccatcccctcttttcggacctcagctgggactggaccccaaccctgagcataacaacaagtgatacttttgttaggtccattttcacttcatcagaaatgtcctgagctctccctgggcactgtcctgtggctggtaagaggcagagggcaggaaccgtgtcagtcttgttccttgttgtaacccagtgccgggcacatgtgggccaaataatcatggcaacaggacttttagaagcacgt

SEQ ID NO: 5969 - protein, 45 aa, Homo sapiens
MRELLNKITFHLPTAPRVFFQLSAHPSPLFGPQLGLDPNPEHNNK

SEQ ID NO: 5970 - DNA, 519 bp, Homo sapiens
gcgagcctcccaggattctcaaacagaagcagcctgccaggctgagccatccagaagaccccctccctcttccctgagctctgtttcttccatgaggttgaagaaaaatgccgtcgtggtcccctgcctgcttactcagcgtgtcaagcaggagttctcagctccagtgtgccatggagggccttgggaagaggtcacataccattcccatccccaggcacaggagcactgaggacccttcttgacctcctggatcagaaaggcagaggaaatgctgggcagaagtcaaggtgtcagtgggctgccctccctccggaggctccaggggagaatctattcctcgcctcttccaattgctggtggctgatggcacaccttggcttgtggccacaatactccaatttctgcctccatggtcacactgacttcatttcttctgtgtgcatcaaatttctctctgctctgtgattgcatttagggcccctggatcagcaatgtcataaaagaccccagttcttc

SEQ ID NO: 5971 - protein, 46 aa, Homo sapiens
MRLKKNAVVVPCLLTQRVKQEFSAPVCHGGPWEEVTYHSHPQAQEH

SEQ ID NO: 5972 - DNA, 2532 bp, Homo sapiens
accggagccttggcgattggaggggaaaaggccaggcgattcaagatggcggaggacctggacgagctcttggatgaagtcgagtccaagttttgcacacctgaccttctaagacggggtatggtcgagcagcccaaaggctgcggcggcggcacccacagtagcgaccggaaccaagccaaggcgaaagagacgctcagatcaacagaaacatttaaaaaagaagatgatcttgacagtcttattaatgaaatacttgaagagcccaacttggacaaaaaaccctctaaattaaaatctaaatcttcaggtaacacatctgtcagagcttccattgaaggccttggtaaaagttgcagtccggtgtaccttggtggaagctctattccatgtgggattggaacaaatatttcatggagagcatgtgaccatctgcgttgtatagcctgtgatttcttggtagtcagctatgatgactatatgtgggacaaatcgtgtgattatctgtttttcaggaacaacatgccagaatttcacaaattaaaagcaaagttgataaagaagaaaggaacacgggcatatgcctgccagtgtagctggagaactattgaagaagtgactgaccttcagacagatcatcagcttcgctgggtttgtggtaaacattaagaatgcagactgcacattcggacagatgcatccatgagagtggtctccatgaatcatcatcatgtttagacaatagtccctagcaataccattccctgtgggaaaaggcagtgaattttattgatacaactacatacatttttgaagaccaaatggactaaggaagatcatgtattataacactttggaattattcctgatacatggatgtttcacttagtaacaggcatctacattctttactaatctgtcttctgtttaatagaggtttgattatggagttccatacaaatatctagtttttcattagcaactgcaatattgattgctaatacgtttagcaaatcattccccaacttgtagcagttaaagtggataaagccggccagggcaaagagatcatttaggggtgtctacaacacttcttccagtcagatcttttgttgccaaagatcataatttggacatggcagaaaccaggtgatcagtggctgactgaagggtgttcagaagtagttacaggtattttgcaaaaacactgcctcatagctgatcttacctcatcaactcaaagcaatgttatgcacaatattaaatacatgttaccagttttagcttatttttccctcttttgttcatttaactatcaaaagttattttctattttgattacccaataatatataaaaagagtttgatgcacccaaaatcacaaaaatcctaatacatacaggttattgttggattttccaagtactttctatcctttaatgcctaaaactccatcaagggaagtaaacagcaagtaatataatttttcaggcagcctgtggacttctctggtaggatcaggttgacatatcgtttattaggtgagtaagtgaaaagacaagtaaagcataactgaaccaacaggtaacctgttgggctccttcctgacatcactgagatctgaggagccctacaatagcagcacattcaggaaatcaggtccctcaaaatttctagctcccaaccccattgagagattttgggagctttccaatctgccacaaactccctgctacatatgtactatatagttcaaatgtgtgatacagagcaccctgaaagggaataattgaaacaaagttataatcttcttagtcttatgctaaatttattccagccaccctactgaagggaggaagatctgatcattagaatccttttcctagccatgacacatttacatacttgtaaaatttattgtagtaagtctagcattgcaacagaatagatcttataatggccaatcctcacacttttgtattaaggatattatgacagactaaagcctacattgcctctactttgaagggacaaagttgtcctggtttttttttcccttttattatttcattataactatcctaaaacttacatacattgcctatgtttggcattccataacataataattataataatcccccaatgtcagaaatgtatgtgtgagttcccatgtttattggcaatttataagctttttaatattgtactattttaaactaaaatgtagaaagaatattatgtttatatacagtcagataaattattaactgttgtaatttaagctgaaaatgaaactattttagtatcagtatagaagaaaagtatagtttctaatcatctataattttaaaatgcaaagcctataaaactttcaagatgttttgcctgtttgtttttaagatttataataattttctatctttagcaagtagctatttttaagccaggtaacttctttatttgaactgtattatactctcagaccctcatcctgcctagaaatgaataagtaataaataattactctgt

SEQ ID NO: 5973 - protein, 207 aa, Homo sapiens; identical to SEQ ID NO: 578

SEQ ID NO: 5974 - DNA, 2503 bp, Homo sapiens
aaaaggccaggcgattcaagatggcggaggacctggacgagctcttggatgaagtcgagtccaagttttgcacacctgaccttctaagacggggtatggtcgagcagcccaaaggctgcggcggcggcacccacagtagcgaccggaaccaagccaaggcgaaagagacgctcagatcaacagaaacatttaaaaaagaagatgatcttgacagtcttattaatgaaatacttgaagagcccaacttggacaaaaaaccctctaaattaaaatctaaatcttcaggtaacacatctgtcagagcttccattgaaggccttggtaaaagttgcagtccggtgtaccttggtggaagctctattccatgtgggattggaacaaatatttcatggagagcatgtgaccatctgcgttgtatagcctgtgatttcttggtagtcagctatgatgactatatgtgggacaaatcgtgtgattatctgtttttcaggaacaacatgccagaatttcacaaattaaaagcaaagttgataaagaagaaaggaacacgggcatatgcctgccagtgtagctggagaactattgaagaagtgactgaccttcagacagatcatcagcttcgctgggtttgtggtaaacattaagaatgcagactgcacattcggacagatgcatccatgagagtggtctccatgaatcatcatcatgtttagacaatagtccctagcaataccattccctgtgggaaaaggcagtgaattttattgatacaactacatacatttttgaagaccaaatggactaaggaagatcatgtattataacactttggaattattcctgatacatggatgtttcacttagtaacaggcatctacattctttactaatctgtcttctgtttaatagaggtttgattatggagttccatacaaatatctagtttttcattagcaactgcaatattgattgctaatacgtttagcaaatcattccccaacttgtagcagttaaagtggataaagccggccagggcaaagagatcatttaggggtgtctacaacacttcttccagtcagatcttttgttgccaaagatcataatttggacatggcagaaaccaggtgatcagtggctgactgaagggtgttcagaagtagttacaggtattttgcaaaaacactgcctcatagctgatcttacctcatcaactcaaagcaatgttatgcacaatattaaatacatgttaccagttttagcttatttttccctcttttgttcatttaactatcaaaagttattttctattttgattacccaataatatataaaaagagtttgatgcacccaaaatcacaaaaatcctaatacatacaggttattgttggattttccaagtactttctatcctttaatgcctaaaactccatcaagggaagtaaacagcaagtaatataatttttcaggcagcctgtggacttctctggtaggatcaggttgacatatcgtttattaggtgagtaagtgaaaagacaagtaaagcataactgaaccaacaggtaacctgttgggctccttcctgacatcactgagatctgaggagccctacaatagcagcacattcaggaaatcaggtccctcaaaatttctagctcccaaccccattgagagattttgggagctttccaatctgccacaaactccctgctacatatgtactatatagttcaaatgtgtgatacagagcaccctgaaagggaataattgaaacaaagttataatcttcttagtcttatgctaaatttattccagccaccctactgaagggaggaagatctgatcattagaatccttttcctagccatgacacatttacatacttgtaaaatttattgtagtaagtctagcattgcaacagaatagatcttataatggccaatcctcacacttttgtattaaggatattatgacagactaagcatggtagctcacgcctgtaatcccagcactttgggaggctgaggcaggcagatcagctgaggtcaggagttcaagaccagcctggccaacatgataaaacaccatctctactaaaaatacaaaaattagctgggcgcggtggtgcatgcctgtaatcccaactactcgggaggccgaggcaggaaaatttattgaacctgggaggcagaggttgtagtgagccaaggtcgcgccactgcgctccagcctggacaacacagtgagactctgtctcaaaaaaaaaaaaaagacattatgacagattttatcttttaataaaaatgtattatatccctaaagttatatctatatgtaattgagtcagaaacctagggggatgtcgattgaagtcgactgctggaaaaaaatagcagagcaacaagatccacacatttagaacctcatagaatttgacacattattcataatggtgcaattctttcttttttattccagtaagcaaatttactaaatcactaatttg

SEQ ID NO: 5975 - protein, 207 aa, Homo sapiens; identical to SEQ ID NO: 578

SEQ ID NO: 5976 - DNA, 377 bp, Homo sapiens
gagtgaagaggtgccagaatccgcgaagagggtcgacgaatgcgctgccgcggaggcaacaatggccatgagggattcaaggattatgcgtctctgcaccctacaatacaccaactggcagttccatcatttgaaagaaaatcttcaaggtaaagacatttacaatgacacaaaaacctttcaaaggcatcatggtcctaaagggctttccccaagggacagcacagtgtgttccaggccctgacaagaggtttaagacctgtgacacagactgaagctctcctggcatactctgaagctctcctggcaccctcccctttatgcttcacaggtgtttctcctaataaatttcttgtatgtctcatcccatctgggaa

SEQ ID NO: 5977 - protein, 60 aa, Homo sapiens
MAMRDSRIMRLCTLQYTNWQFHHLKENLQGKDIYNDTKTFQRHHGPKGLSPRDSTVCSRP

SEQ ID NO: 5978 - DNA, 4705 bp, Homo sapiens
ctctccccctcccctcctcactgtcacactctctgtgcccccgtctctcttctctcatttgcttgctcatctccgaacgtgaatccgcggctcccggaggagcccagcgcccggagcacctggagtccggccggcggcgggccgagcctggccagcggcggcggcggcggcggcggcggcgggagccgagggagcggcagccgcgaccgcgggcaccgcgggagccccagcggcagcagccgccgccgagatgtcccggcgaaagcaaagcaaaccccggcagatcaaacggccgcttgaagatgccattgaagatgaggaagaagaatgtccatcagaggaaacagacatcatctccaaaggagactttccattggaggaaagcttttccacagaatttgggcctgaaaatctgagctgcgaagaagtggaatacttttgtaacaaaggtgatgatgaaggaatccaggagacagcagaatcagatggggacacacagtcagagaaaccggggcaacctggagttgagacagacgactgggatggaccaggagagctggaggtgtttcagaaagatggggaacgaaaaattcagagtcgacagcaacttccagtgggaacaacctgggggccgtttcctgggaagatggacttgaataataattctttgaagacaaaggctcaggtcccaatggtgctgactgctggtcccaagtggttgctggatgtgacttggcaaggagtggaagacaacaaaaacaactgcattgtgtacagcaaagggggtcagctttggtgtacaactacgaaggccatctctgagggtgaagagctaattgcctttgtggtggattttgactcaaggctacaagctgccagtcagatgactctcacagaagggatgtaccctgcacgcctgctggactcaattcagctgcttcctcagcaagctgccatggcttctattttgcccacagctattgtcaataaggatatattcccttgcaagtcctgtggcatctggtatcggagtgagcggaatctgcaggcccatttgatgtactactgcagtgggaggcaaagagaagctgctccggtgtcagaggaaaatgaagacagtgcccatcagatttccagcctgtgccccttcccacagtgcaccaagagcttttcaaatgctcgagctctagaaatgcacctgaattcacacagtggagtgaaaatggaagaattcctgccccctggtgctagtctaaaatgcaccgtctgtagctacactgctgattccgtgatcaactttcaccaacacctgttctcccatctcactcaagctgccttccgatgtaatcactgccatttcggcttccagactcagagggagttattgcagcaccaggagctccatgtccctagcggcaaacttcccagagaaagtgacatggaacactctccaagtgcaactgaagacagcttacagccagccacagacttattgaccagaagcgaacttccccagagccaaaaggccatgcagactaaagatgcgagctctgacacagagctggacaagtgtgagaaaaagactcagctctttctcacgaaccagagaccagagatacagcctacaacaaataaacaaagcttttcttacacaaaaataaagtctgagccctctagcccaagacttgcctcatctccagttcagcctaatattgggccttctttccctgtgggccctttcctatctcagttttctttcccccaagatatcaccatggtccctcaagcttcagagatcttagctaagatgtctgaactggtgcatcggcgactgaggcatggcagtagtagctaccctcccgtcatttacagccctttgatgcccaagggggctacttgttttgagtgtaacataacattcaataatttggataattatctagtgcacaaaaagcattattgcagcagccgatggcagcagatggctaagtccccagagttccctagtgtgtcagaaaagatgcctgaagctttgagtcccaacactggccaaacctccataaaccttctcaacccagctgctcattctgctgatcctgagaatccacttcttcaaacatcttgcatcaattcttccactgtcttagatttaattgggccaaatgggaagggccatgacaaggacttttccactcaaactaagaagctctccacctccagtaacaatgatgacaaaattaatggaaaacctgttgatgtgaaaaatcccagtgtccccttagtggatggggaaagtgacccaaataagactacctgtgaagcttgcaacattaccttcagccggcacgaaacatacatggtccacaaacagtattactgtgctacacgccacgaccctccactgaagaggtctgcttccaacaaagtgcctgccatgcagagaaccatgcgcacacgcaagcgcagaaagatgtatgagatgtgcctacctgagcaggaacaaaggcctccactggttcagcagagatttcttgacgtagccaacctcaataatccttgtacctccactcaagaacccacagaagggctaggagagtgctaccacccaagatgtgatatctttccaggaattgtctctaaacacttggaaacttctctgacgatcaacaagtgtgttccagtttccaaatgtgatactactcattccagtgtttcctgcctagagatggacgtgcccatagatctcagcaaaaagtgtttatctcagtctgagcggacgaccacgtctcccaaaaggctgctggactatcacgagtgcactgtgtgcaagatcagtttcaataaggtagaaaactatctggcccacaagcagaatttctgcccggttactgcacatcagcgtaatgacctgggtcaactggacggcaaagtgtttccgaatccagaaagcgaacgaaacagccctgatgtcagctacgaaagaagcataataaaatgtgagaaaaatgggaatttgaagcagccttcccccaatggaaacttattttcatcccacctagcaaccctgcaaggcttgaaggtctttagtgaagctgctcagctcattgctacaaaagaagaaaacagacatttgtttcttccacaatgcctttaccctggagcaataaagaaagcaaaaggagccgaccagctttctccatattatggaatcaagccaagtgattatatttctggttctcttgtcatccataacactgacatcgagcaaagcagaaatgcagaaaatgaatctcctaaaggccaggcttcctcaaatgggtgtgctgcgctgaagaaagattctctgccattgttgcccaaaaatcgaggaatggtaatagtgaatggtggactgaaacaagatgagagacctgctgccaacccacagcaagagaacatttcccagaatcctcagcacgaagacgaccacaaatctccctcgtggatctctgagaacccattagctgccaatgagaatgtctcaccaggaattccctcagcagaggaacagttgtctagtatagcaaaaggtgtgaatggttccagccaggctccaaccagtgggaaatattgccggctatgtgatatccagttcaacaacctttcaaactttataactcacaagaagttttattgctcatcacatgcagcagaacatgtcaaatgaactaactaaacatcagtcacctttggtatcagtgtttagtatgttgttctaaccagtccagaaaaaaaaataagctgtttgaattacatctgggcaatcaggagataattcattatggctgagttgaagacttaaggtgtaatttcattacagtccattagtaaagtgtattattggtgccattttcaaaaaaattaatttattttaccagcagtattcatagctgtggttatgttattttttatttaaaaactttatattaaagtcatttgtaatgttattgtatagttattgtgtagcacatatggtttgcactgtatagtagcttttaaagaaaatagtcacaatacagaaaagcattttagaaatagcttcaaaagcacttgtgtatcttgattttttcttatatgctgttgcagatatatgtatatgctaaaatataacttgcaaagatgttctaaatacacatgctataagttcgccttaagatttcaattcttggataatcaggctctgtttgcactttatattttagcagatacagtctcttagtcactaggctttgcatttgtatgtagctgtatgtttccgtccattttcttaatcctgaacctgtatgttaaatgaagatggcaatttttttcttgtatagtacttgtattttctttcgctgatgcagctctgtctcaatttttaaacctttgctgttaaatgcaatactttataaagaatgaacaaaattactggaagcagtattgtaagtaatgaggtagtattaatcagttttatcttttgaaaggcacagtctaaatcgaaaccctaaactcaatgctgcaagtatgaatttaattcatatataagatctatttaaatataagagtagcaatactgcacctggtgatcacaaagataatgttctacttctgatagaaataatttctcaacaaatgttgttactatgcatgtatatggatggaataaaattccagattgttggag

SEQ ID NO: 5979 - protein, 1151 aa, Homo sapiens
MSRRKQSKPRQIKRPLEDAIEDEEEECPSEETDIISKGDFPLEESFSTEFGPENLSCEEVEYFCNKGDDEGIQETAESDGDTQSEKPGQPGVETDDWDGPGELEVFQKDGERKIQSRQQLPVGTTWGPFPGKMDLNNNSLKTKAQVPMVLTAGPKWLLDVTWQGVEDNKNNCIVYSKGGQLWCTTTKAISEGEELIAFVVDFDSRLQAASQMTLTEGMYPARLLDSIQLLPQQAAMASILPTAIVNKDIFPCKSCGIWYRSERNLQAHLMYYCSGRQREAAPVSEENEDSAHQISSLCPFPQCTKSFSNARALEMHLNSHSGVKMEEFLPPGASLKCTVCSYTADSVINFHQHLFSHLTQAAFRCNHCHFGFQTQRELLQHQELHVPSGKLPRESDMEHSPSATEDSLQPATDLLTRSELPQSQKAMQTKDASSDTELDKCEKKTQLFLTNQRPEIQPTTNKQSFSYTKIKSEPSSPRLASSPVQPNIGPSFPVGPFLSQFSFPQDITMVPQASEILAKMSELVHRRLRHGSSSYPPVIYSPLMPKGATCFECNITFNNLDNYLVHKKHYCSSRWQQMAKSPEFPSVSEKMPEALSPNTGQTSINLLNPAAHSADPENPLLQTSCINSSTVLDLIGPNGKGHDKDFSTQTKKLSTSSNNDDKINGKPVDVKNPSVPLVDGESDPNKTTCEACNITFSRHETYMVHKQYYCATRHDPPLKRSASNKVPAMQRTMRTRKRRKMYEMCLPEQEQRPPLVQQRFLDVANLNNPCTSTQEPTEGLGECYHPRCDIFPGIVSKHLETSLTINKCVPVSKCDTTHSSVSCLEMDVPIDLSKKCLSQSERTTTSPKRLLDYHECTVCKISFNKVENYLAHKQNFCPVTAHQRNDLGQLDGKVFPNPESERNSPDVSYERSIIKCEKNGNLKQPSPNGNLFSSHLATLQGLKVFSEAAQLIATKEENRHLFLPQCLYPGAIKKAKGADQLSPYYGIKPSDYISGSLVIHNTDIEQSRNAENESPKGQASSNGCAALKKDSLPLLPKNRGMVIVNGGLKQDERPAANPQQENISQNPQHEDDHKSPSWISENPLAANENVSPGIPSAEEQLSSIAKGVNGSSQAPTSGKYCRLCDIQFNNLSNFITHKKFYCSSHAAEHVK

SEQ ID NO: 5980 - DNA, 1581 bp, Homo sapiens
ctgactggtgtgtttacaaaccttgagcaagatacagagtgccaattgctgtatttacaatcccttagctagacataaaggttctccaagtccccaccagactcaggagcccagctggcttcacccagtggatcccgcattggggcgcaggtggagctgcctgccagtctcgtgctgtgcgcccgcactcctcagcccttgggtggtcgatgggactgggcgccgtagagcaggcggcagcgctcgtcggggaggctccggctgcgcaggagcccacagcgtgggggaggctcaggcatggtgggctgcaggtcccaagccctgccccgccgggaggcagctaaggcccggcgagaagtccggcacagcagctgctggcccaggtgctaagcccctcactgcctagggcgggcggggccggctggctggccgctctgagtgcagggcccgtggagcccacgcccacccggaactggcactgacccgcaagcgctgtgcgcagccgcggttcctgcccgcgcctctacttccacacctccccgcaagctgagggagccggctccggcctcggccagcccaggaaggggctccaccgtgcagcggcgggctgaagggctcctcaagtgccgccaaagtgggagcccaggcagaggaggactcgagaacgagcaagggctgcgagcgctgccagcacgctgtcacctctcaatcccactcaaactgtgtttacagagcatcagagaaaaaaagacaacctgtattcgccctggaaaaactaatggccgcttgaagatgccattgaagatgaggaagaagaatgtccatcagaggaaacagacatcatctccaaaggagactttccattggaggaaagcttttccacagaatttgggcctgaaaatctgagctgcgaagaagtggaatacttttgtaacaaaggtgatgatgaaggaatccaggagacagcagaatcagatggggacacacagtcagagaaaccggggcaacctggagttgagacagacgactgggatggaccaggagagctggaggtgtttcagaaagatggggaacgaaaaattcagagtcgacagcaacttccagtgggaacaacctgggggccgtttcctgggaagatggacttgaataataattctttgaagacaaaggctcaggtcccaatggtgctgactgctggtcccaagtggttgctggatgtgacttggcaaggagtggaagacaacaaaaacaactgcattgtgtacagcaaagggggtcagctttggtgtacaactacgaaggccatctctgagggtgaagagctaattgcctttgtggtggattttgactcaaggctacaagctgccagtcagatgactctcacagaagggatgtaccctgcacgcctgctggactcaattcagctgcttcctcagcaagctgccatggcttctattttgcccacagctattgtcaatagtaagtgctcagtgctgtgtagcccagctttagaggtgatgggaatttatgggagaaaaaaatgtctactgacaagaaaccaggaacagacctttttccttc

SEQ ID NO: 5981 - protein, 147 aa, Homo sapiens
MDLNNNSLKTKAQVPMVLTAGPKWLLDVTWQGVEDNKNNCIVYSKGGQLWCTTTKAISEGEELIAFVVDFDSRLQAASQMTLTEGMYPARLLDSIQLLPQQAAMASILPTAIVNSKCSVLCSPALEVMGIYGRKKCLLTRNQEQTFF

SEQ ID NO: 5982 - DNA, 630 bp, Homo sapiens
aggaataaagaatcacaaacttgtccgctgacctcagcaggtggagtgccggaattcaggggaatctgtgttatcatgcacactcttctctgaggatagaatcacaggcacaccaaaaactagccatcgccgttagggacggcatcagaagggacagccccaaaagattacacaggacaaaagaagtggtcaaatacaaggattcctttgtaagtggatgctttaaatatattagtatattgagtaatcctttatctagttgctctcctctgctggggaccagaaagttgataagaaatattaaaaaaaaatttttttgaaagggttgtggttgtgcttgaaccaacttcagagttacatattaggcctagtgtcatggagacaaaacagaaatgcaatctttggatactgcagctgcttcgtgcttttgccagcttatgctgctaaagaaggagaaaaaaaaaggactgccagagctaagaaaatttaataccttggagctgatatatacggtattattttgtctttttgacagggtccggtgctatttttacccaagttgatacaggggttaggttaggactttagaaagaaatggtgatttattttaagtactgtttgtgtaatagc

SEQ ID NO: 5983 - protein, 56 aa, Homo sapiens
MQSLDTAAASCFCQLMLLKKEKKKGLPELRKFNTLELIYTVLFCLFDRVRCYFYPS

SEQ ID NO: 5984 - DNA, 2479 bp, Homo sapiens
ctggaaactgcgacgagatgggaactttctgaattaagcagcaattcccgcgctggttttctggggagtcctcgcctccagagctagttatgtatcaaatcccatttgcaagggttgtttgtcttgttcaaaggacaatgggtgtagccgatgtcaacagaagttgttcttcttccttcgaagagaagggatgcgccagtatggagagtgcctgcattcctgcccatccgggtactatggacaccgagccccagatatgaacagatgtgcaagatgcagaatagaaaactgtgattcttgctttagcaaagacttttgtaccaagtgcaaagtaggcttttatttgcatagaggccgttgctttgatgaatgtccagatggttttgcaccattagaagaaaccatggaatgtgtggaaggatgtgaagttggtcattggagcgaatggggaacttgtagcagaaataatcgcacatgtggatttaaatggggtctggaaaccagaacacggcaaattgttaaaaagccagtgaaagacacaatactgtgtccaaccattgctgaatccaggagatgcaagatgacaatgaggcattgtccaggagggaagagaacaccaaaggcgaaggagaagaggaacaagaaaaagaaaaggaagctgatagaaagggcccaggagcaacacagcgtcttcctagctacagacagagctaaccaataaaacaagagatccggtagatttttaggggtttttgtttttgcaaatgtgcacaaagctactctccactcctgcacactggtgtgcagcctttgtgctgctctgcccagtatctgttcccagtaacatggtgaaaggaagcaccaccagcatggcccctgtgttatttatgctttgatttgaatctggagactgtgaaggcaggagtaagtgcacagcccgtgacttggctcagtgtgtgctgagagaatccgtccccggcaccatggacatgctagaggtgtgaggctgcagaacaccgctggaggacggacttgtgcctatttatgtgaaagaagatgcttggcaggcaatgcgctactcactcgtgacctttatttctcacattgtgcattttcaaggatatgtttgtgtggatatctgcttagtgttaccacatggtattctcagcatgttaccttcacactgttgtgcgatgaaactgcttttagctgaggatatgctctggaaattcctgctcagtttcactgcagccctaatatgtacatatactgcaggagctacatataaagctcttatttactgtatatttatgctttcttgtgggtaacaagtcatacctgattaatatgatgccactttgtttctagtggttcctaacccattgtctgataaatgacttttctagtttggggaattgacacttgttttgttgcctcttgaaactttttttttttcccctcattgtgggcttatttctcattgtaagggtaggataaactagtttttgtatatagagtcaaatgaccagtgtcaaagagtttgcatattgggtagaccttctccactccacatgtcccacacatatagataaagcagcaggcggcatctggcaatcagaagcccaaactgcctttgagtctaagatgtgatgactttgatgaaacacaactgaaaacatgagggactatatccagtcacttgtagccagtttcacaggccagctacagaattgtccaaacaaacattatttctgactgcaatttttttcccccaaatttaaagcaatccctggctttaaatgacaaggcacctaccaatgttcttgggtcactgaagaagctactaccatgagcctgggcatagaattttaggagataaaaggatgaatttctgtgactgccagtcagatcttaacaggtttctgttgagccagaatctgtttcagatccaagatggagaggaacactatggaaacttcccaggtgactttcagagcagttgtttcaaacacatcattgtccttttaggggaaccagtttttagaaggttgtgaattggctttttcacaaagcatgattatcttcctggctgatccaggagaaaattagaacagaaaaataatggttgtggattttgaaacaaagcaaggtaaagccttttttttttcaccttgcattggcaaaactacctcttcagtgtttttaacttttgattcaaaagcatcttaccaataaggataaatatcatatacatcgttatgaaaatattgctatgagataataagccacatatgaatgttgtatacaactttagggtttacatttaatcctgaagtgttacctcctttcatgtctatttacactattttcccatttactaagtggggagggggtctccttatatagtgcttcatcgttaataagtcaatacctgttgttcctgggatgttcttttttgtgcattaaaaacttcaaaatt

SEQ ID NO: 5985 - protein, 176 aa, Homo sapiens
MRQYGECLHSCPSGYYGHRAPDMNRCARCRIENCDSCFSKDFCTKCKVGFYLHRGRCFDECPDGFAPLEETMECVEGCEVGHWSEWGTCSRNNRTCGFKWGLETRTRQIVKKPVKDTILCPTIAESRRCKMTMRHCPGGKRTPKAKEKRNKKKKRKLIERAQEQHSVFLATDRANQ

SEQ ID NO: 5986 - DNA, 3148 bp, Homo sapiens
agcctagacttagatgccttggaccacagcaccacctacttatagaagcatcccaagcctcagccggtctgcatctccatcggaaagtgcgcttgccacatcccttcggatcacttcgtcctcccgagagcgttctgccttctacagctcggaaagaaagaaatcttagctgtgaagtgaccgtggagaaagcgcaggaagcgacacaattggttagggaggcagagagtgtgagcgggcgcaccccttgcctggggaccgcgctcgcgggcggggacggagcatcccagtggctgcacccgccgctccgcgctcctgcctggcgtcgccaaccccgcggcggccgctggaattccagagctgccaggcgctcccagccggtctcggcaaacttttccccagcccacgtgctaaccaagcggctcgcttcccgagcccgggatggagcaccgcgcctagggaggccgcgccgcccgagacgtgcgcacggttcgtggcggagagatgctgatcgcgctgaactgaccggtgcggcccgggggtgagtggcgagtctccctctgagtcctccccagcagcgcggccggcgccggctctttgggcgaaccctccagttcctagactttgagaggcgtctctcccccgcccgaccgcccagatgcagtttcgccttttctcctttgccctcatcattctgaactgcatggattacagccactgccaaggcaaccgatggagacgcagtaagcgagctagttatgtatcaaatcccatttgcaagggttgtttgtcttgttcaaaggacaatgggtgtagccgatgtcaacagaagttgttcttcttccttcgaagagaagggatgcgccagtatggagagtgcctgcattcctgcccatccgggtactatggacaccgagccccagatatgaacagatgtgcaagatgcagaatagaaaactgtgattcttgctttagcaaagacttttgtaccaagtgcaaagtaggcttttatttgcatagaggccgttgctttgatgaatgtccagatggttttgcaccattagaagaaaccatggaatgtgtggaaggatgtgaagttggtcattggagcgaatggggaacttgtagcagaaataatcgcacatgtggatttaaatggggtctggaaaccagaacacggcaaattgttaaaaagccagtgaaagacacaatactgtgtccaaccattgctgaatccaggagatgcaagatgacaatgaggcattgtccaggagggaagagaacaccaaaggcgaaggagaagaggaacaagaaaaagaaaaggaagctgatagaaagggcccaggagcaacacagcgtcttcctagctacagacagagctaaccaataaaacaagagatccggtagatttttaggggtttttgtttttgcaaatgtgcacaaagctactctccactcctgcacactggtgtgcagcctttgtgctgctctgcccagtatctgttcccagtaacatggtgaaaggaagcaccaccagcatggcccctgtgttatttatgctttgatttgaatctggagactgtgaaggcaggagtaagtgcacagcccgtgacttggctcagtgtgtgctgagagaatccgtccccggcaccatggacatgctagaggtgtgaggctgcagaacaccgctggaggacggacttgtgcctatttatgtgaaagaagatgcttggcaggcaatgcgctactcactcgtgacctttatttctcacattgtgcattttcaaggatatgtttgtgtggatatctgcttagtgttaccacatggtattctcagcatgttaccttcacactgttgtgcgatgaaactgcttttagctgaggatatgctctggaaattcctgctcagtttcactgcagccctaatatgtacatatactgcaggagctacatataaagctcttatttactgtatatttatgctttcttgtgggtaacaagtcatacctgattaatatgatgccactttgtttctagtggttcctaacccattgtctgataaatgacttttctagtttggggaattgacacttgttttgttgcctcttgaaactttttttttttcccctcattgtgggcttatttctcattgtaagggtaggataaactagtttttgtatatagagtcaaatgaccagtgtcaaagagtttgcatattgggtagaccttctccactccacatgtcccacacatatagataaagcagcaggcggcatctggcaatcagaagcccaaactgcctttgagtctaagatgtgatgactttgatgaaacacaactgaaaacatgagggactatatccagtcacttgtagccagtttcacaggccagctacagaattgtccaaacaaacattatttctgactgcaatttttttcccccaaatttaaagcaatccctggctttaaatgacaaggcacctaccaatgttcttgggtcactgaagaagctactaccatgagcctgggcatagaattttaggagataaaaggatgaatttctgtgactgccagtcagatcttaacaggtttctgttgagccagaatctgtttcagatccaagatggagaggaacactatggaaacttcccaggtgactttcagagcagttgtttcaaacacatcattgtccttttaggggaaccagtttttagaaggttgtgaattggctttttcacaaagcatgattatcttcctggctgatccaggagaaaattagaacagaaaaataatggttgtggattttgaaacaaagcaaggtaaagccttttttttttcaccttgcattggcaaaactacctcttcagtgtttttaacttttgattcaaaagcatcttaccaataaggataaatatcatatacatcgttatgaaaatattgctatgagataataagccacatatgaatgttgtatacaactttagggtttacatttaatcctgaagtgttacctcctttcatgtctatttacactattttcccatttactaagtggggagggggtctccttatatagtgcttcatcgttaataagtcaatacctgttgttcctgggatgttcttttttgtgcattaaaaacttcaaaatt

SEQ ID NO: 5987 - protein, 243 aa, Homo sapiens
MQFRLFSFALIILNCMDYSHCQGNRWRRSKRASYVSNPICKGCLSCSKDNGCSRCQQKLFFFLRREGMRQYGECLHSCPSGYYGHRAPDMNRCARCRIENCDSCFSKDFCTKCKVGFYLHRGRCFDECPDGFAPLEETMECVEGCEVGHWSEWGTCSRNNRTCGFKWGLETRTRQIVKKPVKDTILCPTIAESRRCKMTMRHCPGGKRTPKAKEKRNKKKKRKLIERAQEQHSVFLATDRANQ

SEQ ID NO: 5988 - DNA, 666 bp, Homo sapiens
atggatcaaattcatttggtgaagcatccagttactaaaaattttggtgagagtaactttacagaaaagccgtaatgtagaattgcaaatttagatatttggggtaagaattatggtgattcttttgcgatcagttccttgatgacctggcatctctagttgatgccaatctgttccaatcttgacaccaccttggggctccacttctggccaccttcttctgttgaaatgccttcagattttcttcccaggactaccacttaataactatgtggacttggacacatctctgatactgtggagactgattatggaactgatgttgcaggctcgtgaggtttaacattacctgacttcacaatatgttacaagtccatggtaatccaaacagcatgtattgctgtaaaaacagacacatagaccaatggaacaaaatagtccagaaataaatccacagacttacagataactgatttttcagtacaagtgctaacaacatacactggggagaggagagcctcttcaataaatggtgctgggaaaattgagaatccatacgcagaaggatgaaactggaccttgtctctccccatataaaaaaaaaaaaaaacaactgaagatggattaaagacttaaactaaggcctgaaaccataaaactactagt

SEQ ID NO: 5989 - protein, 33 aa, Homo sapiens [sequence omitted]

SEQ ID NO: 5990 - DNA, 524 bp, Homo sapiens
agatgccttggaccacagcaccacctacttatagaagcatcccaagcctcagccggtctgcatctccatcggaaagtgcgcttgccacatcccttcggatcacttcgtcctcccgagagcgttctgccttctacagctcggaaagaaagaaatcttagctgtgaagtgaccgtggagaaagcgcaggaagcgacacaattggttagggaggcagagagtgtgagcgggcgcaccccttgcctggggaccgcgctcgcgggcggggacggagcatcccagtggctgcacccgccgctccgcgctcctgcctggcgtcgccaaccccgcggcggccgctggaattccagagctgccaggcgctcccagccggtctcggcaaacttttccccagcccacgtgctaaccaagcggctcgcttcccgagcccagaagggatgcgccagtatggagagtgcctgcattcctgcccatccgggtactatggacaccgagccccagatatgaacagatgtgcaagtgagcat

SEQ ID NO: 5991 - protein, 51 aa, Homo sapiens
MPWTTAPPTYRSIPSLSRSASPSESALATSLRITSSSRERSAFYSSERKKS

SEQ ID NO: 5992 - DNA, 865 bp, Homo sapiens
acgccctgcgcgcgccgagccgggagccggctgcctcgctttgcgtgaccgcggcagctctccactgtggtttgaatccacggggtattgatcaccctgcccatgctgaaggtattaaactgcaaattgaaggtgaaggtgtggaatctcaatccattaaaaataaaaatttccagaaggtgcctgaccagaaaggaactcccaagcgactgcaggcagaagctgagacggctaagtcagctacggtgaagctatctaaaccggtggctctatggacccagcaggatgtctgcaagtggttgaagaaacattgtccgaatcagtatcagatctacagtgagtcattcaaacagcatgacataactgggcgagccctgctgagacttactgacaaaaagctcgagcgaatggggattgcccaggagaacctccggcagcacatcttacaacaggtgctccagctgaaggtgcgagaagaagtcagaaatctacagttactcacacaagcatcatctgagggttctccataaacacggttagccttccaagctgctgtcctgccagttgatatgaacatggcctgttcctcacagaaagactaacccatggcactgccagaagatatccttggatcgtggacagattaactggattaactgaaaaaagcacccattcagtcaatattatgggttttggaaaaatcttgctttgctgtggatttaaaatgaggtgcataatataatgccaactcattccaagtggtcattggcagaccattagctggaaaattgcttccagttttcatcactgtgcataactcaagttccctttggggagctgtctgtgcccttcactagaagtcctg

SEQ ID NO: 5993 - protein, 48 aa, Homo sapiens
MLKVLNCKLKVKVWNLNPLKIKISRRCLTRKELPSDCRQKLRRLSQLR

SEQ ID NO: 5994 - DNA, 540 bp, Homo sapiens
gaatatttaggcgaaagcgagaggaaggggggagcgcggggcaggaggagtacctcggccaagaaaattatgcatgcgttagggaagctctgagagaatggctgtggaagctctccactgtggtttgaatccacggggtattgatcaccctgcccatgctgaaggtattaaactgcaaattgaaggtgaaggtgtggaatctcaatccattaaaaataaaaatttccagaaggtgcctgaccagaaaggaactcccaagcgactgcaggcagaagctgagacggctaagggcgagccctgctgagacttactgacaaaaagctcgagcgaatggggattgcccaggagaacctccggcagcacatcttacaacaggtgctccagctgaaggtgcgagaagaagtcagaaatctacagttactcacacaaggatattcaggaatatggagatatccctgactcttccaaaagaatgaccaagatcatgcctaattacctccatgtcctgggaaagccccgctgtaatggagatggcatctt

SEQ ID NO: 5995 - protein, 68 aa, Homo sapiens
MAVEALHCGLNPRGIDHPAHAEGIKLQIEGEGVESQSIKNKNFQKVPDQKGTPKRLQAEAETAKGEPC

SEQ ID NO: 5996 - DNA, 673 bp, Homo sapiens
agattaataacacacaggaaaaaccctcaacttctttcattcgcctgttgagataaagggaaagagagtccccatccaggcctgcaggagagggagaactggtggatgcaaatgaaaaagcagaggcattcctcagagattatagtgctggagttggaagaagatgggagaaacatatgaggagagaaggaagtcgagctcataccatgatgaagaagataactcctgaagattgggaagggcactggctggctctcaaagatggacaaatggctttacgacgcttaaggggatgctctgtggagtctgcttgggtgcaaatcaccaccatgacacactacccaatgagcaaacaaaagcaaactggttaaggatcctgacaaagacttcgcagccagaagaggcgatgccgtgggtcaaatctaggaccaccagatttcaaaccttatacttctaatcactatatgacactgaacatgattttaagaaactttcttacaaaaatgtatgaattggacaagagagtaacaaaaacagagtaattcactgatctctcattttgtagatgtaagttttgtataatgagtttccatacatcaggagacacttggaaacataaataagtcaaagttacagacaataaagttacagagaattgtattattgtcctctg

SEQ ID NO: 5997 - protein, 64 aa, Homo sapiens
MRREGSRAHTMMKKITPEDWEGHWLALKDGQMALRRLRGCSVESAWVQITTMTHYPMSKQKQTG

SEQ ID NO: 5998 - DNA, 3066 bp, Homo sapiens
atatagtaccagatgttgcaccatctggatgatgtgtaggagataaagccaaattgcaaaaataaaagactcatgatttcccaaggaaagtcaactgtgcatggtggctatcagacaacaccctagcaatgaatgggggaacttgcagaagaaagagttaatgcttgcttaaaccttccctggggagatttgttcccaggctttcacggctttaacctcagcaaccctgtaagaaaattgtgattcatattttgatttgttatcatagatgcaaagagacataatttcatggattctaagatacacagagcaagaagagattttgatcacccagaacaaccacctgtctttttagatcaagaagcagaagctcagagcaaagaacatcacaccacgtccctcagtgattgaagcagtgattgagtcacagaataaatctggaactcaggtcttctgatctttgctccagatgttagagacaaaactaaaagtaaaataccaagtgaaatcaaagcatcacgattgagcccagaacatgaaaaagaacttcctggcccacttgagaaactgttaaaccggacatacctttggggacttcttcccttctctggaataagattgatgtttccatgctgtgaaagacgatgatgttccttctcccagattcctgcatgtttggactggttcacctttttggcccatcacttgggctcattcagcaacagtcatgccttaggttgcatcctcatctataggccaattaaacagggtttcttcttgataaatccctatggttttgattttaggaagtcaggcatgatttcttttgggatctatatgacccaaagtggccagttttaccaaaggtgtccctttgcactgggatctctgggtctcatttgaacacagcttgggtcctcttgccttgtcccagagaatccccatgttgtcaggacataagcagatactctagggccttcaccaaaagctacaaagaagcagacaggactcaacttaggacatcttatggttatgtaactaagagattattttaggaagtaaacaggcctctgttggctcaaatgaacatcttcattgttagtttccacttacattgttctcgggataaatcggccagaatttggcagggctccccagcagtccttgtgaatccctgtggtaggatgtttcagttctcctgagtcaggctgaagtgaaagctcctaagagatattcagaaagaaggatggtcaagttctagaacaacaatagttggcccagtaattttaaagattgtcattctacctaagccttcatcctccagatagcactgttatgggcttaaaataagcttcaagggaaataatgaatttctttgacaccgccaaaaatcggctgtatataagaataacttgagaatggcttacaatgaggtagtcaaaagcccagctcagtgctcaggaatgtatttgtaattcctcttagacttgtcgaatggactgcaatttgatacctaagagtaataaaaaatgagaccatattttatgttaatgttcccttctcttcctctgcccacaaaagtgaggtcagggaaggggagagaaacttatcctaagcactccttatgagttgcttgtgacatgatagctctctctaaagttcatgcaatcctcatcgcaaccccatgagggagatgttattgtctccatcttatagatgaggaaactgaagacaagaccttgtcaaaggtcacacattgtaagaagtagagctgcatattcaaccaaagcccgtgtacctggaaagctcattctctctcccccttcttcctctcaaatcaggccctagctcctccacaatgcttcgggcttctacgttcactcagctttacagtaaaatgatcacagacccatgagttccctggagagtagagtgatgcctgggtcagctgttcctcttgtctgttcagcaggtcctttgagtggcttcacaatccagctgtcagtggcagaaaataatgcctcataaattattcacctggttcacattggaatccattagctctcggggcttggtgtggctgcagatcatccacaagtgccccttgttctctgcccccaaggagctcctgtcattgtttttaaccaaacaagttcaaatatctccacgtctctgctgactctggtcttttgtctctagactgtacctttatttctgagctctgaaattctgcagaaacaggtgagtctataaaaacattctgtgggaggccaaaagctcagaacagttgtgtctctctttctcagtattaaaagatcaaggtttcccatggaagccaacctgatctggtaattgggcccttctatacccctctgaatacttttccaaggagggggcagttcccacccccatagttcccctgagggttaagagtccaggtggtggccaagttgcaagatttggggcagccattttgccaaggatcagagatttgctgttggagaggtgaagtcggctctgtgccatcctgaaaaatcaacttagaaagataggtggacttcatcagatttgtcagtccttccttgttttaaagagaaaaatgatctctgccttgcttcagataggatatggctattttttttccttctttttctaatgtagcagtgatggaaaacaccagtctttgaagaacaaatggaggttcccagtgacatgaatccattatatttgattttggattgtattttttaacccctttttatggcatagaattctggtgccttgctccctgggtttgtctctgtgctacgagtaggctttcttcacattctggcttacaggggaacacaactattccacaagtggcctttagtgctctttataatatgatttcctgtaatttttaaactgtatgtgtaatttatattctggctctgtccaatatttgaacaactttaataggttgatttccatatatattatgcaaataattcttacctgattttttatgttctatcttaaataaatactgcaccacttattaataaatagacatttcagtgatta

SEQ ID NO: 5999 - protein, 36 aa, Homo sapiens
MMFLLPDSCMFGLVHLFGPSLGLIQQQSCLRLHPHL

SEQ ID NO: 6000 - DNA, 5593 bp, Homo sapiens
cggccgcgacgaggggcagcggaggaccccgcagggcatcgggctcctggccaagaccccgctgagccgcccagtcaagagaaacaacgccaagtaccggcgcatccaaactttgatctacgacgccctggagagaccgcggggctgggcgctgctttaccacgcgttggtgttcctgattgtcctggggtgcttgattctggctgtcctgaccacattcaaggagtatgagactgtctcgggagactggcttctgttactggagacatttgctattttcatctttggagccgagtttgctttgaggatctgggctgctggatgttgctgccgatacaaaggctggcggggccgactgaagtttgccaggaagcccctgtgcatgttggacatctttgtgctgattgcctctgtgccagtggttgctgtgggaaaccaaggcaatgttctggccacctccctgcgaagcctgcgcttcctgcagatcctgcgcatgctgcggatggaccggagaggtggcacctggaagcttctgggctcagccatctgtgcccacagcaaagaactcatcacggcctggtacatcggtttcctgacactcatcctttcttcatttcttgtctacctggttgagaaagacgtcccagaggtggatgcacaaggagaggagatgaaagaggagtttgagacctatgcagatgccctgtggtggggcctgatcacactggccaccattggctatggagacaagacacccaaaacgtgggaaggccgtctgattgccgccaccttttccttaattggcgtctccttttttgcccttccagcgggcatcctggggtccgggctggccctcaaggtgcaggagcaacaccgtcagaagcactttgagaaaaggaggaagccagctgctgagctcattcaggctgcctggaggtattatgctaccaaccccaacaggattgacctggtggcgacatggagattttatgaatcagtcgtctcttttcctttcttcaggcaaaacagctggaggcagcatccagccaaaagctgggtctcttggatcgggttcgcctttctaatcctcgtggtagcaatactaaaggaaagctatttacccctctgaatgtagatgccatagaagaaagtccttctaaagaaccaaagcctgttggcttaaacaataaagagcgtttccgcacggccttccgcatgaaagcctacgctttctggcagagttctgaaggtaatgcctttttatctccctccctgtctcttccacttcttcctcccccaagtccacttccttcctcacctctccctttgcccacttaagaacctttgactccacaaggtaactctctcccttccctcgacaagccaacttcttgcttccctaactcctcctgtcccttgggctgaggcattgtgatgtattcccaggagtctagggctgcaggctcccaagttaggagcctggaaacctgtcaccttggtttctaagggtccgccccgaccccccgccccatgattggattgttatggaggtcaacttgaaggatggggcggtgccaggtgcaaagcaatttagagaccagggcacgggaagagtggcagaaaagcgccctctggaggctgtaggagccatggcctcatgtgcctcttttacttatgcaaagggaggacatgcagaaaagcctgtttcctcagtgtctgagcccacccaggccctcaatcctcattgtatcattcagttctctccaaggcctctgatgtgacagtgtgtgttgtttgctggcttctgtgtcctttgctggcttctggctctgggggccactctggaactgcggagctcacttctcctccctgctagccttttccctcactaccagtcatgagctgcgcacacttttgacttggacttctgggtaatagaatgagggtgccaagaaaggctgaacagcatcacagcttgagaataccgtggagtcttgcaacgtggaaataaagactctggggattgacacatccagaggcgtggaaggctttgaccgaacagtggggtccccaagccttttccaggtctgtggcctgccgttcatatgtgtgtctccctcccagatgccgggacaggtgaccccatggcggaagacaggggctatgggaatgacttccccatcgaagacatgatccccaccctgaaggccgccatccgagccgtcagaattctacaattccgtctctataaaaaaaaattcaaggagactttgaggccttacgatgtgaaggatgtgattgagcagtattctgccgggcatctcgacatgctttccaggataaagtaccttcagacgagaatagatatgattttcacccctggacctccctccacgccaaaacacaagaagtctcagaaagggtcagcattcaccttcccatcccagcaatctcccaggaatgaaccatatgtagccagaccatccacatcagaaatcgaagaccaaagcatgatggggaagtttgtaaaagttgaaagacaggttcaggacatggggaagaagctggacttcctcgtggatatgcacatgcaacacatggaacggttgcaggtgcaggtcacggagtattacccaaccaagggcacctcctcgccagctgaagcagagaagaaggaggacaacaggtattccgatttgaaaaccatcatctgcaactattctgagacaggccccccggaaccaccctacagcttccaccaggtgaccattgacaaagtcagcccctatgggttttttgcacatgaccctgtgaacctgccccgagggggacccagttctggaaaggttcaggcaactcctccttcctcagcaacaacgtatgtggagaggcccacggtcctgcctatcttgactcttctcgactcccgagtgagctgccactcccaggctgacctgcagggcccctactcggaccgaatctccccccggcagagacgtagcatcacgcgagacagtgacacacctctgtccctgatgtcggtcaaccacgaggagctggagaggtctccaagtggcttcagcatctcccaggacagagatgattatgtgttcggccccaatggggggtcgagctggatgagggagaagcggtacctcgccgagggtgagacggacacagacacggaccccttcacgcccagcggctccatgcctctgtcgtccacaggggatgggatttctgattcagtatggaccccttccaataagcccatttaaaagaggtcactggctgacccctccttgtaatgtagacagactttgtatagttcacttactcttacacccgacgcttaccagcggggacaccaatggctgcatcaaatgcatgcgtgtgcgtggtggccccacccaggcaggggcttcccacagcctcttcctccccatgtcaccacaacaaagtgcttccttttcagcatggtttgcatgactttacactatataaatggttccgctaatctcttctaggatacacatttatctgctgttcttacttttaatcacgattggaccagtacagggagaaattactgatgagccatgctatttgtctgtttggttggctggtttgggttttggtttggtaagcagagaaagtagtttaagttatttctaggatcactgccctcttgtgtaaaacgctccagcaattaactgtttttgaaagcaaggaaataattttctcaacaaaaccacattgtgtatcagtggggctgcctactgagctaacattaggaaaggaatgagatagtcattgtgtctctaaaacaaagaatttaaacaaatatttaaggcaaaaccttttaaaagctctccaaaagacctcacttggcctgatgttacttagtatcatgcctcagtttccttatctgtaaaaagtggtggtaatcccaagtgtagcatttctgatgagttatgaattggcagggagaaaacacacacacacacacacacacacacacacacacacacatacacaaagttaaaatagtttccaatttatgtagccaaggacaatggaatttatcagaagtgaagtgcccctctgggcaggagctgagttcagtgcctttaaaatgaatttccaactctcatttcttcccatgatactgaagtacaaaatatccatctaaaatagaaattaaagtcaagaaggcacacagaaattttctagtccaaggacttccttttataaatgaagaatcttaggctcaggtaaagtgacatacccagagtcactcagttgtcccatagagaaccaggactcaaaagtcaggtctgcccactctccctgaccttgtttcccctcaccacaccattcttccatttatataatgcatcctagagattgtgtcaagatatatgactttgtgtcgcgtggaaagcacccagtttatccagcaggagggggatttccacttttattgcaaaacatgcttgcttgatgcaatgcatttcagatctagaaaaaaataatgcaagcaagctacatttacagatgtgtaaacaggcaaaatttccagaaccgtccaattttacttttccaaatttatggaaccaacccagattttttaaatgaaaatactaaaaccatatgtaaccgtaagacaagctaaaatgtaagcagacagcctgggaagcactgccctactgtacaggtgtgatattaagcacaagccatcctctggcctcttatgagatgttgttattctctgaaaaactttgatggaaaaggtttctgttaggcttagactgaattagctaaatgaccatgccacagtattattgtatcactcttctcacacacctaggcactggttgtggatagttgccatggtgacaatcaagataatccagatgacctaaacaaatgtctgtatgcagctgacactgctattctccctcacagtcttgtcaagagccacagtagctatggcagacatttggttgatggtttcatcatttcctaatacgagagtctggcactatgttggagagaggaatcacttcctcagagataggttcctttcaactcacatgtcaacagttactgtacaaaaagctcagaatacagtaatgattagagcttgacccctgactttaggaacttagaaccaaagcccaaagtcccaggccaagggcagacattgtgagcagcagaagggtgttttttatggagagccccataaatggatgggtgtagaccttgaagtctgagatgggaaatataccagaatgctcaatgcatcagacatgaagccccacgggcttccatttgacatgctggcaatctgaaggacaaagggcatgggttatttgggccttttccccactccttcaatatggctgaaagtgccagtggggattacaacctaagaaaccctatgccccttcctgagggcttgattattgaatcctgatcttcctggaatctttcacttgagatgatcacctgcctaacatccaacatgttactatgctcttctttatgtacatgagttactggaaaccaacaataaaggagagtgagtcat

SEQ ID NO: 6001 - protein, 390 aa, Homo sapiens [sequence omitted]

SEQ ID NO: 6002 - DNA, 5158 bp, Homo sapiens
gacccgcgcgggatgtgaccccctgaccccctgcctggcctcccctgccccccagggggcccgcctttgcctgcttttgggggggggtggggaggggcgcgcggatcatggcattggagttcccgggcttgcagccgccgccgccgcctcgttcacgcaccccgagcgccccttcttcccagagcagcagcggagaaggcgaagcggccggcgggggcgaggcagatggggctcaaggcgcgcagggcggcgggggcggctggcggcggcggcgacgggggcggcggaggcggcggggcggctaacccagccggaggggacgcggcggcggccggcgacgaggagcggaaagtggggctggcgcccggcgacgtggagcaagtcaccttggcgctcggggccggagccgacaaagacgggaccctgctgctggagggcggcggccgcgacgaggggcagcggaggaccccgcagggcatcgggctcctggccaagaccccgctgagccgcccagtcaagagaaacaacgccaagtaccggcgcatccaaactttgatctacgacgccctggagagaccgcggggctgggcgctgctttaccacgcgttggtgttcctgattgtcctggggtgcttgattctggctgtcctgaccacattcaaggagtatgagactgtctcgggagactggcttctgttactggagacatttgctattttcatctttggagccgagtttgctttgaggatctgggctgctggatgttgctgccgatacaaaggctggcggggccgactgaagtttgccaggaagcccctgtgcatgttggacatctttgtgctgattgcctctgtgccagtggttgctgtgggaaaccaaggcaatgttctggccacctccctgcgaagcctgcgcttcctgcagatcctgcgcatgctgcggatggaccggagaggtggcacctggaagcttctgggctcagccatctgtgcccacagcaaagaactcatcacggcctggtacatcggtttcctgacactcatcctttcttcatttcttgtctacctggttgagaaagacgtcccagaggtggatgcacaaggagaggagatgaaagaggagtttgagacctatgcagatgccctgtggtggggcctgatcacactggccaccattggctatggagacaagacacccaaaacgtgggaaggccgtctgattgccgccaccttttccttaattggcgtctccttttttgcccttccagcgggcatcctggggtccgggctggccctcaaggtgcaggagcaacaccgtcagaagcactttgagaaaaggaggaagccagctgctgagctcattcaggctgcctggaggtattatgctaccaaccccaacaggattgacctggtggcgacatggagattttatgaatcagtcgtctcttttcctttcttcaggcaaaacagctggaggcagcatccagccaaaagctgggtctcttggatcgggttcgcctttctaatcctcgtggtagcaatactaaaggaaagctatttacccctctgaatgtagatgccatagaagaaagtccttctaaagaaccaaagcctgttggcttaaacaataaagagcgtttccgcacggccttccgcatgaaagcctacgctttctggcagagttctgaagatgccgggacaggtgaccccatggcggaagacaggggctatgggaatgacttccccatcgaagacatgatccccaccctgaaggccgccatccgagccgtcagaattctacaattccgtctctataaaaaaaaattcaaggagactttgaggccttacgatgtgaaggatgtgattgagcagtattctgccgggcatctcgacatgctttccaggataaagtaccttcagacgagaatagatatgattttcacccctggacctccctccacgccaaaacacaagaagtctcagaaagggtcagcattcaccttcccatcccagcaatctcccaggaatgaaccatatgtagccagaccatccacatcagaaatcgaagaccaaagcatgatggggaagtttgtaaaagttgaaagacaggttcaggacatggggaagaagctggacttcctcgtggatatgcacatgcaacacatggaacggttgcaggtgcaggtcacggagtattacccaaccaagggcacctcctcgccagctgaagcagagaagaaggaggacaacaggtattccgatttgaaaaccatcatctgcaactattctgagacaggccccccggaaccaccctacagcttccaccaggtgaccattgacaaagtcagcccctatgggttttttgcacatgaccctgtgaacctgccccgagggggacccagttctggaaaggttcaggcaactcctccttcctcagcaacaacgtatgtggagaggcccacggtcctgcctatcttgactcttctcgactcccgagtgagctgccactcccaggctgacctgcagggcccctactcggaccgaatctccccccggcagagacgtagcatcacgcgagacagtgacacacctctgtccctgatgtcggtcaaccacgaggagctggagaggtctccaagtggcttcagcatctcccaggacagagatgattatgtgttcggccccaatggggggtcgagctggatgagggagaagcggtacctcgccgagggtgagacggacacagacacggaccccttcacgcccagcggctccatgcctctgtcgtccacaggggatgggatttctgattcagtatggaccccttccaataagcccatttaaaagaggtcactggctgacccctccttgtaatgtagacagactttgtatagttcacttactcttacacccgacgcttaccagcggggacaccaatggctgcatcaaatgcatgcgtgtgcgtggtggccccacccaggcaggggcttcccacagcctcttcctccccatgtcaccacaacaaagtgcttccttttcagcatggtttgcatgactttacactatataaatggttccgctaatctcttctaggatacacatttatctgctgttcttacttttaatcacgattggaccagtacagggagaaattactgatgagccatgctatttgtctgtttggttggctggtttgggttttggtttggtaagcagagaaagtagtttaagttatttctaggatcactgccctcttgtgtaaaacgctccagcaattaactgtttttgaaagcaaggaaataattttctcaacaaaaccacattgtgtatcagtggggctgcctactgagctaacattaggaaaggaatgagatagtcattgtgtctctaaaacaaagaatttaaacaaatatttaaggcaaaaccttttaaaagctctccaaaagacctcacttggcctgatgttacttagtatcatgcctcagtttccttatctgtaaaaagtggtggtaatcccaagtgtagcatttctgatgagttatgaattggcagggagaaaacacacacacacacacacacacacacacacacacacacatacacaaagttaaaatagtttccaatttatgtagccaaggacaatggaatttatcagaagtgaagtgcccctctgggcaggagctgagttcagtgcctttaaaatgaatttccaactctcatttcttcccatgatactgaagtacaaaatatccatctaaaatagaaattaaagtcaagaaggcacacagaaattttctagtccaaggacttccttttataaatgaagaatcttaggctcaggtaaagtgacatacccagagtcactcagttgtcccatagagaaccaggactcaaaagtcaggtctgcccactctccctgaccttgtttcccctcaccacaccattcttccatttatataatgcatcctagagattgtgtcaagatatatgactttgtgtcgcgtggaaagcacccagtttatccagcaggagggggatttccacttttattgcaaaacatgcttgcttgatgcaatgcatttcagatctagaaaaaaataatgcaagcaagctacatttacagatgtgtaaacaggcaaaatttccagaaccgtccaattttacttttccaaatttatggaaccaacccagattttttaaatgaaaatactaaaaccatatgtaaccgtaagacaagctaaaatgtaagcagacagcctgggaagcactgccctactgtacaggtgtgatattaagcacaagccatcctctggcctcttatgagatgttgttattctctgaaaaactttgatggaaaaggtttctgttaggcttagactgaattagctaaatgaccatgccacagtattattgtatcactcttctcacacacctaggcactggttgtggatagttgccatggtgacaatcaagataatccagatgacctaaacaaatgtctgtatgcagctgacactgctattctccctcacagtcttgtcaagagccacagtagctatggcagacatttggttgatggtttcatcatttcctaatacgagagtctggcactatgttggagagaggaatcacttcctcagagataggttcctttcaactcacatgtcaacagttactgtacaaaaagctcagaatacagtaatgattagagcttgacccctgactttaggaacttagaaccaaagcccaaagtcccaggccaagggcagacattgtgagcagcagaagggtgttttttatggagagccccataaatggatgggtgtagaccttgaagtctgagatgggaaatataccagaatgctcaatgcatcagacatgaagccccacgggcttccatttgacatgctggcaatctgaaggacaaagggcatgggttatttgggccttttccccactccttcaatatggctgaaagtgccagtggggattacaacctaagaaaccctatgccccttcctgagggcttgattattgaatcctgatcttcctggaatctttcacttgagatgatcacctgcctaacatccaacatgttactatgctcttctttatgtacatgagttactggaaaccaacaataaaggagagtgagtcat

SEQ ID NO: 6003 - protein, 447 aa, Homo sapiens [sequence omitted]

SEQ ID NO: 6004 - DNA, 3530 bp, Homo sapiens
cggccgcgacgaggggcagcggaggaccccgcagggcatcgggctcctggccaagaccccgctgagccgcccagtcaagagaaacaacgccaagtaccggcgcatccaaactttgatctacgacgccctggagagaccgcggggctgggcgctgctttaccacgcgttggtgttcctgattgtcctggggtgcttgattctggctgtcctgaccacattcaaggagtatgagactgtctcgggagactggcttctgttactggagacatttgctattttcatctttggagccgagtttgctttgaggatctgggctgctggatgttgctgccgatacaaaggctggcggggccgactgaagtttgccaggaagcccctgtgcatgttggacatctttgtgctgattgcctctgtgccagtggttgctgtgggaaaccaaggcaatgttctggccacctccctgcgaagcctgcgcttcctgcagatcctgcgcatgctgcggatggaccggagaggtggcacctggaagcttctgggctcagccatctgtgcccacagcaaagaactcatcacggcctggtacatcggtttcctgacactcatcctttcttcatttcttgtctacctggttgagaaagacgtcccagaggtggatgcacaaggagaggagatgaaagaggagtttgagacctatgcagatgccctgtggtggggcctgatcacactggccaccattggctatggagacaagacacccaaaacgtgggaaggccgtctgattgccgccaccttttccttaattggcgtctccttttttgcccttccagcgggcatcctggggtccgggctggccctcaaggtgcaggagcaacaccgtcagaagcactttgagaaaaggaggaagccagctgctgagctcattcaggctgcctggaggtattatgctaccaaccccaacaggattgacctggtggcgacatggagattttatgaatcagtcgtctcttttcctttcttcaggcaaaacagctggaggcagcatccagccaaaagctgggtctcttggatcgggttcgcctttctaatcctcgtggtagcaatactaaaggaaagctatttacccctctgaatgtagatgccatagaagaaagtccttctaaagaaccaaagcctgttggcttaaacaataaagagcgtttccgcacggccttccgcatgaaagcctacgctttctggcagagttctgaaggtaatgcctttttatctccctccctgtctcttccacttcttcctcccccaagtccacttccttcctcacctctccctttgcccacttaagaacctttgactccacaaggtaactctctcccttccctcgacaagccaacttcttgcttccctaactcctcctgtcccttgggctgaggcattgtgatgtattcccaggagtctagggctgcaggctcccaagttaggagcctggaaacctgtcaccttggtttctaagggtccgccccgaccccccgccccatgattggattgttatggaggtcaacttgaaggatggggcggtgccaggtgcaaagcaatttagagaccagggcacgggaagagtggcagaaaagcgccctctggaggctgtaggagccatggcctcatgtgcctcttttacttatgcaaagggaggacatgcagaaaagcctgtttcctcagtgtctgagcccacccaggccctcaatcctcattgtatcattcagttctctccaaggcctctgatgtgacagtgtgtgttgtttgctggcttctgtgtcctttgctggcttctggctctgggggccactctggaactgcggagctcacttctcctccctgctagccttttccctcactaccagtcatgagctgcgcacacttttgacttggacttctgggtaatagaatgagggtgccaagaaaggctgaacagcatcacagcttgagaataccgtggagtcttgcaacgtggaaataaagactctggggattgacacatccagaggcgtggaaggctttgaccgaacagtggggtccccaagccttttccaggtctgtggcctgccgttcatatgtgtgtctccctcccagatgccgggacaggtgaccccatggcggaagacaggggctatgggaatgacttccccatcgaagacatgatccccaccctgaaggccgccatccgagccgtcagaattctacaattccgtctctataaaaaaaaattcaaggagactttgaggccttacgatgtgaaggatgtgattgagcagtattctgccgggcatctcgacatgctttccaggataaagtaccttcagacgagaatagatatgattttcacccctggacctccctccacgccaaaacacaagaagtctcagaaagggtcagcattcaccttcccatcccagcaatctcccaggaatgaaccatatgtagccagaccatccacatcagaaatcgaagaccaaagcatgatggggaagtttgtaaaagttgaaagacaggttcaggacatggggaagaagctggacttcctcgtggatatgcacatgcaacacatggaacggttgcaggtgcaggtcacggagtattacccaaccaagggcacctcctcgccagctgaagcagagaagaaggaggacaacaggtattccgatttgaaaaccatcatctgcaactattctgagacaggccccccggaaccaccctacagcttccaccaggtgaccattgacaaagtcagcccctatgggttttttgcacatgaccctgtgaacctgccccgagggggacccagttctggaaaggttcaggcaactcctccttcctcagcaacaacgtatgtggagaggcccacggtcctgcctatcttgactcttctcgactcccgagtgagctgccactcccaggctgacctgcagggcccctactcggaccgaatctccccccggcagagacgtagcatcacgcgagacagtgacacacctctgtccctgatgtcggtcaaccacgaggagctggagaggtctccaagtggcttcagcatctcccaggacagagatgattatgtgttcggccccaatggggggtcgagctggatgagggagaagcggtacctcgccgagggtgagacggacacagacacggaccccttcacgcccagcggctccatgcctctgtcgtccacaggggatgggatttctgattcagtatggaccccttccaataagcccatttaaaagaggtcactggctgacccctccttgtaatgtagacagactttgtatagttcacttactcttacacccgacgcttaccagcggggacaccaatggctgcatcaaatgcatgcgtgtgcgtggtggccccacccaggcaggggcttcccacagcctcttcctccccatgtcaccacaacaaagtgcttccttttcagcatggtttgcatgactttacactatataaatggttccgctaatctcttctaggat

SEQ ID NO: 6005 - protein, 390 aa, Homo sapiens [sequence omitted]

SEQ ID NO: 6006 - DNA, 2729 bp, Homo sapiens
ggcgacgtggagcaagtcaccttggcgctcggggccggagccgacaaagacgggaccctgctgctggagggcggcggccgcgacgaggggcagcggaggaccccgcagggcatcgggctcctggccaagaccccgctgagccgcccagtcaagagaaacaacgccaagtaccggcgcatccaaactttgatctacgacgccctggagagaccgcggggctgggcgctgctttaccacgcgttggtgttcctgattgtcctggggtgcttgattctggctgtcctgaccacattcaaggagtatgagactgtctcgggagactggcttctgttactggagacatttgctattttcatctttggagccgagtttgctttgaggatctgggctgctggatgttgctgccgatacaaaggctggcggggccgactgaagtttgccaggaagcccctgtgcatgttggacatctttgtgctgattgcctctgtgccagtggttgctgtgggaaaccaaggcaatgttctggccacctccctgcgaagcctgcgcttcctgcagatcctgcgcatgctgcggatggaccggagaggtggcacctggaagcttctgggctcagccatctgtgcccacagcaaagaactcatcacggcctggtacatcggtttcctgacactcatcctttcttcatttcttgtctacctggttgagaaagacgtcccagaggtggatgcacaaggagaggagatgaaagaggagtttgagacctatgcagatgccctgtggtggggcctgatcacactggccaccattggctatggagacaagacacccaaaacgtgggaaggccgtctgattgccgccaccttttccttaattggcgtctccttttttgcccttccagcgggcatcctggggtccgggctggccctcaaggtgcaggagcaacaccgtcagaagcactttgagaaaaggaggaagccagctgctgagctcattcaggctgcctggaggtattatgctaccaaccccaacaggattgacctggtggcgacatggagattttatgaatcagtcgtctcttttcctttcttcaggcaaaacagctggaggcagcatccagccaaaagctgggtctcttggatcgggttcgcctttctaatcctcgtggtagcaatactaaaggaaagctatttacccctctgaatgtagatgccatagaagaaagtccttctaaagaaccaaagcctgttggcttaaacaataaagagcgtttccgcacggccttccgcatgaaagcctacgctttctggcagagttctgaagatgccgggacaggtgaccccatggcggaagacaggggctatgggaatgacttccccatcgaagacatgatccccaccctgaaggccgccatccgagccgtcagaattctacaattccgtctctataaaaaaaaattcaaggagactttgaggccttacgatgtgaaggatgtgattgagcagtattctgccgggcatctcgacatgctttccaggataaagtaccttcagacgagaatagatatgattttcacccctggacctccctccacgccaaaacacaagaagtctcagaaagggtcagcattcaccttcccatcccagcaatctcccaggaatgaaccatatgtagccagaccatccacatcagaaatcgaagaccaaagcatgatggggaagtttgtaaaagttgaaagacaggttcaggacatggggaagaagctggacttcctcgtggatatgcacatgcaacacatggaacggttgcaggtgcaggtcacggagtattacccaaccaagggcacctcctcgccagctgaagcagagaagaaggaggacaacaggtattccgatttgaaaaccatcatctgcaactattctgagacaggccccccggaaccaccctacagcttccaccaggtgaccattgacaaagtcagcccctatgggttttttgcacatgaccctgtgaacctgccccgagggggacccagttctggaaaggttcaggcaactcctccttcctcagcaacaacgtatgtggagaggcccacggtcctgcctatcttgactcttctcgactcccgagtgagctgccactcccaggctgacctgcagggcccctactcggaccgaatctccccccggcagagacgtagcatcacgcgagacagtgacacacctctgtccctgatgtcggtcaaccacgaggagctggagaggtctccaagtggcttcagcatctcccaggacagagatgattatgtgttcggccccaatggggggtcgagctggatgagggagaagcggtacctcgccgagggtgagacggacacagacacggaccccttcacgcccagcggctccatgcctctgtcgtccacaggggatgggatttctgattcagtatggaccccttccaataagcccatttaaaagaggtcactggctgacccctccttgtaatgtagacagactttgtatagttcacttactcttacacccgacgcttaccagcggggacaccaatggctgcatcaaatgcatgcgtgtgcgtggtggccccacccaggcaggggcttcccacagcctcttcctccccatgtcaccacaacaaagtgcttccttttcagcatggtttgcatgactttacactatataaatggttccgctaatctcttctaggat

SEQ ID NO: 6007 - protein, 395 aa, Homo sapiens [sequence omitted]

SEQ ID NO: 6008 - DNA, 9367 bp, Homo sapiens
tgagaccacagcagaatgtgccttggacaaaggtctcagggtggtgaactttttcttcgaattcctaacctgtgagcttacgatgatggtgcctgtccattaactgaacaactgtggttttgaacttcttgaggccagggactgtgtctgaaaacaccgacggtggctaactcaagggagacgtctggtgaacacccgtgggatctaaagaacaagctctgaaagtgttccagctgaaatttcagatcggacagactcgctgcggctccggaggcagtgattccaagctgctcgcgcacgctgctgccaagctgcaggatggtgcacgtagccaggctgctgctgctgctcctcactttcttcctccgcacggatgctgagacacctccaaggtttacacgaacacccgttgatcagacaggggtctctggcggagttgcctctttcatctgccaagctacgggagacccaagacctaaaattgtctggaacaaaaaaggaaagaaagtcagcaatcagagatttgaggtaatagagtttgacgatgggtctggatcagttctcagaatacaacccttacggactccgagggatgaggccatttatgaatgtgtggcctcaaataatgtgggagaaataagtgtatccaccagactcacagttttgcgggaagatcaaattcccaggggcttccctaccattgacatgggcccacagttgaaggtggttgagcgtactcgcacggccaccatgctttgtgcagccagtggtaatccggatccagaaatcacttggtttaaagatttcttacctgtggacacaagcaacaacaatggtcgtattaagcagttacgatcaggagcccttcagattgagcagagtgaagagtctgaccaaggaaaatatgagtgtgttgccaccaacagcgcgggcactcagagctgcgagaagttcgccgtgtcccaccaagattctctatcccacccactaatcatgaaatcatgccaggcggaagcgttaatatcacctgtgtggccgtggggtcaccaatgccttatgtaaagtggatgttgggggcagaagatctgacacctgaagatgatatgccaataggaagaaatgtgctagaactgaatgatgtaagacagtcagcaaattacacctgtgttgctatgtcaacactgggtgtcattgaagcaatagcacagatcactgtcaaagccttacccaaacctccaggaactcctgtagtgaccgagagcacagctacaagcatcacactgacgtgggactctgggaaccctgagcctgtttcttattacataattcagcataaacctaaaaactctgaggaactttacaaagaaattgatggggtggcgaccacacgctacagtgtcgctggactaagtccctactcggattatgaattcagggttgttgctgtcaataacattgggcgggggcctcccagcgaacctgtgctaacacaaacctcagagcaagcaccatccagtgccccgagggatgtccaggcacgaatgttgagttcgaccaccattttggtacagtggaaggaacctgaagagccaaatggacagatccaaggatatagagtttattatacaatggatcccactcaacatgtcaacaactggatgaaacacaatgtagctgacagccaaatcactactattggcaacttagtgccccagaaaacatattctgtcaaagtcctggcttttacctcaattggagatggtcccctttcaagtgacatacaagtcatcactcagacaggagtaccagggcagccactaaacttcaaagcagaacctgagtctgaaacaagtattttgctctcttggacacctccacgttcagataccattgccaactatgaactggtctacaaagatggggagcatggagaggagcaacgaattaccattgagccagggacatcatataggctgcaaggactgaaaccaaacagcttatactatttccgtctggctgcacgctcccctcaaggcctgggtgcttctactgcagaaatatcagctagaaccatgcagtcaaagccgtcagctcctcctcaagacattagttgcaccagcccaagttccactagtattttggtaagttggcaacctccaccagtggaaaaacagaatggcattatcactgaatactccatcaagtacactgcagtggatggggaagatgacaagcctcacgagattttgggaattccttcggacactaccaaataccttttggaacagctggaaaaatggactgaataccggatcactgtgacagcccatacagatgtcggccctggccctgagagcttgtccgtgttgattcgaaccaatgaagatgttcctagtggtcctcctcgcaaagtcgaggtagaggctgtcaactcaacatctgttaaagtctcatggcgctcacccgtgcccaataaacagcatggccagataagaggatatcaggtgcattatgtgaggatggaaaatggtgagcccaagggccagcccatgctgaaagatgtcatgctggctgatgcacaggacatgatcatttctgggctccagcctgaaacttcctactccctcaccgtcacagcctacacaaccaaaggagatggtgctcgcagcaagcccaaactggtgtccaccactggggcagttccagggaaacctcggcttgtgattaaccacactcagatgaatactgctcttattcagtggcaccctccggtggacacatttggacctcttcagggctaccgtctaaaatttggccgcaaggatatggagccacttactactcttgagttctctgaaaaagaagatcactttacagctacagacatccacaagggagcatcatacgtcttcaggctctcagccagaaacaaagtgggctttggggaggagatggtgaaggagatttccattccagaagaagtaccaactggattccctcaaaaccttcactcagaaggcaccacttcaacctccgtccagttatcttggcaaccacctgtcctggcagagagaaatggcattatcaccaagtatacccttctttatagggatatcaacatcccccttctcccgatggagcagcttattgttccagctgacaccactatgacactcactggcttaaaaccagataccacatacgatgtaaaagtacgtgctcatacgagcaaagggcccgggccatatagtcccagtgtccagttcaggacactgcctgtggatcaagtgtttgcaaaaaattttcatgtcaaagcagtaatgaagacttccgtgttgctgtcttgggagattccagagaattataactccgccatgcctttcaaaattctttatgatgatgggaaaatggtagaagaagtggatggccgagccacacagaagttaattgtcaacctgaagcctgagaaatcatattcatttgtgctgacaaatcgtggaaacagtgctggtgggctgcagcacagggtcacggcaaagactgcaccagatgtattacgtaccaagcctgccttcattgggaagaccaacttggatggcatgattactgtgcaactgcctgaagtacctgcaaatgagaatataaaaggttactacataataattgtgcctttgaagaaatctcgcgggaaatttatcaagccatgggagagtccagatgaaatggaattagatgagctgcttaaggagatatctaggaagcgcagaagcatccgttatgggagagaagttgaattaaagccatatattgccgctcactttgatgtccttcccactgagttcaccctgggggatgacaagcattatggtggatttacaaacaagcaactccaaagtggtcaagaatatgtcttctttgtgttagcagtaatggaacatgcagagtctaagatgtatgcaaccagcccttactccgaccccgtggtgtcaatggatctggatccgcagccaatcacggatgaagaagaaggcttgatctgggttgtaggtcctgtccttgcagtggtctttatcatctgcattgtcattgctattcttctttataaaaggaagagggcagagtccgactctagaaaaagcagcataccgaacaataaggagatcccttcacaccacccaacagaccctgtagaactgaggcgccttaactttcaaacaccgggtatggctagccatcctccaatacccatcttggaacttgcagaccacattgaaagattgaaagcaaatgacaacttgaagttttcccaggaatatgagtcaattgaccctggccagcagttcacttgggaacattcaaacttggaagtaaacaaaccaaagaatagatacgcgaatgtaatcgcatatgatcattcccgggttctcctatcagctatagaagggatcccaggaagtgactatgtgaatgccaactacatagatgggtataggaagcaaaatgcctatattgcaacacagggatctctccccgaaacatttggggacttttggagaatgatatgggaacaacggagtgccacagttgtcatgatgacaaaactagaagaaagatcaagggtgaagtgtgaccagtattggcctagcagaggcacagaaacccacggactcgttcaagtaacgctgcttgatactgtggagctggccacatattgtgttcgaacatttgcactttacaagaatggttcaagtgagaagagagaagtgagacaattccagttcaccgcctggcctgatcatggtgttccagaacaccctacaccttttctagctttcttacgtagagtcaaaacctgtaaccctcccgatgctggtccgatggttgtgcactgcagtgcgggagttggccggactggttgcttcatcgtcatagatgccatgttagaaagaataaagcatgaaaaaactgtagatatttatggccatgtaactttaatgagagcccagaggaactatatggttcaaacagaagaccaatacatctttatccatgatgcactgttagaagcagtgacttgtggaaataccgaagtgccagctagaaacttgtatgcctacattcagaagctgacacaaatagaaacgggagagaatgtcacaggaatggagctcgaatttaagcgtctagccagctcaaaagctcacacctcaaggtttatcagtgccaatcttccatgtaataaattcaaaaatcgccttgttaatattatgccatatgaatccacaagggtatgcctgcagcctatccgtggagtagaaggatctgattacatcaatgccagttttattgatggatacagacaacagaaagcctacatcgctacccaggggcccttggcagagaccactgaagacttctggcggatgctctgggaacacaattccaccatagttgtgatgctcaccaagctgcgtgaaatgggcagagagaaatgtcaccaatactggccagcagaacggtctgcaagataccagtactttgttgtagatcccatggctgagtacaacatgccacagtatatcctaagggaattcaaggtcacagatgccagggacggccagtcccgaacagtaaggcagttccagttcactgactggccagagcaaggagtgccaaagtccggagaaggatttattgacttcatcggccaagtccataaaacaaaagaacagtttggccaagatggacccatttcagtccattgcagcgcgggcgttggaagaactggagtcttcataacgctaagcattgttttggaaagaatgagatatgaaggagttgtagatatcttccagactgtcaaaatgttaagaacacaacgaccagctatggtacagacagaggatcaatatcagttttcctatcgtgccgcactagagtacctgggcagctttgaccactatgcaacgtagaaacccctgacccattctggatttttactacaggcccttcaatatccatggagtctcttctgagccatacagggcacttgagaagtccttcttaacttctagctaacaactacttagtgggactattacacacaaaacaaattaaaaacaaattattccaggtggaccaagaatctgctttgacatcgccccttcccaccatactgctcataataacattttagggggaaaggggagggaatgtttaaaaagaaagtccttgatttagttttttagtattgtaaagatactgctgacctgtgcttcatttctaactgtgtaaacttttttttaacaaaatgtatcattcgataaagtgaattttaaaaaagttacataactcttcatttttttatttccaaatcgtaggtttttttaagctgtagaactgttatctgtaatatcttgctgtagaaatatcaaatcatttgaaaatttgcacatttttgtgcaaaactcaatctacagtatcagtctcgtcagatatattaattttacacttcagttttgattggtgagaaagtacccattctcttcaaataatcaaagataattattattttgttttgtttttggaatcaacagggaggcgcaaagtataaagttgctgctaacatatatacatatatatccatattttataagggtgtctatgtatatatagacagtgtgtccacacaaaaaatagatacagttatcagtcagtcagttcttccatgatttagtttttttaaacgtagaaaagctattgtaaacatctctttccatttattcttaattttttgacatattggtatttctttaaagggaaatgaggaatgcacatcagtgattgattgtcaaacctcaccccctgatttcctacctaatctacccccacctaaccaatcaatcacatccacaaattgttttgtttgtttgttagtcaggcttccaacaaagttcaatatttctaacactctagtgcaataaaaattattattaaatagctaagaggtgtgcatgtgggaaaggtcagtgcatatccctttaggaggggagaatgttgtaatatatcagctatcgagttgtttaaaaaaagtgtattcaatcgtatattgtctatagtatgtgctatgaaatttgcatttatgatatgtaacaggggcaaagccaaattcatgttactctgttcagtcagaaacattttgtggcatacagcattcctgggaagtgctgtactttgtttcgttttggttttagttttgcatttagagtgccttataattgatgcctattttaatagcatttctttttagcttttggttcgtatttccattcactgttcgtatctgttactttctattaaagcattatctgtttaccacatgtacaaaaactctttgaataatatgcattcctagttttcagccaagtcggggatgttagtgattgtaccagcccaaagcacttggataatcagggcccttcttccttttataatcaatcatcaacatcagaaaaagctacttgttttatttatattcccttccaaatccgctctggaacatgcagtaactgcaccaaacttattttagtaacaaatatcattggcaactttggaatatatttgatattccattaggatttttctaaaaggggaaataaactatatatatatatgtatcttacccccaattcttccaacagaatttctataggaagccatggatgatggcataagtttgccacatattacatgattttaaataatcctcaaaatacccaaggaactcttaaagagttttggtatgagtatactactttggtttaattttagcttcatggatgttctgcatggaaggatttttgttttccacattttcccattgctagcagagtgaaatccaagagaccaaacatttgcaagcattgtatttgagcacttttgtaaaaaacaaagaaaaagaaaaaaaagaaaatatatataatactaaaaaaaagtatctagaaggctacctcagaatgagactctctaacctacatcagaaccagagaagaatgtgcactatgtgggtctgttatcattattttcttttagtttgtatctttttggagatttatccaagtgccagattactcagtgctataattttcttttagttaaacaaagggggtcagacagacattgcatcatccagacatgccttgttggacatgtagaatccgatggagcactgcacaccagaatgattggccaatgagcagcttctctccctgaaacaataactgcccatttggcaaagggaaagatgacaataatcagaagaagaaaatgaatgggatgcataccatagacgaacgaggcggagactattgcgggaatcttactgttcaggagctgttcctagaactaactcccttactgtcattgatgtgcattccactctgtgcttttctgtacaaccattcaagttttaatttcccaggtgaaccatctttatctgccattaccacaagctttcaagtttccagttattttcatcatcataaccagtacggtgctattatttacctatgtacgtgtagttatgtataattttgtaattagttacaatggtaaaaaaaatcaaaatatataaaaagtgatttgtacagaactttattttagctcttttttaaaaatgatttgcatggttagaaaacggcgaggacagccaggggagggaagggcctctagggaactttgcactttctatacctttgtactatgcactgccctattgattctacacccaataatgatattacttgaacccatctgtaagaaactgcttcggaaattcatttgtgtgtatgtaaataacacaacatagaaacaggaagggaaaaaagtctgcagtaatgcacgtattttttttctttcctgtttattttcggttttgctttaagtccttttatttttaattccctttttgtttttctttttgggttttggttccttttgggtttatgggtgccctgatactccagcagagatcagaaggctacagatccattctatccatccgttatgtggctttgccatcccagcttggagtgtctttacaaagataataacagttgtgttctttgctctcgttttggatgcatagactgaaaaattaaaacaaataacttgtaaaatggcttgttaaaaaatacaattacctctaattagtagtacgcgtaaatgttttacagaatgaaaggcgtgctttttattttcttacttcgttacattggtggcgaaagaagtctgtatgaaaatcagttctttgctgacacaagttccatttgttacaaatgaattctaataaaaatgtcagtgttatgca

SEQ ID NO: 6009 - protein, 1656 aa, Homo sapiens
MPGGSVNITCVAVGSPMPYVKWMLGAEDLTPEDDMPIGRNVLELNDVRQSANYTCVAMSTLGVIEAIAQITVKALPKPPGTPVVTESTATSITLTWDSGNPEPVSYYIIQHKPKNSEELYKEIDGVATTRYSVAGLSPYSDYEFRVVAVNNIGRGPPSEPVLTQTSEQAPSSAPRDVQARMLSSTTILVQWKEPEEPNGQIQGYRVYYTMDPTQHVNNWMKHNVADSQITTIGNLVPQKTYSVKVLAFTSIGDGPLSSDIQVITQTGVPGQPLNFKAEPESETSILLSWTPPRSDTIANYELVYKDGEHGEEQRITIEPGTSYRLQGLKPNSLYYFRLAARSPQGLGASTAEISARTMQSKPSAPPQDISCTSPSSTSILVSWQPPPVEKQNGIITEYSIKYTAVDGEDDKPHEILGIPSDTTKYLLEQLEKWTEYRITVTAHTDVGPGPESLSVLIRTNEDVPSGPPRKVEVEAVNSTSVKVSWRSPVPNKQHGQIRGYQVHYVRMENGEPKGQPMLKDVMLADAQDMIISGLQPETSYSLTVTAYTTKGDGARSKPKLVSTTGAVPGKPRLVINHTQMNTALIQWHPPVDTFGPLQGYRLKFGRKDMEPLTTLEFSEKEDHFTATDIHKGASYVFRLSARNKVGFGEEMVKEISIPEEVPTGFPQNLHSEGTTSTSVQLSWQPPVLAERNGIITKYTLLYRDINIPLLPMEQLIVPADTTMTLTGLKPDTTYDVKVRAHTSKGPGPYSPSVQFRTLPVDQVFAKNFHVKAVMKTSVLLSWEIPENYNSAMPFKILYDDGKMVEEVDGRATQKLIVNLKPEKSYSFVLTNRGNSAGGLQHRVTAKTAPDVLRTKPAFIGKTNLDGMITVQLPEVPANENIKGYYIIIVPLKKSRGKFIKPWESPDEMELDELLKEISRKRRSIRYGREVELKPYIAAHFDVLPTEFTLGDDKHYGGFTNKQLQSGQEYVFFVLAVMEHAESKMYATSPYSDPVVSMDLDPQPITDEEEGLIWVVGPVLAVVFIICIVIAILLYKRKRAESDSRKSSIPNNKEIPSHHPTDPVELRRLNFQTPGMASHPPIPILELADHIERLKANDNLKFSQEYESIDPGQQFTWEHSNLEVNKPKNRYANVIAYDHSRVLLSAIEGIPGSDYVNANYIDGYRKQNAYIATQGSLPETFGDFWRMIWEQRSATVVMMTKLEERSRVKCDQYWPSRGTETHGLVQVTLLDTVELATYCVRTFALYKNGSSEKREVRQFQFTAWPDHGVPEHPTPFLAFLRRVKTCNPPDAGPMVVHCSAGVGRTGCFIVIDAMLERIKHEKTVDIYGHVTLMRAQRNYMVQTEDQYIFIHDALLEAVTCGNTEVPARNLYAYIQKLTQIETGENVTGMELEFKRLASSKAHTSRFISANLPCNKFKNRLVNIMPYESTRVCLQPIRGVEGSDYINASFIDGYRQQKAYIATQGPLAETTEDFWRMLWEHNSTIVVMLTKLREMGREKCHQYWPAERSARYQYFVVDPMAEYNMPQYILREFKVTDARDGQSRTVRQFQFTDWPEQGVPKSGEGFIDFIGQVHKTKEQFGQDGPISVHCSAGVGRTGVFITLSIVLERMRYEGVVDIFQTVKMLRTQRPAMVQTEDQYQFSYRAALEYLGSFDHYAT

SEQ ID NO: 6010 - DNA, 9394 bp, Homo sapiens
tgagaccacagcagaatgtgccttggacaaaggtctcagggtggtgaactttttcttcgaattcctaacctgtgagcttacgatgatggtgcctgtccattaactgaacaactgtggttttgaacttcttgaggccagggactgtgtctgaaaacaccgacggtggctaactcaagggagacgtctggtgaacacccgtgggatctaaagaacaagctctgaaagtgttccagctgaaatttcagatcggacagactcgctgcggctccggaggcagtgattccaagctgctcgcgcacgctgctgccaagctgcaggatggtgcacgtagccaggctgctgctgctgctcctcactttcttcctccgcacggatgctgagacacctccaaggtttacacgaacacccgttgatcagacaggggtctctggcggagttgcctctttcatctgccaagctacgggagacccaagacctaaaattgtctggaacaaaaaaggaaagaaagtcagcaatcagagatttgaggtaatagagtttgacgatgggtctggatcagttctcagaatacaacccttacggactccgagggatgaggccatttatgaatgtgtggcctcaaataatgtgggagaaataagtgtatccaccagactcacagttttgcgggaagatcaaattcccaggggcttccctaccattgacatgggcccacagttgaaggtggttgagcgtactcgcacggccaccatgctttgtgcagccagtggtaatccggatccagaaatcacttggtttaaagatttcttacctgtggacacaagcaacaacaatggtcgtattaagcagttacgatcaggagcccttcagattgagcagagtgaagagtctgaccaaggaaaatatgagtgtgttgccaccaacagcgcgggcactcagagctgcgagaagttcgccgtgtcccaccaagattctctatcccacccactaatcatgaaatcatgccaggcggaagcgttaatatcacctgtgtggccgtggggtcaccaatgccttatgtaaagtggatgttgggggcagaagatctgacacctgaagatgatatgccaataggaagaaatgtgctagaactgaatgatgtaagacagtcagcaaattacacctgtgttgctatgtcaacactgggtgtcattgaagcaatagcacagatcactgtcaaagccttacccaaacctccaggaactcctgtagtgaccgagagcacagctacaagcatcacactgacgtgggactctgggaaccctgagcctgtttcttattacataattcagcataaacctaaaaactctgaggaactttacaaagaaattgatggggtggcgaccacacgctacagtgtcgctggactaagtccctactcggattatgaattcagggttgttgctgtcaataacattgggcgggggcctcccagcgaacctgtgctaacacaaacctcagagcaagcaccatccagtgccccgagggatgtccaggcacgaatgttgagttcgaccaccattttggtacagtggaaggaacctgaagagccaaatggacagatccaaggatatagagtttattatacaatggatcccactcaacatgtcaacaactggatgaaacacaatgtagctgacagccaaatcactactattggcaacttagtgccccagaaaacatattctgtcaaagtcctggcttttacctcaattggagatggtcccctttcaagtgacatacaagtcatcactcagacaggagtaccagggcagccactaaacttcaaagcagaacctgagtctgaaacaagtattttgctctcttggacacctccacgttcagataccattgccaactatgaactggtctacaaagatggggagcatggagaggagcaacgaattaccattgagccagggacatcatataggctgcaaggactgaaaccaaacagcttatactatttccgtctggctgcacgctcccctcaaggcctgggtgcttctactgcagaaatatcagctagaaccatgcagtcaaagccgtcagctcctcctcaagacattagttgcaccagcccaagttccactagtattttggtaagttggcaacctccaccagtggaaaaacagaatggcattatcactgaatactccatcaagtacactgcagtggatggggaagatgacaagcctcacgagattttgggaattccttcggacactaccaaataccttttggaacagctggaaaaatggactgaataccggatcactgtgacagcccatacagatgtcggccctggccctgagagcttgtccgtgttgattcgaaccaatgaagatgttcctagtggtcctcctcgcaaagtcgaggtagaggctgtcaactcaacatctgttaaagtctcatggcgctcacccgtgcccaataaacagcatggccagataagaggatatcaggtgcattatgtgaggatggaaaatggtgagcccaagggccagcccatgctgaaagatgtcatgctggctgatgcacagtgggaatttgatgatactactgaacatgacatgatcatttctgggctccagcctgaaacttcctactccctcaccgtcacagcctacacaaccaaaggagatggtgctcgcagcaagcccaaactggtgtccaccactggggcagttccagggaaacctcggcttgtgattaaccacactcagatgaatactgctcttattcagtggcaccctccggtggacacatttggacctcttcagggctaccgtctaaaatttggccgcaaggatatggagccacttactactcttgagttctctgaaaaagaagatcactttacagctacagacatccacaagggagcatcatacgtcttcaggctctcagccagaaacaaagtgggctttggggaggagatggtgaaggagatttccattccagaagaagtaccaactggattccctcaaaaccttcactcagaaggcaccacttcaacctccgtccagttatcttggcaaccacctgtcctggcagagagaaatggcattatcaccaagtatacccttctttatagggatatcaacatcccccttctcccgatggagcagcttattgttccagctgacaccactatgacactcactggcttaaaaccagataccacatacgatgtaaaagtacgtgctcatacgagcaaagggcccgggccatatagtcccagtgtccagttcaggacactgcctgtggatcaagtgtttgcaaaaaattttcatgtcaaagcagtaatgaagacttccgtgttgctgtcttgggagattccagagaattataactccgccatgcctttcaaaattctttatgatgatgggaaaatggtagaagaagtggatggccgagccacacagaagttaattgtcaacctgaagcctgagaaatcatattcatttgtgctgacaaatcgtggaaacagtgctggtgggctgcagcacagggtcacggcaaagactgcaccagatgtattacgtaccaagcctgccttcattgggaagaccaacttggatggcatgattactgtgcaactgcctgaagtacctgcaaatgagaatataaaaggttactacataataattgtgcctttgaagaaatctcgcgggaaatttatcaagccatgggagagtccagatgaaatggaattagatgagctgcttaaggagatatctaggaagcgcagaagcatccgttatgggagagaagttgaattaaagccatatattgccgctcactttgatgtccttcccactgagttcaccctgggggatgacaagcattatggtggatttacaaacaagcaactccaaagtggtcaagaatatgtcttctttgtgttagcagtaatggaacatgcagagtctaagatgtatgcaaccagcccttactccgaccccgtggtgtcaatggatctggatccgcagccaatcacggatgaagaagaaggcttgatctgggttgtaggtcctgtccttgcagtggtctttatcatctgcattgtcattgctattcttctttataaaaggaagagggcagagtccgactctagaaaaagcagcataccgaacaataaggagatcccttcacaccacccaacagaccctgtagaactgaggcgccttaactttcaaacaccgggtatggctagccatcctccaatacccatcttggaacttgcagaccacattgaaagattgaaagcaaatgacaacttgaagttttcccaggaatatgagtcaattgaccctggccagcagttcacttgggaacattcaaacttggaagtaaacaaaccaaagaatagatacgcgaatgtaatcgcatatgatcattcccgggttctcctatcagctatagaagggatcccaggaagtgactatgtgaatgccaactacatagatgggtataggaagcaaaatgcctatattgcaacacagggatctctccccgaaacatttggggacttttggagaatgatatgggaacaacggagtgccacagttgtcatgatgacaaaactagaagaaagatcaagggtgaagtgtgaccagtattggcctagcagaggcacagaaacccacggactcgttcaagtaacgctgcttgatactgtggagctggccacatattgtgttcgaacatttgcactttacaagaatggttcaagtgagaagagagaagtgagacaattccagttcaccgcctggcctgatcatggtgttccagaacaccctacaccttttctagctttcttacgtagagtcaaaacctgtaaccctcccgatgctggtccgatggttgtgcactgcagtgcgggagttggccggactggttgcttcatcgtcatagatgccatgttagaaagaataaagcatgaaaaaactgtagatatttatggccatgtaactttaatgagagcccagaggaactatatggttcaaacagaagaccaatacatctttatccatgatgcactgttagaagcagtgacttgtggaaataccgaagtgccagctagaaacttgtatgcctacattcagaagctgacacaaatagaaacgggagagaatgtcacaggaatggagctcgaatttaagcgtctagccagctcaaaagctcacacctcaaggtttatcagtgccaatcttccatgtaataaattcaaaaatcgccttgttaatattatgccatatgaatccacaagggtatgcctgcagcctatccgtggagtagaaggatctgattacatcaatgccagttttattgatggatacagacaacagaaagcctacatcgctacccaggggcccttggcagagaccactgaagacttctggcggatgctctgggaacacaattccaccatagttgtgatgctcaccaagctgcgtgaaatgggcagagagaaatgtcaccaatactggccagcagaacggtctgcaagataccagtactttgttgtagatcccatggctgagtacaacatgccacagtatatcctaagggaattcaaggtcacagatgccagggacggccagtcccgaacagtaaggcagttccagttcactgactggccagagcaaggagtgccaaagtccggagaaggatttattgacttcatcggccaagtccataaaacaaaagaacagtttggccaagatggacccatttcagtccattgcagcgcgggcgttggaagaactggagtcttcataacgctaagcattgttttggaaagaatgagatatgaaggagttgtagatatcttccagactgtcaaaatgttaagaacacaacgaccagctatggtacagacagaggatcaatatcagttttcctatcgtgccgcactagagtacctgggcagctttgaccactatgcaacgtagaaacccctgacccattctggatttttactacaggcccttcaatatccatggagtctcttctgagccatacagggcacttgagaagtccttcttaacttctagctaacaactacttagtgggactattacacacaaaacaaattaaaaacaaattattccaggtggaccaagaatctgctttgacatcgccccttcccaccatactgctcataataacattttagggggaaaggggagggaatgtttaaaaagaaagtccttgatttagttttttagtattgtaaagatactgctgacctgtgcttcatttctaactgtgtaaacttttttttaacaaaatgtatcattcgataaagtgaattttaaaaaagttacataactcttcatttttttatttccaaatcgtaggtttttttaagctgtagaactgttatctgtaatatcttgctgtagaaatatcaaatcatttgaaaatttgcacatttttgtgcaaaactcaatctacagtatcagtctcgtcagatatattaattttacacttcagttttgattggtgagaaagtacccattctcttcaaataatcaaagataattattattttgttttgtttttggaatcaacagggaggcgcaaagtataaagttgctgctaacatatatacatatatatccatattttataagggtgtctatgtatatatagacagtgtgtccacacaaaaaatagatacagttatcagtcagtcagttcttccatgatttagtttttttaaacgtagaaaagctattgtaaacatctctttccatttattcttaattttttgacatattggtatttctttaaagggaaatgaggaatgcacatcagtgattgattgtcaaacctcaccccctgatttcctacctaatctacccccacctaaccaatcaatcacatccacaaattgttttgtttgtttgttagtcaggcttccaacaaagttcaatatttctaacactctagtgcaataaaaattattattaaatagctaagaggtgtgcatgtgggaaaggtcagtgcatatccctttaggaggggagaatgttgtaatatatcagctatcgagttgtttaaaaaaagtgtattcaatcgtatattgtctatagtatgtgctatgaaatttgcatttatgatatgtaacaggggcaaagccaaattcatgttactctgttcagtcagaaacattttgtggcatacagcattcctgggaagtgctgtactttgtttcgttttggttttagttttgcatttagagtgccttataattgatgcctattttaatagcatttctttttagcttttggttcgtatttccattcactgttcgtatctgttactttctattaaagcattatctgtttaccacatgtacaaaaactctttgaataatatgcattcctagttttcagccaagtcggggatgttagtgattgtaccagcccaaagcacttggataatcagggcccttcttccttttataatcaatcatcaacatcagaaaaagctacttgttttatttatattcccttccaaatccgctctggaacatgcagtaactgcaccaaacttattttagtaacaaatatcattggcaactttggaatatatttgatattccattaggatttttctaaaaggggaaataaactatatatatatatgtatcttacccccaattcttccaacagaatttctataggaagccatggatgatggcataagtttgccacatattacatgattttaaataatcctcaaaatacccaaggaactcttaaagagttttggtatgagtatactactttggtttaattttagcttcatggatgttctgcatggaaggatttttgttttccacattttcccattgctagcagagtgaaatccaagagaccaaacatttgcaagcattgtatttgagcacttttgtaaaaaacaaagaaaaagaaaaaaaagaaaatatatataatactaaaaaaaagtatctagaaggctacctcagaatgagactctctaacctacatcagaaccagagaagaatgtgcactatgtgggtctgttatcattattttcttttagtttgtatctttttggagatttatccaagtgccagattactcagtgctataattttcttttagttaaacaaagggggtcagacagacattgcatcatccagacatgccttgttggacatgtagaatccgatggagcactgcacaccagaatgattggccaatgagcagcttctctccctgaaacaataactgcccatttggcaaagggaaagatgacaataatcagaagaagaaaatgaatgggatgcataccatagacgaacgaggcggagactattgcgggaatcttactgttcaggagctgttcctagaactaactcccttactgtcattgatgtgcattccactctgtgcttttctgtacaaccattcaagttttaatttcccaggtgaaccatctttatctgccattaccacaagctttcaagtttccagttattttcatcatcataaccagtacggtgctattatttacctatgtacgtgtagttatgtataattttgtaattagttacaatggtaaaaaaaatcaaaatatataaaaagtgatttgtacagaactttattttagctcttttttaaaaatgatttgcatggttagaaaacggcgaggacagccaggggagggaagggcctctagggaactttgcactttctatacctttgtactatgcactgccctattgattctacacccaataatgatattacttgaacccatctgtaagaaactgcttcggaaattcatttgtgtgtatgtaaataacacaacatagaaacaggaagggaaaaaagtctgcagtaatgcacgtattttttttctttcctgtttattttcggttttgctttaagtccttttatttttaattccctttttgtttttctttttgggttttggttccttttgggtttatgggtgccctgatactccagcagagatcagaaggctacagatccattctatccatccgttatgtggctttgccatcccagcttggagtgtctttacaaagataataacagttgtgttctttgctctcgttttggatgcatagactgaaaaattaaaacaaataacttgtaaaatggcttgttaaaaaatacaattacctctaattagtagtacgcgtaaatgttttacagaatgaaaggcgtgctttttattttcttacttcgttacattggtggcgaaagaagtctgtatgaaaatcagttctttgctgacacaagttccatttgttacaaatgaattctaataaaaatgtcagtgttatgca

SEQ ID NO: 6011 - protein, 1665 aa, Homo sapiens
MPGGSVNITCVAVGSPMPYVKWMLGAEDLTPEDDMPIGRNVLELNDVRQSANYTCVAMSTLGVIEAIAQITVKALPKPPGTPVVTESTATSITLTWDSGNPEPVSYYIIQHKPKNSEELYKEIDGVATTRYSVAGLSPYSDYEFRVVAVNNIGRGPPSEPVLTQTSEQAPSSAPRDVQARMLSSTTILVQWKEPEEPNGQIQGYRVYYTMDPTQHVNNWMKHNVADSQITTIGNLVPQKTYSVKVLAFTSIGDGPLSSDIQVITQTGVPGQPLNFKAEPESETSILLSWTPPRSDTIANYELVYKDGEHGEEQRITIEPGTSYRLQGLKPNSLYYFRLAARSPQGLGASTAEISARTMQSKPSAPPQDISCTSPSSTSILVSWQPPPVEKQNGIITEYSIKYTAVDGEDDKPHEILGIPSDTTKYLLEQLEKWTEYRITVTAHTDVGPGPESLSVLIRTNEDVPSGPPRKVEVEAVNSTSVKVSWRSPVPNKQHGQIRGYQVHYVRMENGEPKGQPMLKDVMLADAQWEFDDTTEHDMIISGLQPETSYSLTVTAYTTKGDGARSKPKLVSTTGAVPGKPRLVINHTQMNTALIQWHPPVDTFGPLQGYRLKFGRKDMEPLTTLEFSEKEDHFTATDIHKGASYVFRLSARNKVGFGEEMVKEISIPEEVPTGFPQNLHSEGTTSTSVQLSWQPPVLAERNGIITKYTLLYRDINIPLLPMEQLIVPADTTMTLTGLKPDTTYDVKVRAHTSKGPGPYSPSVQFRTLPVDQVFAKNFHVKAVMKTSVLLSWEIPENYNSAMPFKILYDDGKMVEEVDGRATQKLIVNLKPEKSYSFVLTNRGNSAGGLQHRVTAKTAPDVLRTKPAFIGKTNLDGMITVQLPEVPANENIKGYYIIIVPLKKSRGKFIKPWESPDEMELDELLKEISRKRRSIRYGREVELKPYIAAHFDVLPTEFTLGDDKHYGGFTNKQLQSGQEYVFFVLAVMEHAESKMYATSPYSDPVVSMDLDPQPITDEEEGLIWVVGPVLAVVFIICIVIAILLYKRKRAESDSRKSSIPNNKEIPSHHPTDPVELRRLNFQTPGMASHPPIPILELADHIERLKANDNLKFSQEYESIDPGQQFTWEHSNLEVNKPKNRYANVIAYDHSRVLLSAIEGIPGSDYVNANYIDGYRKQNAYIATQGSLPETFGDFWRMIWEQRSATVVMMTKLEERSRVKCDQYWPSRGTETHGLVQVTLLDTVELATYCVRTFALYKNGSSEKREVRQFQFTAWPDHGVPEHPTPFLAFLRRVKTCNPPDAGPMVVHCSAGVGRTGCFIVIDAMLERIKHEKTVDIYGHVTLMRAQRNYMVQTEDQYIFIHDALLEAVTCGNTEVPARNLYAYIQKLTQIETGENVTGMELEFKRLASSKAHTSRFISANLPCNKFKNRLVNIMPYESTRVCLQPIRGVEGSDYINASFIDGYRQQKAYIATQGPLAETTEDFWRMLWEHNSTIVVMLTKLREMGREKCHQYWPAERSARYQYFVVDPMAEYNMPQYILREFKVTDARDGQSRTVRQFQFTDWPEQGVPKSGEGFIDFIGQVHKTKEQFGQDGPISVHCSAGVGRTGVFITLSIVLERMRYEGVVDIFQTVKMLRTQRPAMVQTEDQYQFSYRAALEYLGSFDHYAT

SEQ ID NO: 6012 - DNA, 9382 bp, Homo sapiens
tgagaccacagcagaatgtgccttggacaaaggtctcagggtggtgaactttttcttcgaattcctaacctgtgagcttacgatgatggtgcctgtccattaactgaacaactgtggttttgaacttcttgaggccagggactgtgtctgaaaacaccgacggtggctaactcaagggagacgtctggtgaacacccgtgggatctaaagaacaagctctgaaagtgttccagctgaaatttcagatcggacagactcgctgcggctccggaggcagtgattccaagctgctcgcgcacgctgctgccaagctgcaggatggtgcacgtagccaggctgctgctgctgctcctcactttcttcctccgcacggatgctgagacacctccaaggtttacacgaacacccgttgatcagacaggggtctctggcggagttgcctctttcatctgccaagctacgggagacccaagacctaaaattgtctggaacaaaaaaggaaagaaagtcagcaatcagagatttgaggtaatagagtttgacgatgggtctggatcagttctcagaatacaacccttacggactccgagggatgaggccatttatgaatgtgtggcctcaaataatgtgggagaaataagtgtatccaccagactcacagttttgcgggaagatcaaattcccaggggcttccctaccattgacatgggcccacagttgaaggtggttgagcgtactcgcacggccaccatgctttgtgcagccagtggtaatccggatccagaaatcacttggtttaaagatttcttacctgtggacacaagcaacaacaatggtcgtattaagcagttacgatcaggagcccttcagattgagcagagtgaagagtctgaccaaggaaaatatgagtgtgttgccaccaacagcgcgggcactcagttcgccgtgtcccaccaagattctctatcccacccactaatcatgaaatcatgccaggcggaagcgttaatatcacctgtgtggccgtggggtcaccaatgccttatgtaaagtggatgttgggggcagaagatctgacacctgaagatgatatgccaataggaagaaatgtgctagaactgaatgatgtaagacagtcagcaaattacacctgtgttgctatgtcaacactgggtgtcattgaagcaatagcacagatcactgtcaaagccttacccaaacctccaggaactcctgtagtgaccgagagcacagctacaagcatcacactgacgtgggactctgggaaccctgagcctgtttcttattacataattcagcataaacctaaaaactctgaggaactttacaaagaaattgatggggtggcgaccacacgctacagtgtcgctggactaagtccctactcggattatgaattcagggttgttgctgtcaataacattgggcgggggcctcccagcgaacctgtgctaacacaaacctcagagcaagcaccatccagtgccccgagggatgtccaggcacgaatgttgagttcgaccaccattttggtacagtggaaggaacctgaagagccaaatggacagatccaaggatatagagtttattatacaatggatcccactcaacatgtcaacaactggatgaaacacaatgtagctgacagccaaatcactactattggcaacttagtgccccagaaaacatattctgtcaaagtcctggcttttacctcaattggagatggtcccctttcaagtgacatacaagtcatcactcagacaggagtaccagggcagccactaaacttcaaagcagaacctgagtctgaaacaagtattttgctctcttggacacctccacgttcagataccattgccaactatgaactggtctacaaagatggggagcatggagaggagcaacgaattaccattgagccagggacatcatataggctgcaaggactgaaaccaaacagcttatactatttccgtctggctgcacgctcccctcaaggcctgggtgcttctactgcagaaatatcagctagaaccatgcagtcaaagccgtcagctcctcctcaagacattagttgcaccagcccaagttccactagtattttggtaagttggcaacctccaccagtggaaaaacagaatggcattatcactgaatactccatcaagtacactgcagtggatggggaagatgacaagcctcacgagattttgggaattccttcggacactaccaaataccttttggaacagctggaaaaatggactgaataccggatcactgtgacagcccatacagatgtcggccctggccctgagagcttgtccgtgttgattcgaaccaatgaagatgttcctagtggtcctcctcgcaaagtcgaggtagaggctgtcaactcaacatctgttaaagtctcatggcgctcacccgtgcccaataaacagcatggccagataagaggatatcaggtgcattatgtgaggatggaaaatggtgagcccaagggccagcccatgctgaaagatgtcatgctggctgatgcacagtgggaatttgatgatactactgaacatgacatgatcatttctgggctccagcctgaaacttcctactccctcaccgtcacagcctacacaaccaaaggagatggtgctcgcagcaagcccaaactggtgtccaccactggggcagttccagggaaacctcggcttgtgattaaccacactcagatgaatactgctcttattcagtggcaccctccggtggacacatttggacctcttcagggctaccgtctaaaatttggccgcaaggatatggagccacttactactcttgagttctctgaaaaagaagatcactttacagctacagacatccacaagggagcatcatacgtcttcaggctctcagccagaaacaaagtgggctttggggaggagatggtgaaggagatttccattccagaagaagtaccaactggattccctcaaaaccttcactcagaaggcaccacttcaacctccgtccagttatcttggcaaccacctgtcctggcagagagaaatggcattatcaccaagtatacccttctttatagggatatcaacatcccccttctcccgatggagcagcttattgttccagctgacaccactatgacactcactggcttaaaaccagataccacatacgatgtaaaagtacgtgctcatacgagcaaagggcccgggccatatagtcccagtgtccagttcaggacactgcctgtggatcaagtgtttgcaaaaaattttcatgtcaaagcagtaatgaagacttccgtgttgctgtcttgggagattccagagaattataactccgccatgcctttcaaaattctttatgatgatgggaaaatggtagaagaagtggatggccgagccacacagaagttaattgtcaacctgaagcctgagaaatcatattcatttgtgctgacaaatcgtggaaacagtgctggtgggctgcagcacagggtcacggcaaagactgcaccagatgtattacgtaccaagcctgccttcattgggaagaccaacttggatggcatgattactgtgcaactgcctgaagtacctgcaaatgagaatataaaaggttactacataataattgtgcctttgaagaaatctcgcgggaaatttatcaagccatgggagagtccagatgaaatggaattagatgagctgcttaaggagatatctaggaagcgcagaagcatccgttatgggagagaagttgaattaaagccatatattgccgctcactttgatgtccttcccactgagttcaccctgggggatgacaagcattatggtggatttacaaacaagcaactccaaagtggtcaagaatatgtcttctttgtgttagcagtaatggaacatgcagagtctaagatgtatgcaaccagcccttactccgaccccgtggtgtcaatggatctggatccgcagccaatcacggatgaagaagaaggcttgatctgggttgtaggtcctgtccttgcagtggtctttatcatctgcattgtcattgctattcttctttataaaaggaagagggcagagtccgactctagaaaaagcagcataccgaacaataaggagatcccttcacaccacccaacagaccctgtagaactgaggcgccttaactttcaaacaccgggtatggctagccatcctccaatacccatcttggaacttgcagaccacattgaaagattgaaagcaaatgacaacttgaagttttcccaggaatatgagtcaattgaccctggccagcagttcacttgggaacattcaaacttggaagtaaacaaaccaaagaatagatacgcgaatgtaatcgcatatgatcattcccgggttctcctatcagctatagaagggatcccaggaagtgactatgtgaatgccaactacatagatgggtataggaagcaaaatgcctatattgcaacacagggatctctccccgaaacatttggggacttttggagaatgatatgggaacaacggagtgccacagttgtcatgatgacaaaactagaagaaagatcaagggtgaagtgtgaccagtattggcctagcagaggcacagaaacccacggactcgttcaagtaacgctgcttgatactgtggagctggccacatattgtgttcgaacatttgcactttacaagaatggttcaagtgagaagagagaagtgagacaattccagttcaccgcctggcctgatcatggtgttccagaacaccctacaccttttctagctttcttacgtagagtcaaaacctgtaaccctcccgatgctggtccgatggttgtgcactgcagtgcgggagttggccggactggttgcttcatcgtcatagatgccatgttagaaagaataaagcatgaaaaaactgtagatatttatggccatgtaactttaatgagagcccagaggaactatatggttcaaacagaagaccaatacatctttatccatgatgcactgttagaagcagtgacttgtggaaataccgaagtgccagctagaaacttgtatgcctacattcagaagctgacacaaatagaaacgggagagaatgtcacaggaatggagctcgaatttaagcgtctagccagctcaaaagctcacacctcaaggtttatcagtgccaatcttccatgtaataaattcaaaaatcgccttgttaatattatgccatatgaatccacaagggtatgcctgcagcctatccgtggagtagaaggatctgattacatcaatgccagttttattgatggatacagacaacagaaagcctacatcgctacccaggggcccttggcagagaccactgaagacttctggcggatgctctgggaacacaattccaccatagttgtgatgctcaccaagctgcgtgaaatgggcagagagaaatgtcaccaatactggccagcagaacggtctgcaagataccagtactttgttgtagatcccatggctgagtacaacatgccacagtatatcctaagggaattcaaggtcacagatgccagggacggccagtcccgaacagtaaggcagttccagttcactgactggccagagcaaggagtgccaaagtccggagaaggatttattgacttcatcggccaagtccataaaacaaaagaacagtttggccaagatggacccatttcagtccattgcagcgcgggcgttggaagaactggagtcttcataacgctaagcattgttttggaaagaatgagatatgaaggagttgtagatatcttccagactgtcaaaatgttaagaacacaacgaccagctatggtacagacagaggatcaatatcagttttcctatcgtgccgcactagagtacctgggcagctttgaccactatgcaacgtagaaacccctgacccattctggatttttactacaggcccttcaatatccatggagtctcttctgagccatacagggcacttgagaagtccttcttaacttctagctaacaactacttagtgggactattacacacaaaacaaattaaaaacaaattattccaggtggaccaagaatctgctttgacatcgccccttcccaccatactgctcataataacattttagggggaaaggggagggaatgtttaaaaagaaagtccttgatttagttttttagtattgtaaagatactgctgacctgtgcttcatttctaactgtgtaaacttttttttaacaaaatgtatcattcgataaagtgaattttaaaaaagttacataactcttcatttttttatttccaaatcgtaggtttttttaagctgtagaactgttatctgtaatatcttgctgtagaaatatcaaatcatttgaaaatttgcacatttttgtgcaaaactcaatctacagtatcagtctcgtcagatatattaattttacacttcagttttgattggtgagaaagtacccattctcttcaaataatcaaagataattattattttgttttgtttttggaatcaacagggaggcgcaaagtataaagttgctgctaacatatatacatatatatccatattttataagggtgtctatgtatatatagacagtgtgtccacacaaaaaatagatacagttatcagtcagtcagttcttccatgatttagtttttttaaacgtagaaaagctattgtaaacatctctttccatttattcttaattttttgacatattggtatttctttaaagggaaatgaggaatgcacatcagtgattgattgtcaaacctcaccccctgatttcctacctaatctacccccacctaaccaatcaatcacatccacaaattgttttgtttgtttgttagtcaggcttccaacaaagttcaatatttctaacactctagtgcaataaaaattattattaaatagctaagaggtgtgcatgtgggaaaggtcagtgcatatccctttaggaggggagaatgttgtaatatatcagctatcgagttgtttaaaaaaagtgtattcaatcgtatattgtctatagtatgtgctatgaaatttgcatttatgatatgtaacaggggcaaagccaaattcatgttactctgttcagtcagaaacattttgtggcatacagcattcctgggaagtgctgtactttgtttcgttttggttttagttttgcatttagagtgccttataattgatgcctattttaatagcatttctttttagcttttggttcgtatttccattcactgttcgtatctgttactttctattaaagcattatctgtttaccacatgtacaaaaactctttgaataatatgcattcctagttttcagccaagtcggggatgttagtgattgtaccagcccaaagcacttggataatcagggcccttcttccttttataatcaatcatcaacatcagaaaaagctacttgttttatttatattcccttccaaatccgctctggaacatgcagtaactgcaccaaacttattttagtaacaaatatcattggcaactttggaatatatttgatattccattaggatttttctaaaaggggaaataaactatatatatatatgtatcttacccccaattcttccaacagaatttctataggaagccatggatgatggcataagtttgccacatattacatgattttaaataatcctcaaaatacccaaggaactcttaaagagttttggtatgagtatactactttggtttaattttagcttcatggatgttctgcatggaaggatttttgttttccacattttcccattgctagcagagtgaaatccaagagaccaaacatttgcaagcattgtatttgagcacttttgtaaaaaacaaagaaaaagaaaaaaaagaaaatatatataatactaaaaaaaagtatctagaaggctacctcagaatgagactctctaacctacatcagaaccagagaagaatgtgcactatgtgggtctgttatcattattttcttttagtttgtatctttttggagatttatccaagtgccagattactcagtgctataattttcttttagttaaacaaagggggtcagacagacattgcatcatccagacatgccttgttggacatgtagaatccgatggagcactgcacaccagaatgattggccaatgagcagcttctctccctgaaacaataactgcccatttggcaaagggaaagatgacaataatcagaagaagaaaatgaatgggatgcataccatagacgaacgaggcggagactattgcgggaatcttactgttcaggagctgttcctagaactaactcccttactgtcattgatgtgcattccactctgtgcttttctgtacaaccattcaagttttaatttcccaggtgaaccatctttatctgccattaccacaagctttcaagtttccagttattttcatcatcataaccagtacggtgctattatttacctatgtacgtgtagttatgtataattttgtaattagttacaatggtaaaaaaaatcaaaatatataaaaagtgatttgtacagaactttattttagctcttttttaaaaatgatttgcatggttagaaaacggcgaggacagccaggggagggaagggcctctagggaactttgcactttctatacctttgtactatgcactgccctattgattctacacccaataatgatattacttgaacccatctgtaagaaactgcttcggaaattcatttgtgtgtatgtaaataacacaacatagaaacaggaagggaaaaaagtctgcagtaatgcacgtattttttttctttcctgtttattttcggttttgctttaagtccttttatttttaattccctttttgtttttctttttgggttttggttccttttgggtttatgggtgccctgatactccagcagagatcagaaggctacagatccattctatccatccgttatgtggctttgccatcccagcttggagtgtctttacaaagataataacagttgtgttctttgctctcgttttggatgcatagactgaaaaattaaaacaaataacttgtaaaatggcttgttaaaaaatacaattacctctaattagtagtacgcgtaaatgttttacagaatgaaaggcgtgctttttattttcttacttcgttacattggtggcgaaagaagtctgtatgaaaatcagttctttgctgacacaagttccatttgttacaaatgaattctaataaaaatgtcagtgttatgca

SEQ ID NO: 6013 - protein, 1665 aa, Homo sapiens; identical to SEQ ID NO: 6011

SEQ ID NO: 6014 - DNA, 8161 bp, Homo sapiens
tgagaccacagcagaatgtgccttggacaaaggtctcagggtggtgaactttttcttcgaattcctaacctgtgagcttacgatgatggtgcctgtccattaactgaacaactgtggttttgaacttcttgaggccagggactgtgtctgaaaacaccgacggtggctaactcaagggagacgtctggtgaacacccgtgggatctaaagaacaagctctgaaagtgttccagctgaaatttcagatcggacagactcgctgcggctccggaggcagtgattccaagctgctcgcgcacgctgctgccaagctgcaggatggtgcacgtagccaggctgctgctgctgctcctcactttcttcctccgcacggatgctgagacacctccaaggtttacacgaacacccgttgatcagacaggggtctctggcggagttgcctctttcatctgccaagctacgggagacccaagacctaaaattgtctggaacaaaaaaggaaagaaagtcagcaatcagagatttgaggtaatagagtttgacgatgggtctggatcagttctcagaatacaacccttacggactccgagggatgaggccatttatgaatgtgtggcctcaaataatgtgggagaaataagtgtatccaccagactcacagttttgcgggaagatcaaattcccaggggcttccctaccattgacatgggcccacagttgaaggtggttgagcgtactcgcacggccaccatgctttgtgcagccagtggtaatccggatccagaaatcacttggtttaaagatttcttacctgtggacacaagcaacaacaatggtcgtattaagcagttacgatcaggagcccttcagattgagcagagtgaagagtctgaccaaggaaaatatgagtgtgttgccaccaacagcgcgggcactcagagctgcgagaagttcgccgtgtcccaccaagattctctatcccacccactaatcatgaaatcatgccaggcggaagcgttaatatcacctgtgtggccgtggggtcaccaatgccttatgtaaagtggatgttgggggcagaagatctgacacctgaagatgatatgccaataggaagaaatgtgctagaactgaatgatgtaagacagtcagcaaattacacctgtgttgctatgtcaacactgggtgtcattgaagcaatagcacagatcactgtcaaagccttacccaaacctccaggaactcctgtagtgaccgagagcacagctacaagcatcacactgacgtgggactctgggaaccctgagcctgtttcttattacataattcagcataaacctaaaaactctgaggaactttacaaagaaattgatggggtggcgaccacacgctacagtgtcgctggactaagtccctactcggattatgaattcagggttgttgctgtcaataacattgggcgggggcctcccagcgaacctgtgctaacacaaacctcagagcaagcaccatccagtgccccgagggatgtccaggcacgaatgttgagttcgaccaccattttggtacagtggaaggaacctgaagagccaaatggacagatccaaggatatagagtttattatacaatggatcccactcaacatgtcaacaactggatgaaacacaatgtagctgacagccaaatcactactattggcaacttagtgccccagaaaacatattctgtcaaagtcctggcttttacctcaattggagatggtcccctttcaagtgacatacaagtcatcactcagacaggagtaccagggcagccactaaacttcaaagcagaacctgagtctgaaacaagtattttgctctcttggacacctccacgttcagataccattgccaactatgaactggtctacaaagatggggagcatggagaggagcaacgaattaccattgagccagggacatcatataggctgcaaggactgaaaccaaacagcttatactatttccgtctggctgcacgctcccctcaaggcctgggtgcttctactgcagaaatatcagctagaaccatgcagtcaatgtttgcaaaaaattttcatgtcaaagcagtaatgaagacttccgtgttgctgtcttgggagattccagagaattataactccgccatgcctttcaaaattctttatgatgatgggaaaatggtagaagaagtggatggccgagccacacagaagttaattgtcaacctgaagcctgagaaatcatattcatttgtgctgacaaatcgtggaaacagtgctggtgggctgcagcacagggtcacggcaaagactgcaccagatgtattacgtaccaagcctgccttcattgggaagaccaacttggatggcatgattactgtgcaactgcctgaagtacctgcaaatgagaatataaaaggttactacataataattgtgcctttgaagaaatctcgcgggaaatttatcaagccatgggagagtccagatgaaatggaattagatgagctgcttaaggagatatctaggaagcgcagaagcatccgttatgggagagaagttgaattaaagccatatattgccgctcactttgatgtccttcccactgagttcaccctgggggatgacaagcattatggtggatttacaaacaagcaactccaaagtggtcaagaatatgtcttctttgtgttagcagtaatggaacatgcagagtctaagatgtatgcaaccagcccttactccgaccccgtggtgtcaatggatctggatccgcagccaatcacggatgaagaagaaggcttgatctgggttgtaggtcctgtccttgcagtggtctttatcatctgcattgtcattgctattcttctttataaaaggaagagggcagagtccgactctagaaaaagcagcataccgaacaataaggagatcccttcacaccacccaacagaccctgtagaactgaggcgccttaactttcaaacaccgggtatggctagccatcctccaatacccatcttggaacttgcagaccacattgaaagattgaaagcaaatgacaacttgaagttttcccaggaatatgagtcaattgaccctggccagcagttcacttgggaacattcaaacttggaagtaaacaaaccaaagaatagatacgcgaatgtaatcgcatatgatcattcccgggttctcctatcagctatagaagggatcccaggaagtgactatgtgaatgccaactacatagatgggtataggaagcaaaatgcctatattgcaacacagggatctctccccgaaacatttggggacttttggagaatgatatgggaacaacggagtgccacagttgtcatgatgacaaaactagaagaaagatcaagggtgaagtgtgaccagtattggcctagcagaggcacagaaacccacggactcgttcaagtaacgctgcttgatactgtggagctggccacatattgtgttcgaacatttgcactttacaagaatggttcaagtgagaagagagaagtgagacaattccagttcaccgcctggcctgatcatggtgttccagaacaccctacaccttttctagctttcttacgtagagtcaaaacctgtaaccctcccgatgctggtccgatggttgtgcactgcagtgcgggagttggccggactggttgcttcatcgtcatagatgccatgttagaaagaataaagcatgaaaaaactgtagatatttatggccatgtaactttaatgagagcccagaggaactatatggttcaaacagaagaccaatacatctttatccatgatgcactgttagaagcagtgacttgtggaaataccgaagtgccagctagaaacttgtatgcctacattcagaagctgacacaaatagaaacgggagagaatgtcacaggaatggagctcgaatttaagcgtctagccagctcaaaagctcacacctcaaggtttatcagtgccaatcttccatgtaataaattcaaaaatcgccttgttaatattatgccatatgaatccacaagggtatgcctgcagcctatccgtggagtagaaggatctgattacatcaatgccagttttattgatggatacagacaacagaaagcctacatcgctacccaggggcccttggcagagaccactgaagacttctggcggatgctctgggaacacaattccaccatagttgtgatgctcaccaagctgcgtgaaatgggcagagagaaatgtcaccaatactggccagcagaacggtctgcaagataccagtactttgttgtagatcccatggctgagtacaacatgccacagtatatcctaagggaattcaaggtcacagatgccagggacggccagtcccgaacagtaaggcagttccagttcactgactggccagagcaaggagtgccaaagtccggagaaggatttattgacttcatcggccaagtccataaaacaaaagaacagtttggccaagatggacccatttcagtccattgcagcgcgggcgttggaagaactggagtcttcataacgctaagcattgttttggaaagaatgagatatgaaggagttgtagatatcttccagactgtcaaaatgttaagaacacaacgaccagctatggtacagacagaggatcaatatcagttttcctatcgtgccgcactagagtacctgggcagctttgaccactatgcaacgtagaaacccctgacccattctggatttttactacaggcccttcaatatccatggagtctcttctgagccatacagggcacttgagaagtccttcttaacttctagctaacaactacttagtgggactattacacacaaaacaaattaaaaacaaattattccaggtggaccaagaatctgctttgacatcgccccttcccaccatactgctcataataacattttagggggaaaggggagggaatgtttaaaaagaaagtccttgatttagttttttagtattgtaaagatactgctgacctgtgcttcatttctaactgtgtaaacttttttttaacaaaatgtatcattcgataaagtgaattttaaaaaagttacataactcttcatttttttatttccaaatcgtaggtttttttaagctgtagaactgttatctgtaatatcttgctgtagaaatatcaaatcatttgaaaatttgcacatttttgtgcaaaactcaatctacagtatcagtctcgtcagatatattaattttacacttcagttttgattggtgagaaagtacccattctcttcaaataatcaaagataattattattttgttttgtttttggaatcaacagggaggcgcaaagtataaagttgctgctaacatatatacatatatatccatattttataagggtgtctatgtatatatagacagtgtgtccacacaaaaaatagatacagttatcagtcagtcagttcttccatgatttagtttttttaaacgtagaaaagctattgtaaacatctctttccatttattcttaattttttgacatattggtatttctttaaagggaaatgaggaatgcacatcagtgattgattgtcaaacctcaccccctgatttcctacctaatctacccccacctaaccaatcaatcacatccacaaattgttttgtttgtttgttagtcaggcttccaacaaagttcaatatttctaacactctagtgcaataaaaattattattaaatagctaagaggtgtgcatgtgggaaaggtcagtgcatatccctttaggaggggagaatgttgtaatatatcagctatcgagttgtttaaaaaaagtgtattcaatcgtatattgtctatagtatgtgctatgaaatttgcatttatgatatgtaacaggggcaaagccaaattcatgttactctgttcagtcagaaacattttgtggcatacagcattcctgggaagtgctgtactttgtttcgttttggttttagttttgcatttagagtgccttataattgatgcctattttaatagcatttctttttagcttttggttcgtatttccattcactgttcgtatctgttactttctattaaagcattatctgtttaccacatgtacaaaaactctttgaataatatgcattcctagttttcagccaagtcggggatgttagtgattgtaccagcccaaagcacttggataatcagggcccttcttccttttataatcaatcatcaacatcagaaaaagctacttgttttatttatattcccttccaaatccgctctggaacatgcagtaactgcaccaaacttattttagtaacaaatatcattggcaactttggaatatatttgatattccattaggatttttctaaaaggggaaataaactatatatatatatgtatcttacccccaattcttccaacagaatttctataggaagccatggatgatggcataagtttgccacatattacatgattttaaataatcctcaaaatacccaaggaactcttaaagagttttggtatgagtatactactttggtttaattttagcttcatggatgttctgcatggaaggatttttgttttccacattttcccattgctagcagagtgaaatccaagagaccaaacatttgcaagcattgtatttgagcacttttgtaaaaaacaaagaaaaagaaaaaaaagaaaatatatataatactaaaaaaaagtatctagaaggctacctcagaatgagactctctaacctacatcagaaccagagaagaatgtgcactatgtgggtctgttatcattattttcttttagtttgtatctttttggagatttatccaagtgccagattactcagtgctataattttcttttagttaaacaaagggggtcagacagacattgcatcatccagacatgccttgttggacatgtagaatccgatggagcactgcacaccagaatgattggccaatgagcagcttctctccctgaaacaataactgcccatttggcaaagggaaagatgacaataatcagaagaagaaaatgaatgggatgcataccatagacgaacgaggcggagactattgcgggaatcttactgttcaggagctgttcctagaactaactcccttactgtcattgatgtgcattccactctgtgcttttctgtacaaccattcaagttttaatttcccaggtgaaccatctttatctgccattaccacaagctttcaagtttccagttattttcatcatcataaccagtacggtgctattatttacctatgtacgtgtagttatgtataattttgtaattagttacaatggtaaaaaaaatcaaaatatataaaaagtgatttgtacagaactttattttagctcttttttaaaaatgatttgcatggttagaaaacggcgaggacagccaggggagggaagggcctctagggaactttgcactttctatacctttgtactatgcactgccctattgattctacacccaataatgatattacttgaacccatctgtaagaaactgcttcggaaattcatttgtgtgtatgtaaataacacaacatagaaacaggaagggaaaaaagtctgcagtaatgcacgtattttttttctttcctgtttattttcggttttgctttaagtccttttatttttaattccctttttgtttttctttttgggttttggttccttttgggtttatgggtgccctgatactccagcagagatcagaaggctacagatccattctatccatccgttatgtggctttgccatcccagcttggagtgtctttacaaagataataacagttgtgttctttgctctcgttttggatgcatagactgaaaaattaaaacaaataacttgtaaaatggcttgttaaaaaatacaattacctctaattagtagtacgcgtaaatgttttacagaatgaaaggcgtgctttttattttcttacttcgttacattggtggcgaaagaagtctgtatgaaaatcagttctttgctgacacaagttccatttgttacaaatgaattctaataaaaatgtcagtgttatgca

SEQ ID NO: 6015 - protein, 1254 aa, Homo sapiens
MPGGSVNITCVAVGSPMPYVKWMLGAEDLTPEDDMPIGRNVLELNDVRQSANYTCVAMSTLGVIEAIAQITVKALPKPPGTPVVTESTATSITLTWDSGNPEPVSYYIIQHKPKNSEELYKEIDGVATTRYSVAGLSPYSDYEFRVVAVNNIGRGPPSEPVLTQTSEQAPSSAPRDVQARMLSSTTILVQWKEPEEPNGQIQGYRVYYTMDPTQHVNNWMKHNVADSQITTIGNLVPQKTYSVKVLAFTSIGDGPLSSDIQVITQTGVPGQPLNFKAEPESETSILLSWTPPRSDTIANYELVYKDGEHGEEQRITIEPGTSYRLQGLKPNSLYYFRLAARSPQGLGASTAEISARTMQSMFAKNFHVKAVMKTSVLLSWEIPENYNSAMPFKILYDDGKMVEEVDGRATQKLIVNLKPEKSYSFVLTNRGNSAGGLQHRVTAKTAPDVLRTKPAFIGKTNLDGMITVQLPEVPANENIKGYYIIIVPLKKSRGKFIKPWESPDEMELDELLKEISRKRRSIRYGREVELKPYIAAHFDVLPTEFTLGDDKHYGGFTNKQLQSGQEYVFFVLAVMEHAESKMYATSPYSDPVVSMDLDPQPITDEEEGLIWVVGPVLAVVFIICIVIAILLYKRKRAESDSRKSSIPNNKEIPSHHPTDPVELRRLNFQTPGMASHPPIPILELADHIERLKANDNLKFSQEYESIDPGQQFTWEHSNLEVNKPKNRYANVIAYDHSRVLLSAIEGIPGSDYVNANYIDGYRKQNAYIATQGSLPETFGDFWRMIWEQRSATVVMMTKLEERSRVKCDQYWPSRGTETHGLVQVTLLDTVELATYCVRTFALYKNGSSEKREVRQFQFTAWPDHGVPEHPTPFLAFLRRVKTCNPPDAGPMVVHCSAGVGRTGCFIVIDAMLERIKHEKTVDIYGHVTLMRAQRNYMVQTEDQYIFIHDALLEAVTCGNTEVPARNLYAYIQKLTQIETGENVTGMELEFKRLASSKAHTSRFISANLPCNKFKNRLVNIMPYESTRVCLQPIRGVEGSDYINASFIDGYRQQKAYIATQGPLAETTEDFWRMLWEHNSTIVVMLTKLREMGREKCHQYWPAERSARYQYFVVDPMAEYNMPQYILREFKVTDARDGQSRTVRQFQFTDWPEQGVPKSGEGFIDFIGQVHKTKEQFGQDGPISVHCSAGVGRTGVFITLSIVLERMRYEGVVDIFQTVKMLRTQRPAMVQTEDQYQFSYRAALEYLGSFDHYAT

SEQ ID NO: 6016 - DNA, 6172 bp, Homo sapiens
tgagaccacagcagaatgtgccttggacaaaggtctcagggtggtgaactttttcttcgaattcctaacctgtgagcttacgatgatggtgcctgtccattaactgaacaactgtggttttgaacttcttgaggccagggactgtgtctgaaaacaccgacggtggctaactcaagggagacgtctggtgaacacccgtgggatctaaagaacaagctctgaaagtgttccagctgaaatttcagatcggacagactcgctgcggctccggaggcagtgattccaagctgctcgcgcacgctgctgccaagctgcaggatggtgcacgtagccaggctgctgctgctgctcctcactttcttcctccgcacggatgctgagacacctccaaggtttacacgaacacccgttgatcagacaggggtctctggcggagttgcctctttcatctgccaagctacgggagacccaagacctaaaattgtctggaacaaaaaaggaaagaaagtcagcaatcagagatttgaggtaatagagtttgacgatgggtctggatcagttctcagaatacaacccttacggactccgagggatgaggccatttatgaatgtgtggcctcaaataatgtgggagaaataagtgtatccaccagactcacagttttgcgggaagatcaaattcccaggggcttccctaccattgacatgggcccacagttgaaggtggttgagcgtactcgcacggccaccatgctttgtgcagccagtggtaatccggatccagaaatcacttggtttaaagatttcttacctgtggacacaagcaacaacaatggtcgtattaagcagttacgatcaggagcccttcagattgagcagagtgaagagtctgaccaaggaaaatatgagtgtgttgccaccaacagcgcgggcactcagagctgcgagaagttcgccgtgtcccaccaagattctctatcccacccactaatcatgaaatcatgccaggcggaagcgttaatatcacctgtgtggccgtggggtcaccaatgccttatgtaaagtggatgttgggggcagaagatctgacacctgaagatgatatgccaataggaagaaatgtgctagaactgaatgatgtaagacagtcagcaaattacacctgtgttgctatgtcaacactgggtgtcattgaagcaatagcacagatcactgtcaaagccttacccaaacctccaggaactcctgtagtgaccgagagcacagctacaagcatcacactgacgtgggactctgggaaccctgagcctgtttcttattacataattcagcataaacctaaaaactctgaggaactttacaaagaaattgatggggtggcgaccacacgctacagtgtcgctggactaagtccctactcggattatgaattcagggttgttgctgtcaataacattgggcgggggcctcccagcgaacctgtgctaacacaaacctcagagcaagcaccatccagtgccccgagggatgtccaggcacgaatgttgagttcgaccaccattttggtacagtggaaggaacctgaagagccaaatggacagatccaaggatatagagtttattatacaatggatcccactcaacatgtcaacaactggatgaaacacaatgtagctgacagccaaatcactactattggcaacttagtgccccagaaaacatattctgtcaaagtcctggcttttacctcaattggagatggtcccctttcaagtgacatacaagtcatcactcagacaggagtaccagggcagccactaaacttcaaagcagaacctgagtctgaaacaagtattttgctctcttggacacctccacgttcagataccattgccaactatgaactggtctacaaagatggggagcatggagaggagcaacgaattaccattgagccagggacatcatataggctgcaaggactgaaaccaaacagcttatactatttccgtctggctgcacgctcccctcaaggcctgggtgcttctactgcagaaatatcagctagaaccatgcagtcaatgtttgcaaaaaattttcatgtcaaagcagtaatgaagacttccgtgttgctgtcttgggagattccagagaattataactccgccatgcctttcaaaattctttatgatgatgggaaaatggtagaagaagtggatggccgagccacacagaagttaattgtcaacctgaagcctgagaaatcatattcatttgtgctgacaaatcgtggaaacagtgctggtgggctgcagcacagggtcacggcaaagactgcaccagatgtattacgtaccaagcctgccttcattgggaagaccaacttggatggcatgattactgtgcaactgcctgaagtacctgcaaatgagaatataaaaggttactacataataattgtgcctttgaagaaatctcgcgggaaatttatcaagccatgggagagtccagatgaaatggaattagatgagctgcttaaggagatatctaggaagcgcagaagcatccgttatgggagagaagttgaattaaagccatatattgccgctcactttgatgtccttcccactgagttcaccctgggggatgacaagcattatggtggatttacaaacaagcaactccaaagtggtcaagaatatgtcttctttgtgttagcagtaatggaacatgcagagtctaagatgtatgcaaccagcccttactccgaccccgtggtgtcaatggatctggatccgcagccaatcacggatgaagaagaaggcttgatctgggttgtaggtcctgtccttgcagtggtctttatcatctgcattgtcattgctattcttctttataaaaggaagagggcagagtccgactctagaaaaagcagcataccgaacaataaggagatcccttcacaccacccaacagaccctgtagaactgaggcgccttaactttcaaacaccgggtatggctagccatcctccaatacccatcttggaacttgcagaccacattgaaagattgaaagcaaatgacaacttgaagttttcccaggaatatgagtcaattgaccctggccagcagttcacttgggaacattcaaacttggaagtaaacaaaccaaagaatagatacgcgaatgtaatcgcatatgatcattcccgggttctcctatcagctatagaagggatcccaggaagtgactatgtgaatgccaactacatagatgggtataggaagcaaaatgcctatattgcaacacagggatctctccccgaaacatttggggacttttggagaatgatatgggaacaacggagtgccacagttgtcatgatgacaaaactagaagaaagatcaagggtgaagtgtgaccagtattggcctagcagaggcacagaaacccacggactcgttcaagtaacgctgcttgatactgtggagctggccacatattgtgttcgaacatttgcactttacaagaatggttcaagtgagaagagagaagtgagacaattccagttcaccgcctggcctgatcatggtgttccagaacaccctacaccttttctagctttcttacgtagagtcaaaacctgtaaccctcccgatgctggtccgatggttgtgcactgcagtgcgggagttggccggactggttgcttcatcgtcatagatgccatgttagaaagaataaagcatgaaaaaactgtagatatttatggccatgtaactttaatgagagcccagaggaactatatggttcaaacagaagaccaatacatctttatccatgatgcactgttagaagcagtgacttgtggaaataccgaagtgccagctagaaacttgtatgcctacattcagaagctgacacaaatagaaacgggagagaatgtcacaggaatggagctcgaatttaagcgtctagccagctcaaaagctcacacctcaaggtttatcagtgccaatcttccatgtaataaattcaaaaatcgccttgttaatattatgccatatgaatccacaagggtatgcctgcagcctatccgtggagtagaaggatctgattacatcaatgccagttttattgatggatacagacaacagaaagcctacatcgctacccaggggcccttggcagagaccactgaagacttctggcggatgctctgggaacacaattccaccatagttgtgatgctcaccaagctgcgtgaaatgggcagagagaaatgtcaccaatactggccagcagaacggtctgcaagataccagtactttgttgtagatcccatggctgagtacaacatgccacagtatatcctaagggaattcaaggtcacagatgccagggacggccagtcccgaacagtaaggcagttccagttcactgactggccagagcaaggagtgccaaagtccggagaaggatttattgacttcatcggccaagtccataaaacaaaagaacagtttggccaagatggacccatttcagtccattgcagcgcgggcgttggaagaactggagtcttcataacgctaagcattgttttggaaagaatgagatatgaaggagttgtagatatcttccagactgtcaaaatgttaagaacacaacgaccagctatggtacagacagaggatcaatatcagttttcctatcgtgccgcactagagtacctgggcagctttgaccactatgcaacgtagaaacccctgacccattctggatttttactacaggcccttcaatatccatggagtctcttctgagccatacagggcacttgagaagtccttcttaacttctagctaacaactacttagtgggactattacacacaaaacaaattaaaaacaaattattccaggtggaccaagaatctgctttgacatcgccccttcccaccatactgctcataataacattttagggggaaaggggagggaatgtttaaaaagaaagtccttgatttagttttttagtattgtaaagatactgctgacctgtgcttcatttctaactgtgtaaacttttttttaacaaaatgtatcattcgataaagtgaattttaaaaaagttacataactcttcatttttttatttccaaatcgtaggtttttttaagctgtagaactgttatctgtaatatcttgctgtagaaatatcaaatcatttgaaaatttgcacatttttgtgcaaaactcaatctacagtatcagtctcgtcagatatattaattttacacttcagttttgattggtgagaaagtacccattctcttcaaataatcaaagataattattattttgttttgtttttggaatcaacagggaggcgcaaagtataaagttgctgctaacatatatacatatatatccatattttataagggtgtctatgtatatatagacagtgtgtccacacaaaaaatagatacagttatcagtcagtcagttcttccatgatttagtttttttaaacgtagaaaagctattgtaaacatctctttccatttattcttaattttttgacatattggtatttctttaaagggaaatgaggaatgcacatcagtgattgattgtcaaacctcaccccctgatttcctacctaatctacccccacctaaccaatcaatcacatccacaaattgttttgtttgtttgttagtcaggcttccaacaaagttcaatatttctaacactctagtgcaataaaaattattattaaatagctaagaggtgtgcatgtgggaaaggtcagtgcatatccctttaggaggggagaatgttgtaatatatcagctatcgagttgtttaaaaaaagtgtattcaatcgtatattgtctatagtatgtgctatgaaatttgcatttatgatatgtaacaggggcaaagccaaattcatgttactctgttcagtcagaaacattttgtggcatacagcattcctgggaagtgctgtactttgtttcgttttggttttagttttgcatttagagtgccttataattgatgcctattttaatagcatttctttttagcttttggttcgtatttccattcactgttcgtatctgttactttctattaaagcattatctgtttaccac

SEQ ID NO: 6017 - protein, 1254 aa, Homo sapiens; identical to SEQ ID NO: 6015

SEQ ID NO: 6018 - DNA, 7393 bp, Homo sapiens
tgagaccacagcagaatgtgccttggacaaaggtctcagggtggtgaactttttcttcgaattcctaacctgtgagcttacgatgatggtgcctgtccattaactgaacaactgtggttttgaacttcttgaggccagggactgtgtctgaaaacaccgacggtggctaactcaagggagacgtctggtgaacacccgtgggatctaaagaacaagctctgaaagtgttccagctgaaatttcagatcggacagactcgctgcggctccggaggcagtgattccaagctgctcgcgcacgctgctgccaagctgcaggatggtgcacgtagccaggctgctgctgctgctcctcactttcttcctccgcacggatgctgagacacctccaaggtttacacgaacacccgttgatcagacaggggtctctggcggagttgcctctttcatctgccaagctacgggagacccaagacctaaaattgtctggaacaaaaaaggaaagaaagtcagcaatcagagatttgaggtaatagagtttgacgatgggtctggatcagttctcagaatacaacccttacggactccgagggatgaggccatttatgaatgtgtggcctcaaataatgtgggagaaataagtgtatccaccagactcacagttttgcgggaagatcaaattcccaggggcttccctaccattgacatgggcccacagttgaaggtggttgagcgtactcgcacggccaccatgctttgtgcagccagtggtaatccggatccagaaatcacttggtttaaagatttcttacctgtggacacaagcaacaacaatggtcgtattaagcagttacgatcaggagcccttcagattgagcagagtgaagagtctgaccaaggaaaatatgagtgtgttgccaccaacagcgcgggcactcagttcgccgtgtcccaccaagattctctatcccacccactaatcatgaaatcatgccaggcggaagcgttaatatcacctgtgtggccgtggggtcaccaatgccttatgtaaagtggatgttgggggcagaagatctgacacctgaagatgatatgccaataggaagaaatgtgctagaactgaatgatgtaagacagtcagcaaattacacctgtgttgctatgtcaacactgggtgtcattgaagcaatagcacagatcactgtcaaagccttacccaaacctccaggaactcctgtagtgaccgagagcacagctacaagcatcacactgacgtgggactctgggaaccctgagcctgtttcttattacataattcagcataaacctaaaaactctgaggaactttacaaagaaattgatggggtggcgaccacacgctacagtgtcgctggactaagtccctactcggattatgaattcagggttgttgctgtcaataacattgggcgggggcctcccagcgaacctgtgctaacacaaacctcagagcaagcaccatccagtgccccgagggatgtccaggcacgaatgttgagttcgaccaccattttggtacagtggaaggaacctgaagagccaaatggacagatccaaggatatagagtttattatacaatggatcccactcaacatgtcaacaactggatgaaacacaatgtagctgacagccaaatcactactattggcaacttagtgccccagaaaacatattctgtcaaagtcctggcttttacctcaattggagatggtcccctttcaagtgacatacaagtcatcactcagacaggagtaccagggcagccactaaacttcaaagcagaacctgagtctgaaacaagtattttgctctcttggacacctccacgttcagataccattgccaactatgaactggtctacaaagatggggagcatggagaggagcaacgaattaccattgagccagggacatcatataggctgcaaggactgaaaccaaacagcttatactatttccgtctggctgcacgctcccctcaaggcctgggtgcttctactgcagaaatatcagctagaaccatgcagtcaaagccgtcagctcctcctcaagacattagttgcaccagcccaagttccactagtattttggtaagttggcaacctccaccagtggaaaaacagaatggcattatcactgaatactccatcaagtacactgcagtggatggggaagatgacaagcctcacgagattttgggaattccttcggacactaccaaataccttttggaacagctggaaaaatggactgaataccggatcactgtgacagcccatacagatgtcggccctggccctgagagcttgtccgtgttgattcgaaccaatgaagatgttcctagtggtcctcctcgcaaagtcgaggtagaggctgtcaactcaacatctgttaaagtctcatggcgctcacccgtgcccaataaacagcatggccagataagaggatatcaggtgcattatgtgaggatggaaaatggtgagcccaagggccagcccatgctgaaagatgtcatgctggctgatgcacagtgggaatttgatgatactactgaacatgacatgatcatttctgggctccagcctgaaacttcctactccctcaccgtcacagcctacacaaccaaaggagatggtgctcgcagcaagcccaaactggtgtccaccactggggcagttccagggaaacctcggcttgtgattaaccacactcagatgaatactgctcttattcagtggcaccctccggtggacacatttggacctcttcagggctaccgtctaaaatttggccgcaaggatatggagccacttactactcttgagttctctgaaaaagaagatcactttacagctacagacatccacaagggagcatcatacgtcttcaggctctcagccagaaacaaagtgggctttggggaggagatggtgaaggagatttccattccagaagaagtaccaactggattccctcaaaaccttcactcagaaggcaccacttcaacctccgtccagttatcttggcaaccacctgtcctggcagagagaaatggcattatcaccaagtatacccttctttatagggatatcaacatcccccttctcccgatggagcagcttattgttccagctgacaccactatgacactcactggcttaaaaccagataccacatacgatgtaaaagtacgtgctcatacgagcaaagggcccgggccatatagtcccagtgtccagttcaggacactgcctgtggatcaagtgtttgcaaaaaattttcatgtcaaagcagtaatgaagacttccgtgttgctgtcttgggagattccagagaattataactccgccatgcctttcaaaattctttatgatgatgggaaaatggtagaagaagtggatggccgagccacacagaagttaattgtcaacctgaagcctgagaaatcatattcatttgtgctgacaaatcgtggaaacagtgctggtgggctgcagcacagggtcacggcaaagactgcaccagatgtattacgtaccaagcctgccttcattgggaagaccaacttggatggcatgattactgtgcaactgcctgaagtacctgcaaatgagaatataaaaggttactacataataattgtgcctttgaagaaatctcgcgggaaatttatcaagccatgggagagtccagatgaaatggaattagatgagctgcttaaggagatatctaggaagcgcagaagcatccgttatgggagagaagttgaattaaagccatatattgccgctcactttgatgtccttcccactgagttcaccctgggggatgacaagcattatggtggatttacaaacaagcaactccaaagtggtcaagaatatgtcttctttgtgttagcagtaatggaacatgcagagtctaagatgtatgcaaccagcccttactccgaccccgtggtgtcaatggatctggatccgcagccaatcacggatgaagaagaaggcttgatctgggttgtaggtcctgtccttgcagtggtctttatcatctgcattgtcattgctattcttctttataaaaggaagagggcagagtccgactctagaaaaagcagcataccgaacaataaggagatcccttcacaccacccaacagaccctgtagaactgaggcgccttaactttcaaacaccgggtatggctagccatcctccaatacccatcttggaacttgcagaccacattgaaagattgaaagcaaatgacaacttgaagttttcccaggaatatgagtcaattgaccctggccagcagttcacttgggaacattcaaacttggaagtaaacaaaccaaagaatagatacgcgaatgtaatcgcatatgatcattcccgggttctcctatcagctatagaagggatcccaggaagtgactatgtgaatgccaactacatagatgggtataggaagcaaaatgcctatattgcaacacagggatctctccccgaaacatttggggacttttggagaatgatatgggaacaacggagtgccacagttgtcatgatgacaaaactagaagaaagatcaagggtgaagtgtgaccagtattggcctagcagaggcacagaaacccacggactcgttcaagtaacgctgcttgatactgtggagctggccacatattgtgttcgaacatttgcactttacaagaatggttcaagtgagaagagagaagtgagacaattccagttcaccgcctggcctgatcatggtgttccagaacaccctacaccttttctagctttcttacgtagagtcaaaacctgtaaccctcccgatgctggtccgatggttgtgcactgcagtgcgggagttggccggactggttgcttcatcgtcatagatgccatgttagaaagaataaagcatgaaaaaactgtagatatttatggccatgtaactttaatgagagcccagaggaactatatggttcaaacagaagaccaatacatctttatccatgatgcactgttagaagcagtgacttgtggaaataccgaagtgccagctagaaacttgtatgcctacattcagaagctgacacaaatagaaacgggagagaatgtcacaggaatggagctcgaatttaagcgtctagccagctcaaaagctcacacctcaaggtttatcagtgccaatcttccatgtaataaattcaaaaatcgccttgttaatattatgccatatgaatccacaagggtatgcctgcagcctatccgtggagtagaaggatctgattacatcaatgccagttttattgatggatacagacaacagaaagcctacatcgctacccaggggcccttggcagagaccactgaagacttctggcggatgctctgggaacacaattccaccatagttgtgatgctcaccaagctgcgtgaaatgggcagagagaaatgtcaccaatactggccagcagaacggtctgcaagataccagtactttgttgtagatcccatggctgagtacaacatgccacagtatatcctaagggaattcaaggtcacagatgccagggacggccagtcccgaacagtaaggcagttccagttcactgactggccagagcaaggagtgccaaagtccggagaaggatttattgacttcatcggccaagtccataaaacaaaagaacagtttggccaagatggacccatttcagtccattgcagcgcgggcgttggaagaactggagtcttcataacgctaagcattgttttggaaagaatgagatatgaaggagttgtagatatcttccagactgtcaaaatgttaagaacacaacgaccagctatggtacagacagaggatcaatatcagttttcctatcgtgccgcactagagtacctgggcagctttgaccactatgcaacgtagaaacccctgacccattctggatttttactacaggcccttcaatatccatggagtctcttctgagccatacagggcacttgagaagtccttcttaacttctagctaacaactacttagtgggactattacacacaaaacaaattaaaaacaaattattccaggtggaccaagaatctgctttgacatcgccccttcccaccatactgctcataataacattttagggggaaaggggagggaatgtttaaaaagaaagtccttgatttagttttttagtattgtaaagatactgctgacctgtgcttcatttctaactgtgtaaacttttttttaacaaaatgtatcattcgataaagtgaattttaaaaaagttacataactcttcatttttttatttccaaatcgtaggtttttttaagctgtagaactgttatctgtaatatcttgctgtagaaatatcaaatcatttgaaaatttgcacatttttgtgcaaaactcaatctacagtatcagtctcgtcagatatattaattttacacttcagttttgattggtgagaaagtacccattctcttcaaataatcaaagataattattattttgttttgtttttggaatcaacagggaggcgcaaagtataaagttgctgctaacatatatacatatatatccatattttataagggtgtctatgtatatatagacagtgtgtccacacaaaaaatagatacagttatcagtcagtcagttcttccatgatttagtttttttaaacgtagaaaagctattgtaaacatctctttccatttattcttaattttttgacatattggtatttctttaaagggaaatgaggaatgcacatcagtgattgattgtcaaacctcaccccctgatttcctacctaatctacccccacctaaccaatcaatcacatccacaaattgttttgtttgtttgttagtcaggcttccaacaaagttcaatatttctaacactctagtgcaataaaaattattattaaatagctaagaggtgtgcatgtgggaaaggtcagtgcatatccctttaggaggggagaatgttgtaatatatcagctatcgagttgtttaaaaaaagtgtattcaatcgtatattgtctatagtatgtgctatgaaatttgcatttatgatatgtaacaggggcaaagccaaattcatgttactctgttcagtcagaaacattttgtggcatacagcattcctgggaagtgctgtactttgtttcgttttggttttagttttgcatttagagtgccttataattgatgcctattttaatagcatttctttttagcttttggttcgtatttccattcactgttcgtatctgttactttctattaaagcattatctgtttaccac

SEQ ID NO: 6019 - protein, 1665 aa, Homo sapiens; identical to SEQ ID NO: 6011

SEQ ID NO: 6020 - DNA, 7405 bp, Homo sapiens
tgagaccacagcagaatgtgccttggacaaaggtctcagggtggtgaactttttcttcgaattcctaacctgtgagcttacgatgatggtgcctgtccattaactgaacaactgtggttttgaacttcttgaggccagggactgtgtctgaaaacaccgacggtggctaactcaagggagacgtctggtgaacacccgtgggatctaaagaacaagctctgaaagtgttccagctgaaatttcagatcggacagactcgctgcggctccggaggcagtgattccaagctgctcgcgcacgctgctgccaagctgcaggatggtgcacgtagccaggctgctgctgctgctcctcactttcttcctccgcacggatgctgagacacctccaaggtttacacgaacacccgttgatcagacaggggtctctggcggagttgcctctttcatctgccaagctacgggagacccaagacctaaaattgtctggaacaaaaaaggaaagaaagtcagcaatcagagatttgaggtaatagagtttgacgatgggtctggatcagttctcagaatacaacccttacggactccgagggatgaggccatttatgaatgtgtggcctcaaataatgtgggagaaataagtgtatccaccagactcacagttttgcgggaagatcaaattcccaggggcttccctaccattgacatgggcccacagttgaaggtggttgagcgtactcgcacggccaccatgctttgtgcagccagtggtaatccggatccagaaatcacttggtttaaagatttcttacctgtggacacaagcaacaacaatggtcgtattaagcagttacgatcaggagcccttcagattgagcagagtgaagagtctgaccaaggaaaatatgagtgtgttgccaccaacagcgcgggcactcagagctgcgagaagttcgccgtgtcccaccaagattctctatcccacccactaatcatgaaatcatgccaggcggaagcgttaatatcacctgtgtggccgtggggtcaccaatgccttatgtaaagtggatgttgggggcagaagatctgacacctgaagatgatatgccaataggaagaaatgtgctagaactgaatgatgtaagacagtcagcaaattacacctgtgttgctatgtcaacactgggtgtcattgaagcaatagcacagatcactgtcaaagccttacccaaacctccaggaactcctgtagtgaccgagagcacagctacaagcatcacactgacgtgggactctgggaaccctgagcctgtttcttattacataattcagcataaacctaaaaactctgaggaactttacaaagaaattgatggggtggcgaccacacgctacagtgtcgctggactaagtccctactcggattatgaattcagggttgttgctgtcaataacattgggcgggggcctcccagcgaacctgtgctaacacaaacctcagagcaagcaccatccagtgccccgagggatgtccaggcacgaatgttgagttcgaccaccattttggtacagtggaaggaacctgaagagccaaatggacagatccaaggatatagagtttattatacaatggatcccactcaacatgtcaacaactggatgaaacacaatgtagctgacagccaaatcactactattggcaacttagtgccccagaaaacatattctgtcaaagtcctggcttttacctcaattggagatggtcccctttcaagtgacatacaagtcatcactcagacaggagtaccagggcagccactaaacttcaaagcagaacctgagtctgaaacaagtattttgctctcttggacacctccacgttcagataccattgccaactatgaactggtctacaaagatggggagcatggagaggagcaacgaattaccattgagccagggacatcatataggctgcaaggactgaaaccaaacagcttatactatttccgtctggctgcacgctcccctcaaggcctgggtgcttctactgcagaaatatcagctagaaccatgcagtcaaagccgtcagctcctcctcaagacattagttgcaccagcccaagttccactagtattttggtaagttggcaacctccaccagtggaaaaacagaatggcattatcactgaatactccatcaagtacactgcagtggatggggaagatgacaagcctcacgagattttgggaattccttcggacactaccaaataccttttggaacagctggaaaaatggactgaataccggatcactgtgacagcccatacagatgtcggccctggccctgagagcttgtccgtgttgattcgaaccaatgaagatgttcctagtggtcctcctcgcaaagtcgaggtagaggctgtcaactcaacatctgttaaagtctcatggcgctcacccgtgcccaataaacagcatggccagataagaggatatcaggtgcattatgtgaggatggaaaatggtgagcccaagggccagcccatgctgaaagatgtcatgctggctgatgcacagtgggaatttgatgatactactgaacatgacatgatcatttctgggctccagcctgaaacttcctactccctcaccgtcacagcctacacaaccaaaggagatggtgctcgcagcaagcccaaactggtgtccaccactggggcagttccagggaaacctcggcttgtgattaaccacactcagatgaatactgctcttattcagtggcaccctccggtggacacatttggacctcttcagggctaccgtctaaaatttggccgcaaggatatggagccacttactactcttgagttctctgaaaaagaagatcactttacagctacagacatccacaagggagcatcatacgtcttcaggctctcagccagaaacaaagtgggctttggggaggagatggtgaaggagatttccattccagaagaagtaccaactggattccctcaaaaccttcactcagaaggcaccacttcaacctccgtccagttatcttggcaaccacctgtcctggcagagagaaatggcattatcaccaagtatacccttctttatagggatatcaacatcccccttctcccgatggagcagcttattgttccagctgacaccactatgacactcactggcttaaaaccagataccacatacgatgtaaaagtacgtgctcatacgagcaaagggcccgggccatatagtcccagtgtccagttcaggacactgcctgtggatcaagtgtttgcaaaaaattttcatgtcaaagcagtaatgaagacttccgtgttgctgtcttgggagattccagagaattataactccgccatgcctttcaaaattctttatgatgatgggaaaatggtagaagaagtggatggccgagccacacagaagttaattgtcaacctgaagcctgagaaatcatattcatttgtgctgacaaatcgtggaaacagtgctggtgggctgcagcacagggtcacggcaaagactgcaccagatgtattacgtaccaagcctgccttcattgggaagaccaacttggatggcatgattactgtgcaactgcctgaagtacctgcaaatgagaatataaaaggttactacataataattgtgcctttgaagaaatctcgcgggaaatttatcaagccatgggagagtccagatgaaatggaattagatgagctgcttaaggagatatctaggaagcgcagaagcatccgttatgggagagaagttgaattaaagccatatattgccgctcactttgatgtccttcccactgagttcaccctgggggatgacaagcattatggtggatttacaaacaagcaactccaaagtggtcaagaatatgtcttctttgtgttagcagtaatggaacatgcagagtctaagatgtatgcaaccagcccttactccgaccccgtggtgtcaatggatctggatccgcagccaatcacggatgaagaagaaggcttgatctgggttgtaggtcctgtccttgcagtggtctttatcatctgcattgtcattgctattcttctttataaaaggaagagggcagagtccgactctagaaaaagcagcataccgaacaataaggagatcccttcacaccacccaacagaccctgtagaactgaggcgccttaactttcaaacaccgggtatggctagccatcctccaatacccatcttggaacttgcagaccacattgaaagattgaaagcaaatgacaacttgaagttttcccaggaatatgagtcaattgaccctggccagcagttcacttgggaacattcaaacttggaagtaaacaaaccaaagaatagatacgcgaatgtaatcgcatatgatcattcccgggttctcctatcagctatagaagggatcccaggaagtgactatgtgaatgccaactacatagatgggtataggaagcaaaatgcctatattgcaacacagggatctctccccgaaacatttggggacttttggagaatgatatgggaacaacggagtgccacagttgtcatgatgacaaaactagaagaaagatcaagggtgaagtgtgaccagtattggcctagcagaggcacagaaacccacggactcgttcaagtaacgctgcttgatactgtggagctggccacatattgtgttcgaacatttgcactttacaagaatggttcaagtgagaagagagaagtgagacaattccagttcaccgcctggcctgatcatggtgttccagaacaccctacaccttttctagctttcttacgtagagtcaaaacctgtaaccctcccgatgctggtccgatggttgtgcactgcagtgcgggagttggccggactggttgcttcatcgtcatagatgccatgttagaaagaataaagcatgaaaaaactgtagatatttatggccatgtaactttaatgagagcccagaggaactatatggttcaaacagaagaccaatacatctttatccatgatgcactgttagaagcagtgacttgtggaaataccgaagtgccagctagaaacttgtatgcctacattcagaagctgacacaaatagaaacgggagagaatgtcacaggaatggagctcgaatttaagcgtctagccagctcaaaagctcacacctcaaggtttatcagtgccaatcttccatgtaataaattcaaaaatcgccttgttaatattatgccatatgaatccacaagggtatgcctgcagcctatccgtggagtagaaggatctgattacatcaatgccagttttattgatggatacagacaacagaaagcctacatcgctacccaggggcccttggcagagaccactgaagacttctggcggatgctctgggaacacaattccaccatagttgtgatgctcaccaagctgcgtgaaatgggcagagagaaatgtcaccaatactggccagcagaacggtctgcaagataccagtactttgttgtagatcccatggctgagtacaacatgccacagtatatcctaagggaattcaaggtcacagatgccagggacggccagtcccgaacagtaaggcagttccagttcactgactggccagagcaaggagtgccaaagtccggagaaggatttattgacttcatcggccaagtccataaaacaaaagaacagtttggccaagatggacccatttcagtccattgcagcgcgggcgttggaagaactggagtcttcataacgctaagcattgttttggaaagaatgagatatgaaggagttgtagatatcttccagactgtcaaaatgttaagaacacaacgaccagctatggtacagacagaggatcaatatcagttttcctatcgtgccgcactagagtacctgggcagctttgaccactatgcaacgtagaaacccctgacccattctggatttttactacaggcccttcaatatccatggagtctcttctgagccatacagggcacttgagaagtccttcttaacttctagctaacaactacttagtgggactattacacacaaaacaaattaaaaacaaattattccaggtggaccaagaatctgctttgacatcgccccttcccaccatactgctcataataacattttagggggaaaggggagggaatgtttaaaaagaaagtccttgatttagttttttagtattgtaaagatactgctgacctgtgcttcatttctaactgtgtaaacttttttttaacaaaatgtatcattcgataaagtgaattttaaaaaagttacataactcttcatttttttatttccaaatcgtaggtttttttaagctgtagaactgttatctgtaatatcttgctgtagaaatatcaaatcatttgaaaatttgcacatttttgtgcaaaactcaatctacagtatcagtctcgtcagatatattaattttacacttcagttttgattggtgagaaagtacccattctcttcaaataatcaaagataattattattttgttttgtttttggaatcaacagggaggcgcaaagtataaagttgctgctaacatatatacatatatatccatattttataagggtgtctatgtatatatagacagtgtgtccacacaaaaaatagatacagttatcagtcagtcagttcttccatgatttagtttttttaaacgtagaaaagctattgtaaacatctctttccatttattcttaattttttgacatattggtatttctttaaagggaaatgaggaatgcacatcagtgattgattgtcaaacctcaccccctgatttcctacctaatctacccccacctaaccaatcaatcacatccacaaattgttttgtttgtttgttagtcaggcttccaacaaagttcaatatttctaacactctagtgcaataaaaattattattaaatagctaagaggtgtgcatgtgggaaaggtcagtgcatatccctttaggaggggagaatgttgtaatatatcagctatcgagttgtttaaaaaaagtgtattcaatcgtatattgtctatagtatgtgctatgaaatttgcatttatgatatgtaacaggggcaaagccaaattcatgttactctgttcagtcagaaacattttgtggcatacagcattcctgggaagtgctgtactttgtttcgttttggttttagttttgcatttagagtgccttataattgatgcctattttaatagcatttctttttagcttttggttcgtatttccattcactgttcgtatctgttactttctattaaagcattatctgtttaccac

SEQ ID NO: 6021 - protein, 1665 aa, Homo sapiens; identical to SEQ ID NO: 6011

SEQ ID NO: 6022 - DNA, 7378 bp, Homo sapiens
tgagaccacagcagaatgtgccttggacaaaggtctcagggtggtgaactttttcttcgaattcctaacctgtgagcttacgatgatggtgcctgtccattaactgaacaactgtggttttgaacttcttgaggccagggactgtgtctgaaaacaccgacggtggctaactcaagggagacgtctggtgaacacccgtgggatctaaagaacaagctctgaaagtgttccagctgaaatttcagatcggacagactcgctgcggctccggaggcagtgattccaagctgctcgcgcacgctgctgccaagctgcaggatggtgcacgtagccaggctgctgctgctgctcctcactttcttcctccgcacggatgctgagacacctccaaggtttacacgaacacccgttgatcagacaggggtctctggcggagttgcctctttcatctgccaagctacgggagacccaagacctaaaattgtctggaacaaaaaaggaaagaaagtcagcaatcagagatttgaggtaatagagtttgacgatgggtctggatcagttctcagaatacaacccttacggactccgagggatgaggccatttatgaatgtgtggcctcaaataatgtgggagaaataagtgtatccaccagactcacagttttgcgggaagatcaaattcccaggggcttccctaccattgacatgggcccacagttgaaggtggttgagcgtactcgcacggccaccatgctttgtgcagccagtggtaatccggatccagaaatcacttggtttaaagatttcttacctgtggacacaagcaacaacaatggtcgtattaagcagttacgatcaggagcccttcagattgagcagagtgaagagtctgaccaaggaaaatatgagtgtgttgccaccaacagcgcgggcactcagagctgcgagaagttcgccgtgtcccaccaagattctctatcccacccactaatcatgaaatcatgccaggcggaagcgttaatatcacctgtgtggccgtggggtcaccaatgccttatgtaaagtggatgttgggggcagaagatctgacacctgaagatgatatgccaataggaagaaatgtgctagaactgaatgatgtaagacagtcagcaaattacacctgtgttgctatgtcaacactgggtgtcattgaagcaatagcacagatcactgtcaaagccttacccaaacctccaggaactcctgtagtgaccgagagcacagctacaagcatcacactgacgtgggactctgggaaccctgagcctgtttcttattacataattcagcataaacctaaaaactctgaggaactttacaaagaaattgatggggtggcgaccacacgctacagtgtcgctggactaagtccctactcggattatgaattcagggttgttgctgtcaataacattgggcgggggcctcccagcgaacctgtgctaacacaaacctcagagcaagcaccatccagtgccccgagggatgtccaggcacgaatgttgagttcgaccaccattttggtacagtggaaggaacctgaagagccaaatggacagatccaaggatatagagtttattatacaatggatcccactcaacatgtcaacaactggatgaaacacaatgtagctgacagccaaatcactactattggcaacttagtgccccagaaaacatattctgtcaaagtcctggcttttacctcaattggagatggtcccctttcaagtgacatacaagtcatcactcagacaggagtaccagggcagccactaaacttcaaagcagaacctgagtctgaaacaagtattttgctctcttggacacctccacgttcagataccattgccaactatgaactggtctacaaagatggggagcatggagaggagcaacgaattaccattgagccagggacatcatataggctgcaaggactgaaaccaaacagcttatactatttccgtctggctgcacgctcccctcaaggcctgggtgcttctactgcagaaatatcagctagaaccatgcagtcaaagccgtcagctcctcctcaagacattagttgcaccagcccaagttccactagtattttggtaagttggcaacctccaccagtggaaaaacagaatggcattatcactgaatactccatcaagtacactgcagtggatggggaagatgacaagcctcacgagattttgggaattccttcggacactaccaaataccttttggaacagctggaaaaatggactgaataccggatcactgtgacagcccatacagatgtcggccctggccctgagagcttgtccgtgttgattcgaaccaatgaagatgttcctagtggtcctcctcgcaaagtcgaggtagaggctgtcaactcaacatctgttaaagtctcatggcgctcacccgtgcccaataaacagcatggccagataagaggatatcaggtgcattatgtgaggatggaaaatggtgagcccaagggccagcccatgctgaaagatgtcatgctggctgatgcacaggacatgatcatttctgggctccagcctgaaacttcctactccctcaccgtcacagcctacacaaccaaaggagatggtgctcgcagcaagcccaaactggtgtccaccactggggcagttccagggaaacctcggcttgtgattaaccacactcagatgaatactgctcttattcagtggcaccctccggtggacacatttggacctcttcagggctaccgtctaaaatttggccgcaaggatatggagccacttactactcttgagttctctgaaaaagaagatcactttacagctacagacatccacaagggagcatcatacgtcttcaggctctcagccagaaacaaagtgggctttggggaggagatggtgaaggagatttccattccagaagaagtaccaactggattccctcaaaaccttcactcagaaggcaccacttcaacctccgtccagttatcttggcaaccacctgtcctggcagagagaaatggcattatcaccaagtatacccttctttatagggatatcaacatcccccttctcccgatggagcagcttattgttccagctgacaccactatgacactcactggcttaaaaccagataccacatacgatgtaaaagtacgtgctcatacgagcaaagggcccgggccatatagtcccagtgtccagttcaggacactgcctgtggatcaagtgtttgcaaaaaattttcatgtcaaagcagtaatgaagacttccgtgttgctgtcttgggagattccagagaattataactccgccatgcctttcaaaattctttatgatgatgggaaaatggtagaagaagtggatggccgagccacacagaagttaattgtcaacctgaagcctgagaaatcatattcatttgtgctgacaaatcgtggaaacagtgctggtgggctgcagcacagggtcacggcaaagactgcaccagatgtattacgtaccaagcctgccttcattgggaagaccaacttggatggcatgattactgtgcaactgcctgaagtacctgcaaatgagaatataaaaggttactacataataattgtgcctttgaagaaatctcgcgggaaatttatcaagccatgggagagtccagatgaaatggaattagatgagctgcttaaggagatatctaggaagcgcagaagcatccgttatgggagagaagttgaattaaagccatatattgccgctcactttgatgtccttcccactgagttcaccctgggggatgacaagcattatggtggatttacaaacaagcaactccaaagtggtcaagaatatgtcttctttgtgttagcagtaatggaacatgcagagtctaagatgtatgcaaccagcccttactccgaccccgtggtgtcaatggatctggatccgcagccaatcacggatgaagaagaaggcttgatctgggttgtaggtcctgtccttgcagtggtctttatcatctgcattgtcattgctattcttctttataaaaggaagagggcagagtccgactctagaaaaagcagcataccgaacaataaggagatcccttcacaccacccaacagaccctgtagaactgaggcgccttaactttcaaacaccgggtatggctagccatcctccaatacccatcttggaacttgcagaccacattgaaagattgaaagcaaatgacaacttgaagttttcccaggaatatgagtcaattgaccctggccagcagttcacttgggaacattcaaacttggaagtaaacaaaccaaagaatagatacgcgaatgtaatcgcatatgatcattcccgggttctcctatcagctatagaagggatcccaggaagtgactatgtgaatgccaactacatagatgggtataggaagcaaaatgcctatattgcaacacagggatctctccccgaaacatttggggacttttggagaatgatatgggaacaacggagtgccacagttgtcatgatgacaaaactagaagaaagatcaagggtgaagtgtgaccagtattggcctagcagaggcacagaaacccacggactcgttcaagtaacgctgcttgatactgtggagctggccacatattgtgttcgaacatttgcactttacaagaatggttcaagtgagaagagagaagtgagacaattccagttcaccgcctggcctgatcatggtgttccagaacaccctacaccttttctagctttcttacgtagagtcaaaacctgtaaccctcccgatgctggtccgatggttgtgcactgcagtgcgggagttggccggactggttgcttcatcgtcatagatgccatgttagaaagaataaagcatgaaaaaactgtagatatttatggccatgtaactttaatgagagcccagaggaactatatggttcaaacagaagaccaatacatctttatccatgatgcactgttagaagcagtgacttgtggaaataccgaagtgccagctagaaacttgtatgcctacattcagaagctgacacaaatagaaacgggagagaatgtcacaggaatggagctcgaatttaagcgtctagccagctcaaaagctcacacctcaaggtttatcagtgccaatcttccatgtaataaattcaaaaatcgccttgttaatattatgccatatgaatccacaagggtatgcctgcagcctatccgtggagtagaaggatctgattacatcaatgccagttttattgatggatacagacaacagaaagcctacatcgctacccaggggcccttggcagagaccactgaagacttctggcggatgctctgggaacacaattccaccatagttgtgatgctcaccaagctgcgtgaaatgggcagagagaaatgtcaccaatactggccagcagaacggtctgcaagataccagtactttgttgtagatcccatggctgagtacaacatgccacagtatatcctaagggaattcaaggtcacagatgccagggacggccagtcccgaacagtaaggcagttccagttcactgactggccagagcaaggagtgccaaagtccggagaaggatttattgacttcatcggccaagtccataaaacaaaagaacagtttggccaagatggacccatttcagtccattgcagcgcgggcgttggaagaactggagtcttcataacgctaagcattgttttggaaagaatgagatatgaaggagttgtagatatcttccagactgtcaaaatgttaagaacacaacgaccagctatggtacagacagaggatcaatatcagttttcctatcgtgccgcactagagtacctgggcagctttgaccactatgcaacgtagaaacccctgacccattctggatttttactacaggcccttcaatatccatggagtctcttctgagccatacagggcacttgagaagtccttcttaacttctagctaacaactacttagtgggactattacacacaaaacaaattaaaaacaaattattccaggtggaccaagaatctgctttgacatcgccccttcccaccatactgctcataataacattttagggggaaaggggagggaatgtttaaaaagaaagtccttgatttagttttttagtattgtaaagatactgctgacctgtgcttcatttctaactgtgtaaacttttttttaacaaaatgtatcattcgataaagtgaattttaaaaaagttacataactcttcatttttttatttccaaatcgtaggtttttttaagctgtagaactgttatctgtaatatcttgctgtagaaatatcaaatcatttgaaaatttgcacatttttgtgcaaaactcaatctacagtatcagtctcgtcagatatattaattttacacttcagttttgattggtgagaaagtacccattctcttcaaataatcaaagataattattattttgttttgtttttggaatcaacagggaggcgcaaagtataaagttgctgctaacatatatacatatatatccatattttataagggtgtctatgtatatatagacagtgtgtccacacaaaaaatagatacagttatcagtcagtcagttcttccatgatttagtttttttaaacgtagaaaagctattgtaaacatctctttccatttattcttaattttttgacatattggtatttctttaaagggaaatgaggaatgcacatcagtgattgattgtcaaacctcaccccctgatttcctacctaatctacccccacctaaccaatcaatcacatccacaaattgttttgtttgtttgttagtcaggcttccaacaaagttcaatatttctaacactctagtgcaataaaaattattattaaatagctaagaggtgtgcatgtgggaaaggtcagtgcatatccctttaggaggggagaatgttgtaatatatcagctatcgagttgtttaaaaaaagtgtattcaatcgtatattgtctatagtatgtgctatgaaatttgcatttatgatatgtaacaggggcaaagccaaattcatgttactctgttcagtcagaaacattttgtggcatacagcattcctgggaagtgctgtactttgtttcgttttggttttagttttgcatttagagtgccttataattgatgcctattttaatagcatttctttttagcttttggttcgtatttccattcactgttcgtatctgttactttctattaaagcattatctgtttaccac

SEQ ID NO: 6023 - protein, 1656 aa, Homo sapiens; identical to SEQ ID NO: 6009

SEQ ID NO: 6024 - DNA, 2401 bp, Homo sapiens
cggcgccgccagccagcctcggcggggagagtgcagtttattctgggcctgtgtggaatagaaagacaattctttatttgactggtaggaaagaaaagagaagactcctcagggtttccaaggaggactggagcggctgctttagtgaagaagtgaagaatcaaggaagtaaaggacctgtctcaaagtcacacaactaggaaatcttgaggagtctgatacttttcatcctccagctataaaatcatcttgtagggggaagctgtacattggtggaaaataaaaggcaagcagttcctggcccgtgatattccagttagaggtgtctgactgacagcatgttggcaccgagggaagcgatgggcttcggctccaggtttctgtcctgagaccacagcagaatgtgccttggacaaaggcttggactccttgatcttctggtaacttcaaaaatctggtctcagggtggtgaactttttcttcgaattcctaacctgtgagcttacgaaaaagggagcatgcctgtcttattctcagtgcctcatgggaaataaaagattgggagatgatagctacctgatgatggtgcctgtccattaactgaacaactgtggttttgaacttcttgaggccagggactgtgtctgaaaacaccgacggtggctaactcaagggagacgtctggtgaacacccgtgggatctaaagaacaagctctgaaagtgttccagctgaaatttcagatcggacagactcgctgcggctccggaggcagtgattccaagctgctcgcgcacgctgctgccaagctgcaggatggtgcacgtagccaggctgctgctgctgctcctcactttcttcctccgcacggatgctgagacacctccaaggtttacacgaacacccgttgatcagacaggggtctctggcggagttgcctctttcatctgccaagctacgggagacccaagacctaaaattgtctggaacaaaaaaggaaagaaagtcagcaatcagagatttgaggtaatagagtttgacgatgggtctggatcagttctcagaatacaacccttacggactccgagggatgaggccatttatgaatgtgtggcctcaaataatgtgggagaaataagtgtatccaccagactcacagttttgcgggaagatcaaattcccaggggcttccctaccattgacatgggcccacagttgaaggtggttgagcgtactcgcacggccaccatgctttgtgcagccagtggtaatccggatccagaaatcacttggtttaaagatttcttacctgtggacacaagcaacaacaatggtcgtattaagcagttacgatcaggtactgatttttctccctcttctctttctctgttacttaatgggtggtccatgtttgtgatgtcatagcctgtttcagagtctgtctttctccttttctctgtgtgttttgcagcttctgtttaatccacattgctcactgctgtgactgtatttttggtaattttttaatttactgctttttcgcagtatttgatggatccattttctcctctttctttcttctttctctgttttcttttgaaacaaatttatttcaacattggacttcattcagaacttgcaaggagatccaatggttgtatccattaaaaaataaaatgttcatattaaaccctaaaatgtttcaattttattaaagtatgttttctgctatcttttctacatttgaactcatcaaagtaccaaagtttagtaagtctgggcacatctgctttcttttcactaatacataaaaacacagaaacgttatctcatgagtaaccagatgtatgtttttaaaagtctttagaaaataccagtaaaaggaggggatttttattaatactatgataataacattgtgagtgaacattttctacacattagccacagtagtgtgcgcccgtcaaggtttttgaaccctccagtgactggatctacagaagtctgcttttggtgtagactccagcttttgctgttttctctctctctttacccttttctccttttcccattcccatcccaagtttatgcctttgctctcttagattaaaagtagagataattctaaatttcttaagttttagagcctgtccctaggtaatttcacagggatatataataataagctgtttactttgacattggtagtaatattggtatagaattctaagttgtttaactgcctgtcttcccagaattctcagcttttgacctgtcctgtgatgttaaagcgtcttgttaactgcctcttttgcttgttgtcagcagaattgtgtagattagcattctgttattgtaaatgaagaattaattattcacatgtaacatagatgatttagtat

SEQ ID NO: 6025 - protein, 202 aa, Homo sapiens
MVHVARLLLLLLTFFLRTDAETPPRFTRTPVDQTGVSGGVASFICQATGDPRPKIVWNKKGKKVSNQRFEVIEFDDGSGSVLRIQPLRTPRDEAIYECVASNNVGEISVSTRLTVLREDQIPRGFPTIDMGPQLKVVERTRTATMLCAASGNPDPEITWFKDFLPVDTSNNNGRIKQLRSGTDFSPSSLSLLLNGWSMFVMS

SEQ ID NO: 6026 - DNA, 717 bp, Homo sapiens
agattcacaggtacatgtggacgtttgttacctgggcatactgcatgacgccgaggcttgggatatgaatcatctcatctcccagcccctggcaaccaccatcgtactctctgcatctgtatgttcagctttttggattccatacaagacatcttcaaatcaattgatggaagattgagagaaagagaacttcaggtccaggtgctgtggctcatgcctgtaatcccagcactttgggtgactgagaatttcagaagagaaagagtctctcagcatttctcactggacatgcctgaagaagcatgtagtcttaattgctactgacatcatcccataaccacaatggaaaaggactggagatattgtctgagagctcttgttatgtgctaaccatcctgttggacaatgggaacaaagatatgagactccttcaaggaaggactcaagctaccaaaggtaaagctttgaaaaactattacaggcatttcttgaaaacagtatggaatcatctgataacactgaggtgatatgaatactcctttaaccggcaatgtggctcttaggaactgatgggcatgcacatcaggatatacacaaaagatttcccagcagcactgtttgtaatagccttgagctagaaacaataaatgtccaccaagagtaaaatgtataaaatatacaatggaataccagacatcaatgaaaatgaataaacta

SEQ ID NO: 6027 - protein, 67 aa, Homo sapiens [sequence omitted]

SEQ ID NO: 6028 - DNA, 553 bp, Homo sapiens
agtgctccaggaggcagagaaaatgaaggaaaacagctttctacagctcttacccccacaacccccatctctctgtaacttaatttttcttctcaagtttcgaacaagtacagatagaacaacttgttttctaatctttttctctttttctcattcctcttctttctttattcttcttttcccccctctttttgtttccttttcctgactcttgaaaaccatggcaagtgcttattatttcagttgaatatgttaaaaattgttatcaagaagttgattttttgtgtataaaaatggtgaactaagatactgttaaaagagtggaataaatgaagaggagagacagaagaaccaaagatgggaaaaggactggaaaagaaaaagagactaaaaggaagaggctgaaaacttaaaaaattggatgaaaattatgaagatagtctgacatgatatattaagagctctgaatgatgcctagggatgtagaagaggagaaaaacacttgaggaagagagaccaaagagaattctactttgaccctggcttaagagtg

SEQ ID NO: 6029 - protein, 61 aa, Homo sapiens
MKENSFLQLLPPQPPSLCNLIFLLKFRTSTDRTTCFLIFFSFSHSSSFFILLFPPLFVSFS

SEQ ID NO: 6030 - DNA, 621 bp, Homo sapiens
ctcggacaatgcacacaaaagcctggttaaggagcacttccaaagtcattccttcctcaccccaccaatgaccactatgcataaaggaaaagccaagtttgagaaggagaatttcttagatgtcctggacgtgctcatcctcaccctctctagaagattcaagatgaagaaactgggagactacagctcagtataagtagaaatagtgagaggtgaccacgggctagcagccctggctcgctctcagcacctcctcagtcttgtcgtctgctctggccatgctcgaggagccctttagcccaccactacactgttggagcccctctctgggctagctgaggctggagccggctccctctgcttgtgggaaggagtggagggacaggcacaggcgggaaccggggctgcgcaccacgtttgcggaccagggcaagttccgggtgggcgtgggctcggcgggcctcacactcacagctgccggccagcgcctcgggccctgtgcagtgagggtcttagcaccctggccagcagctgcggagggggcgctgggtcctcgaacactgacagcccacccccaccacgcttgaattctcgccgggcctcagccgcctccccgcgggg

SEQ ID NO: 6031 - protein, 42 aa, Homo sapiens
MTTMHKGKAKFEKENFLDVLDVLILTLSRRFKMKKLGDYSSV

SEQ ID NO: 6032 - DNA, 2322 bp, Homo sapiens
attaacttagcgcccggggtctctgccaggctcacgggacagctgcacctctcagcgtctccagctccaggacgcggtcgtcccaactccttccgagtggaaagagtgtaaaacttttgtccgtgcgcgggtggagctcagtaggaccacggcgcgtcctgccccggcttccccagcctcccagcagggttagctgcggtcagcgcactttccacttgggactcccggccagaaatttctcgggaatggagcggtcacagtgtggcagcagagaccgaggcgttagcggccgacctcacttggcccctgggctagtggtggctgcccctccgcccccgtccccggcgttgccggtaccatcggggatgcaggttcccccagcgttcctgcggccgcccagcctctttctgcgagcagcggccgcggccgccgccgccgctgccgccacctcgggaagcggaggctgcccgccggctcccgggctggagagcggggtaggcgcggtgggctgcggctacccgcggacgcccaagtgcgcccgctgtcgtaaccatggtgtggtgtcagcgctcaagggccacaagcgcttctgccgctggcgggactgcgcgtgtgccaagtgcaccctgatcgccgagcgccagcgcgtcatggccgcccaggtggcgctgcgcaggcagcaggcgcaggaggagagcgaagcccgggggctacagaggctcctgtgctcggggctctcctggccccccggtggtcgggcatccgggggcggcggcagagccgagaatccacagtccacgggcggccctgcggcgggggctgcgctgggactgggtgccttgagacaggccagtggttccgcgacccccgctttcgaagttttccagcaagattatcctgaggaaaaacaagaacaaaaagagagtaaatgtgagtcatgccagaatggacaagaagaactgatctccaaatcccatcagctttacctaggatcatcttctaggtctaatggtgtcattgggaaacaaagtatcgggtcatctatttcagaatactccaacaagcctgatagtatcctgtctcctcatcctggagagcaatcaggaggtgaagagagtcccaggtccttatcatcctctgatctggaatcaggaaatgaaagtgaatgggtcaaagacttgactgcgaccaaggcaagccttccgacagtgtcctcaagaccaagagatcctcttgatatccttactaagattttcccaaattacaggcgcagccggctagaaggcattctacggttctgcaaaggggatgtggtccaagccattgaacaggttttaaatggcaaagaacacaagccagacaacaggaacctagcaaactcagaagaactggaaaacacagcctttcagagagcttcaagttttagtcttgctggaattggttttggaactctaggtaataaatcagctttctctcctcttcaaactacttctgcttcttatggaggtgattcaagtctctacggcgtaaatcctagagtaggtatcagtccattaaggctggcatattcttctgcaggaagagggttatctggttttatgtcaccctacctaacacctgggttagtaccaaccttaccttttcggccagctttggattatgccttttcagggatgattagagattcttcctacctttccagtaaagactcaataacttgtggcagactgtacttcagaccaaatcaggacaatccgtaatgtatatgcccattctctctttctggagtttttccagcatacaatacatgcacgtgcacacacatacacacacatccattaatatacttcagtaagtatgtgagtggattatgaggtcttaaaatgctgggttttttttttttcaagcaatataataggtcttagatctgaaaactcttcattaggatttatcaagtgaaagaagtaaatctgaacattatatgtgccttgaataaagctatttcaggaaatatttaatgaattttctccctaaattatcatttgtaaacatttttattttaaaactagtttttattttattgaaaagtggaatttttagtgataaaatacatttgtaagtgtaaagcaatacagcataatagaatagaatataaaccgaaaggaagaactgaacaattaaggcaattctaaataattaccatttcaaaactgtttcttctattcctggttcataggaaagaaaaaagttattcaaagtatttttaaagcatttgatttgcagatgggtgattcgtaataaataaaacatttgagcattttg

SEQ ID NO: 6033 - protein, 504 aa, Homo sapiens
MERSQCGSRDRGVSGRPHLAPGLVVAAPPPPSPALPVPSGMQVPPAFLRPPSLFLRAAAAAAAAAAATSGSGGCPPAPGLESGVGAVGCGYPRTPKCARCRNHGVVSALKGHKRFCRWRDCACAKCTLIAERQRVMAAQVALRRQQAQEESEARGLQRLLCSGLSWPPGGRASGGGGRAENPQSTGGPAAGAALGLGALRQASGSATPAFEVFQQDYPEEKQEQKESKCESCQNGQEELISKSHQLYLGSSSRSNGVIGKQSIGSSISEYSNKPDSILSPHPGEQSGGEESPRSLSSSDLESGNESEWVKDLTATKASLPTVSSRPRDPLDILTKIFPNYRRSRLEGILRFCKGDVVQAIEQVLNGKEHKPDNRNLANSEELENTAFQRASSFSLAGIGFGTLGNKSAFSPLQTTSASYGGDSSLYGVNPRVGISPLRLAYSSAGRGLSGFMSPYLTPGLVPTLPFRPALDYAFSGMIRDSSYLSSKDSITCGRLYFRPNQDNP

SEQ ID NO: 6034 - DNA, 3240 bp, Homo sapiens
aatttagagaagatgtagggagtgttcaacatgttcgttgtggaagagaaagagctaagagagaggagcttaaagacacaaacgggtagaatcaaggagtgtgctctcaaatgagaggaacaggagtgacattaaccttgaaatgctcggagactctactccttcatgacagtaggaggataattaacaatagatacaaatgcaggaattgatgagtgccatcagaaagctgtatcatgagctgcctgcacttctaaagtgtccagtggatttttaatcacatgagcctggaaatagggttatgagaagaagctcagagcagagcaccgaaagtggccactaccagcatgaagagcccaacaattcaaactggtgaagtgagaaaaacagaatgcagctttcaaggttcgtttcaagcagttggcttgtgggactctgagagatgctgctgcccatgacatgcgggaattatcatgatcaactacccagcttggatttcacccagtggccaagagctttgtgtgggagacggcaagggttggatttttcaaaagagtaaaccaggataaatcatgaggaacctataacccttttggccacatgcaaaaaagcaagacccgtgaccaaggtgtagactaagaagtggagtcatgcttcacacggccatatcatgctggcagccattcctgggtctggctgtggtgttaatcttcatgggatccaccattggctgccccgctcgctgtgagtgctctgcccagaacaaatctgttagctgtcacagaaggcgattgatcgccatcccagagggcattcccatcgaaaccaaaatcttggacctcagtaaaaacaggctaaaaagcgtcaaccctgaagaattcatatcatatcctctgctggaagagatagacttgagtgacaacatcattgccaatgtggaaccaggagcattcaacaatctctttaacctgcgttccctccgcctaaaaggcaatcgtctaaagctggtccctttgggagtattcacggggctgtccaatctcactaagcttgacattagtgagaataagattgtcattttactagactacatgttccaagatctacataacctgaagtctctagaagtgggggacaatgatttggtttatatatcacacagggcattcagtgggcttcttagcttggagcagctcaccctggagaaatgcaacttaacagcagtaccaacagaagccctctcccacctccgcagcctcatcagcctgcatctgaagcatctcaatatcaacaatatgcctgtgtatgcctttaaaagattgttccacctgaaacacctagagattgactattggcctttactggatatgatgcctgccaatagcctctacggtctcaacctcacatccctttcagtcaccaacaccaatctgtctactgtacccttccttgcctttaaacacctggtatacctgactcaccttaacctctcctacaatcccatcagcactattgaagcaggcatgttctctgacctgatccgccttcaggagcttcatatagtgggggcccagcttcgcaccattgagcctcactccttccaagggctccgcttcctacgcgtgctcaatgtgtctcagaacctgctggaaactttggaagagaatgtcttctcctcccctagggctctggaggtcttgagcattaacaacaaccctctggcctgtgactgccgccttctctggatcttgcagcgacagcccaccctgcagtttggtggccagcaacctatgtgtgctggcccagacaccatccgtgagaggtctttcaaggatttccatagcactgccctttctttttactttacctgcaaaaaacccaaaatccgtgaaaagaagttgcagcatctgctagtagatgaagggcagacagtccagctagaatgcagtgcagatggagacccgcagcctgtgatttcctgggtgacaccccgaaggcgtttcatcaccaccaagtccaatggaagagccaccgtgttgggtgatggcaccttggaaatccgctttgcccaggatcaagacagcgggatgtatgtttgcatcgctagcaatgctgctgggaatgataccttcacagcctccttaactgtgaaaggattcgcttcagatcgttttctttatgcgaacaggacccctatgtacatgaccgactccaatgacaccatttccaatggcaccaatgccaatactttttccctggaccttaaaacaatactggtgtctacagctatgggctgcttcacattcctgggagtggttttattttgttttcttctcctttttgtgtggagccgagggaaaggcaagcacaaaaacagcattgaccttgagtatgtgcccagaaaaaacaatggtgctgttgtggaaggggaggtagctggacccaggaggttcaacatgaaaatgatttgaaggcccacccctcacattactgtctctttgtcaatgtgggtaatcagtaagacagtatggcacagtaaattactagattaagaggcagccatgtgcagctgcccctgtatcaaaagcagggtctatggaagcaggaggacttccaatggagactctccatcgaaaggcaggcaggcaggcatgtgtcagagcccttcacacagtgggatactaagtgtttgcgttgcaaatattggcgttctggggatctcagtaatgaacctgaatatttggctcacactcacggacaattattcagcattttctaccactgcaaaaaacaaaagaaaaaataaaaaagaacaacctacagtgtaggatttacatattaaaaagacacatttgtctaaaacatactctacagaaaaatttgtatctatgattatcatttgttaaagccttgcatcataccatattgttggttcagtaccacaaagagatcaatatattcttttcttccttttttgaaacatatatgctgtacatgttttaaagcaatatgaatgagaggttgtgcttttagttactcaccactatagatccaagtgtgatttcaccttccgttacctacagatgaccctgagactagatccctggagttatgggcggagatattttgagagatgtgtttgtctgatgtaggatgccaagaaacaggacccaaggcaaaactgctcaactctgttaacttctgttactataaataaaggcatgtgcctagttttgatac

SEQ ID NO: 6035 - protein, 36 aa, Homo sapiens
MKSPTIQTGEVRKTECSFQGSFQAVGLWDSERCCCP

SEQ ID NO: 6036 - DNA, 573 bp, Homo sapiens
gctttacacatttatggctagcctttcagccctgccttgctgagttacaagtgaagtgagaaaaacagaatgcagctttcaaggttcgtttcaagcagttggcttgtgggactctgagagatgctgctgcccatgacatgcgggaattatcatgatcaactacccagcttggatttcacccagtggccaagagctttgtgtgggagacggcaagggttggatttttcaaaagagtaaaccaggtggatacatttgcaaagtggaatcctccaggtgcctttaaggagtttacagtctagtaggaactgcagaaagaattgaaaagaaaataacggcaatgaaagccccattctttagccagaaatatcctttcacctaacaatctgacaactagttaaaaccctatcatcttccaatttcatgtgctaagaggataaaggataaatcatgaggaacctataacccttttggccacatgcaaaaaagcaagacccgtgaccaaggtgtagactaagaagtggagtcatgcttcacacggccatatcatgctggcagccattcctgggtctggct

SEQ ID NO: 6037 - protein, 43 aa, Homo sapiens
MINYPAWISPSGQELCVGDGKGWIFQKSKPGGYICKVESSRCL

SEQ ID NO: 6038 - DNA, 887 bp, Homo sapiens
agctcctgagaagctgaggccctgactcatttttctagcatggcatttgggtactcttcacccaaaaagagattcctaagtataactcttggccggcctggatgtctcatcacagaaacagcctatccagtcgtacctcttcagtcctcagactgggtcctgcccatgtgaatggatctaggattacttccctgactcttcccaactcacttgacctatctgcctgacttgatactgtgagatggatagctgaactctaaggaaatggaaaattggaagcgctcttaggtgtttgatttatgtatcaactgtatgagctccaataactcaagacaactctggatgaagctcgttctctgatcttggcctaaattcttattctgatggtggaggtcaaggaggcaacatgcctttgtttatactgatatgacctcatcagaagataaacacctgaagatgcagcagctcctgacttgcacatttataaatagctcctatttattaatggccatcctctcttcaaccacctgctaaagttgaaccacctgcacggcaattacaaagatgactgggccagagggtatgggaagacgcctgagatgactatctttcctgcaattttgcctgggaaaagctctgcttccggaaaaaaaattactgttatcttctctatcaccaaaaattgggacaatcaaattttttctaacccttttggatataagaggcagttaaaaaaaagtgacggagatttcctagacattcttatgttttctatagacaatgtttggagtatggtgacaagccaaggaaaatgcagaaatggtcactataactatagcacctgcttctatattcccataattaataaataatgctattcctactgt

SEQ ID NO: 6039 - protein, 35 aa, Homo sapiens
MTSSEDKHLKMQQLLTCTFINSSYLLMAILSSTTC

SEQ ID NO: 6040 - DNA, 1322 bp, Homo sapiens
agatgcccagtgtgcacccggccacagagaagtgggtgacttaggagtatcctctccgcttctgacccttggtttcgtctgtgcacaactcactcaaaatgggcaactcattaagcatattttgttcctggttccgccacaggtcctggccatgccattggcaacctgctcgtcttgtccatgaggccttcccagctggccgggctaaccccgcggctcctgcacctgtgcctgcccggggaatcgtgggccgtttcccactcctcttcaaccctcagcgacatcttgggccttcttttccagtcagttgggacggcgcccctatgaggctgtgtcttatccctcggaacatgggcaccccacagagggtcctgtctcctgtggtctggagccccgcctcaaggaagaaacccatgctgtctgctcacaactccaggatgtttggacacctcagccccgtgaggattcctcatctcagaggcaagtttaaccttcaacttccttcattagatgagcaggtgatcccagccaggctcccgaagatggaggtgagggcagaagagcccagagaagcaacggaggtgacagaccaggtagagacccaggggcaggaggacaataaaaggggcccctgtagcaatggggaagcagcttccacctctaggcccctggagactcagggaaacttcacttcctcctggtacaatcccaggcccttggagggaaatgtccacctcaagagcttgacagaaaacaaccagactgacaaggcccaggtgcctgcagtgagtttctactccaacggccatggagtcgccagttcacacagccctgctggaggcatccttccctttgggaagcctgacccacttccaacagtgctccctgccccagttccaggctgctccctgtggccagagaaggcggccttgaaggtgctgggtaaagaccacctgcccagctctccaggcttgctgatggtgggggaggacatgcagcccaaggatcctgcagctcttgggtcaagtaggtcttctccacacagagctgccggccacagttcccacaaaagaaaactgtcggggccaccgctgcagctgcaaccgacccctcccctgcaactgaggtgggatagagacgaggggcccccaccggctaagcttccatgtctatctcctgaggcactgttggtgggtcaggcttcccaaagagaaggacgcctccagcagggcaacatgtgtaagaacatgagggtgttaagtagaacatcaaaattcaggagagtaagagagctgcttaggaggagaaagaagagatggtag

SEQ ID NO: 6041 - protein, 407 aa, Homo sapiens [sequence omitted]

SEQ ID NO: 6042 - DNA, 1482 bp, Homo sapiens
gacgggactgttaggttgcgggctttggggctcactcccgacggcattgtcttctcctcttctcagacagggcagaccgaggagtttggaccgagagtttatagaaacctattcaccaaaatggcatcctggttatatgaatgtctttgtgaagctgaacttgcacagtattattctcatttcactgcccttggccttcagaaaatagatgaattagccaagattacaatgaaggactactccaaattaggagtccatgacatgaacgaccgcaaacgtctcttccaacttatcaaaattattaagattatgcaagaagaagataaagcagtcagtatcccagagcgtcatcttcagacaagcagcctgcgcatcaaatctcaggaattaagatctggccctcgcagacagctgaattttgattctcctgctgacaataaagacagaaatgccagcaatgatgggtttgaaatgtgcagtttatcagatttctctgcaaatgaacagaagtccacttacctaaaagtgctagaacacatgctaccagatgattcccagtaccatacaaaaacaggaattctgaatgccacagctggtgattcctatgtgcaaacagaaatcagcacttcactcttttcaccaaattacctttctgcaatactgggggattgtgatattcccattattcaaagaatctctcatgtttcagggtataactatggaatccctcattcttgtatcaggtaataaattttatctttctttcttttgagggaaagtagcctcaggcaagggcaggcctctccttcatgtccagcagacagcatctactccttatttatagtaaatgaatataacagaaattatcatgaacagcatttgcatcaataataggaatacctggatgtgggaaaattaatgagaaattgggactttctaggtgggagaaagatgatattgttcatgtacatcagaacagctgctacttgccaggatctgtagcagatctgtttctattgtttattatagcgtaacatgatacatctagtacatctgtgaaagtgaaatagttaacccttctacagtggagaaaaaaattacacaatccacaggacttttttaaggttatcaaattcacttaacccaaccaggagacttaaagatgctttgttaaaaaacaagggcatgtagtttaattaagtaggtctttggggcagttagttcacctacacacattgaaatatgatcctaattttgagtgctttctacaatttcaaccccggaaaaaacagataattttggtgattacaaacagtaagacattgttggtggagatgagagtttgagagtcagggtgacaataagttattttcacctagtgcttcgagttagaatttgaaataaggtccctaagaggtgaaataacaagtaatccctagtactaacaatggtataataggaaatatgttcttttaatcttgt

SEQ ID NO: 6043 - protein, 208 aa, Homo sapiens
MASWLYECLCEAELAQYYSHFTALGLQKIDELAKITMKDYSKLGVHDMNDRKRLFQLIKIIKIMQEEDKAVSIPERHLQTSSLRIKSQELRSGPRRQLNFDSPADNKDRNASNDGFEMCSLSDFSANEQKSTYLKVLEHMLPDDSQYHTKTGILNATAGDSYVQTEISTSLFSPNYLSAILGDCDIPIIQRISHVSGYNYGIPHSCIR

SEQ ID NO: 6044 - DNA, 1175 bp, Homo sapiens
gagatgcggcctggccgccgccggtggctcccgggttgacgggactgttaggttgcgggctttggggctcactcccgacggcattgtcttctcctcttctcagacagggcagaccgaggagtttggaccgaggccggaccaggtgcccagtgaacagcagggagccgctctgggtgtcccacaccaggaagatgaaggggtggtcggagtagaacagcttggggctgcgcagctccttgctcccatagatgtcctggtcaaaggagttgccgtctgtgtccaactcaaaggcggtggcgtggaacacgctggtcagagtttatagaaacctattcaccaaaatggcatcctggttatatgaatgtctttgtgaagctgaacttgcacagtattattctcatttcactgcccttggccttcagaaaatagatgaattagccaagattacaatgaaggactactccaaattaggagtccatgacatgaacgaccgcaaacgtctcttccaacttatcaaaattattaagattatgcaagaagaagataaagcagtcagtatcccagagcgtcatcttcagacaagcagcctgcgcatcaaatctcaggaattaagatctggccctcgcagacagctgaattttgattctcctgctgacaataaagacagaaatgccagcaatgatgggtttgaaatgtgcagtttatcagatttctctgcaaatgaacagaagtccacttacctaaaagtgctagaacacatgctaccagatgattcccagtaccatacaaaaacaggaattctgaatgccacagctggtgattcctatgtgcaaacagaaatcagcacttcactcttttcaccaaattacctttctgcaatactgggggattgtgatattcccattattcaaagaatctctcatgtttcagggtataactatggaatccctcattcttgtatcaggtaataaattttatctttctttcttttgagggaaagtagcctcaggcaagggcaggcctctccttcatgtccagcagacagcatctactccttatttatagtaaatgaatataacagaaattatcatgaacagcatttgcatcaataataggaatacctggatgtgggaaaattaatgagaaattgggactttctaggtgggagaaagatg

SEQ ID NO: 6045 - protein, 239 aa, Homo sapiens
MSWSKELPSVSNSKAVAWNTLVRVYRNLFTKMASWLYECLCEAELAQYYSHFTALGLQKIDELAKITMKDYSKLGVHDMNDRKRLFQLIKIIKIMQEEDKAVSIPERHLQTSSLRIKSQELRSGPRRQLNFDSPADNKDRNASNDGFEMCSLSDFSANEQKSTYLKVLEHMLPDDSQYHTKTGILNATAGDSYVQTEISTSLFSPNYLSAILGDCDIPIIQRISHVSGYNYGIPHSCIR

SEQ ID NO: 6046 - DNA, 962 bp, Homo sapiens
ctattgatgggcccaagcgtaaccaggctcttctgattggccggtgtacttcagtttccgtccaaggtccgcctcctacctccttctgcttcggtgcgtttgcttctgaggatctccagtgtcacaacaaacacatgccagccctgttttacagggagccctggaggagttgggatagaggccacattgactgagggtagttgccagggtcctgcagttatacacaaagtccttaggataagaccatggccttgagagcatgtggcttgatcatcttccgaagatgcctcattcccaaagtggacaacaatgcaattgagtttttactgctgcaggcatcagatggcattcatcactggactcctcccaaaggccatgtggaaccaggagaggatgacttggaaacagccctgagggagacccaagaggaagcaggcatagaagcaggccagctgaccattattgaggggttcaaaagggaactcaattatgtggccaggaacaagcctaaaacagtcatttactggctggcggaggtgaaggactatgacgtggagatccgcctctcccatgagcaccaagcctaccgctggctggggctggaggaggcctgccagttggctcagttcaaggagatgaaggcagcgctccaagaaggacaccagtttctttgctccatagaggcctgagctgactggagcagagtcatttgcttcagcaggatccttgtgggccttctaagatgaagccaccctcaggtccagggaaggttgtgctggtatttggctcatgacagccaagagcagatttgtgaaatcggctcaactcccaggtgagagcaagcaaaaatcttggctgggtggaaaggaaggcaaaagagtaaaaattaaaaaggccaggcccagtaagtgtaccttgtactttataaataaacctcaagcagctcaaggttgtccttctaa

SEQ ID NO: 6047 - protein, 147 aa, Homo sapiens; identical to SEQ ID NO: 601

SEQ ID NO: 6048 - DNA, 1004 bp, Homo sapiens
ctattgatgggcccaagcgtaaccaggctcttctgattggccggtgtacttcagtttccgtccaaggtccgcctcctacctccttctgcttcggttctacagtgatggggtgcttccttttggcttctggaatgggtgcgtttgcttctgaggatctccagtgtcacaacaaacacatgccagccctgttttacagggagccctggaggagttgggatagaggccacattgactgagggtagttgccagggtcctgcagttatacacaaagtccttaggataagaccatggccttgagagcatgtggcttgatcatcttccgaagatgcctcattcccaaagtggacaacaatgcaattgagtttttactgctgcaggcatcagatggcattcatcactggactcctcccaaaggccatgtggaaccaggagaggatgacttggaaacagccctgagggagacccaagaggaagcaggcatagaagcaggccagctgaccattattgaggggttcaaaagggaactcaattatgtggccaggaacaagcctaaaacagtcatttactggctggcggaggtgaaggactatgacgtggagatccgcctctcccatgagcaccaagcctaccgctggctggggctggaggaggcctgccagttggctcagttcaaggagatgaaggcagcgctccaagaaggacaccagtttctttgctccatagaggcctgagctgactggagcagagtcatttgcttcagcaggatccttgtgggccttctaagatgaagccaccctcaggtccagggaaggttgtgctggtatttggctcatgacagccaagagcagatttgtgaaatcggctcaactcccaggtgagagcaagcaaaaatcttggctgggtggaaaggaaggcaaaagagtaaaaattaaaaaggccaggcccagtaagtgtaccttgtactttataaataaacctcaagcagctcaaggttgtccttctaa

SEQ ID NO: 6049 - protein, 147 aa, Homo sapiens; identical to SEQ ID NO: 601

SEQ ID NO: 6050 - DNA, 1075 bp, Homo sapiens
ctattgatgggcccaagcgtaaccaggctcttctgattggccggtgtacttcagtttccgtccaaggtccgcctcctacctccttctgcttcggggagggcatgggatcagctacctgtttctgcctcaaccacggaccaataatatgagatctttgttcaccagttctacagtgatggggtgcttccttttggcttctggaatgggtgcgtttgcttctgaggatctccagtgtcacaacaaacacatgccagccctgttttacagggagccctggaggagttgggatagaggccacattgactgagggtagttgccagggtcctgcagttatacacaaagtccttaggataagaccatggccttgagagcatgtggcttgatcatcttccgaagatgcctcattcccaaagtggacaacaatgcaattgagtttttactgctgcaggcatcagatggcattcatcactggactcctcccaaaggccatgtggaaccaggagaggatgacttggaaacagccctgagggagacccaagaggaagcaggcatagaagcaggccagctgaccattattgaggggttcaaaagggaactcaattatgtggccaggaacaagcctaaaacagtcatttactggctggcggaggtgaaggactatgacgtggagatccgcctctcccatgagcaccaagcctaccgctggctggggctggaggaggcctgccagttggctcagttcaaggagatgaaggcagcgctccaagaaggacaccagtttctttgctccatagaggcctgagctgactggagcagagtcatttgcttcagcaggatccttgtgggccttctaagatgaagccaccctcaggtccagggaaggttgtgctggtatttggctcatgacagccaagagcagatttgtgaaatcggctcaactcccaggtgagagcaagcaaaaatcttggctgggtggaaaggaaggcaaaagagtaaaaattaaaaaggccaggcccagtaagtgtaccttgtactttataaataaacctcaagcagctcaaggttgtccttctaa

SEQ ID NO: 6051 - protein, 147 aa, Homo sapiens; identical to SEQ ID NO: 601

SEQ ID NO: 6052 - DNA, 675 bp, Homo sapiens
ggcccaagcgtaaccaggctcttctgattggccggtgtacttcagtttccgtccaaggtccgcctcctacctccttctgcttcgggccatgtggaaccaggagaggatgacttggaaacagccctgagggagacccaagaggaagcaggcatagaagcaggccagctgaccattattgaggggttcaaaagggaactcaattatgtggccaggaacaagcctaaaacagtcatttactggctggcggaggtgaaggactatgacgtggagatccgcctctcccatgagcaccaagcctaccgctggctggggctggaggaggcctgccagttggctcagttcaaggagatgaaggcagcgctccaagaaggacaccagtttctttgctccatagaggcctgagctgactggagcagagtcatttgcttcagcaggatccttgtgggccttctaagatgaagccaccctcaggtccagggaaggttgtgctggtatttggctcatgacagccaagagcagatttgtgaaatcggctcaactcccaggtgagagcaagcaaaaatcttggctgggtggaaaggaaggcaaaagagtaaaaattaaaaaggccaggcccagtaagtgtaccttgtactttataaataaacctcaagcagctcaaggttgtccttctaa

SEQ ID NO: 6053 - protein, 56 aa, Homo sapiens
MTAKSRFVKSAQLPGESKQKSWLGGKEGKRVKIKKARPSKCTLYFINKPQAAQGCP

SEQ ID NO: 6054 - DNA, 766 bp, Homo sapiens
ccaaggtccgcctcctacctccttctgcttcggtccttaggataagaccatggccttgagagcatgtggcttgatcatcttccgaagatgcctcattcccaaagtggacaacaatgcaattgagtttttactgctgcaggcatcagatggcattcatcactggactcctcccaaaggccatgtggaaccaggagaggatgacttggaaacagccctgagggagacccaagaggaagcaggcatagaagcaggccagctgaccattattgaggggttcaaaagggaactcaattatgtggccaggaacaagcctaaaacagtcatttactggctggcggaggtgaaggactatgacgtggagatccgcctctcccatgagcaccaagcctaccgctggctggggctggaggaggcctgccagttggctcagttcaaggagatgaaggcagcgctccaagaaggacaccagtttctttgctccatagaggcctgagctgactggagcagagtcatttgcttcagcaggatccttgtgggccttctaagatgaagccaccctcaggtccagggaaggttgtgctggtatttggctcatgacagccaagagcagatttgtgaaatcggctcaactcccaggtgagagcaagcaaaaatcttggctgggtggaaaggaaggcaaaagagtaaaaattaaaaaggccaggcccagtaagtgtaccttgtactttataaataaacctcaagcagctcaaggttgtccttctaa

SEQ ID NO: 6055 - protein, 147 aa, Homo sapiens; identical to SEQ ID NO: 601

SEQ ID NO: 6056 - DNA, 544 bp, Homo sapiens
gtgcgtttgcttctgaggatctccagtgtcacaacaaacacatgcccagctaatttttttttttttttgtatttttagtagagatggggtttcaccgtgttagccaggatggtctcaatctcctgacctcgtgatccacccacctcggcctcccaaagtgctgggattgcaggtgtgagccaccgcgcccggctgtaagttgtattctttgcaggaataactgacagtagggtgggactaaagcatgttatgggaggtggatgagggtgggagagagaggagctgagattaggatgtggcaggtgagtaggctttgacaacatcaccactttgcttttggccagtggggcttgggcaacctgaactcagaccccagagcgttacaaaatccagctcccgtgccccaccacacccctctcaactggcagagcagcactctgccgatgctgcactttgggttaggccaggcctcagggagacctcagcagagttgtaccagttcaggagatgcttccatgttgaagttttcctccagagaatgggg

SEQ ID NO: 6057 - protein, 32 aa, Homo sapiens
MLHFGLGQASGRPQQSCTSSGDASMLKFSSRE

SEQ ID NO: 6058 - DNA, 4203 bp, Homo sapiens
agacagagccccgcgcggcgcggcggcagcttcactctggttcaagcgcaggggatcggcgggaagctctttcacccccgcttctgccgggctgtaactgcaatggagcaggttgagatgaactcagtcagatggccccacggcccgctcctttcttagcagcccactaatgctccagaaccctcaggagaagagccaggcctacccccgccgccgccggcctggctgctacgcatagcgtcagaaccccgaggccatcgcagccgcagctatgtacaccttcctgcccgacaacttctcacctgccaagcccaagccttccaaagacctgaagccgctgctgggctccgcggttctggggctgctgcttgtgctggccgcggtggtggcctggtgctactacagcgtctccctacgcaaggcggagcgacttcgcgcggagctgctggacctgaaagctggcggcttctccatccgcaatcagaagggagagcaggtcttccgcctggccttccgctccggcgcgctggaccttgactcctgcagccgcgatggcgccctgctgggctgctcgctcacggccgacgggctgccgctgcacttcttcatccagactgtgcggcccaaggacacggtcatgtgctaccgcgtgcgctgggaggaggcagcgccgggccgggccgtggagcacgccatgttcttgggcgacgcggcggcccactggtatggtggcgccgagatgaggacgcaacactggcccatccgcctggatggccagcaggagccccagccgttcgtcaccagcgatgtctactcctccgacgccgcgtttgggggcatcctcgagcgctactggctatcttcgcgcgcggccgccatcaaagtcaatgactcagtgcccttccacctgggctggaacagcacggagcgctcgctgcggcttcaggcgcgctaccacgacacgccctacaagccacccgccggccgcgccgcagcgccagagctgagctaccgagtgtgcgtgggctcagacgtcacctccatccacaagtacatggtgcgtcgctacttcaacaagccgtcaagggtgccagcacccgaggccttccgagaccccatttggtccacatgggcgctgtacgggcgcgccgtggaccaggacaaggtgctgcgttttgcccaacagatccgcctgcaccacttcaacagcagccacctggaaatcgacgacatgtacacacctgcttatggcgacttcgacttcgatgaggtcaaattccccaacgccagcgacatgttccgccgcctgcgcgacgccggcttccgcgtcacgctctgggtgcacccttttgtcaactacaactcgtcgcgcttcggcgagggcgtggagcgcgagctgttcgtgcgcgaacccacgggccggttacctgcgctggtgcgctggtggaacggcatcggcgcggtgctagacttcacgcacccaaaggcccgcgactggttccagggacacctgcggcggctgcgctctcgctactccgtggcttccttcaagttcgacgcgggcgaggtcagctacctgccgcgggacttcagcacctaccggccgctgccggaccccagcgtctggagccggcgctacactgagatggcgctgcccttcttctcgctggcggaggtgcgcgtaggctaccagtcacagaacatctcctgcttcttccgcctggtggatcgcgactctgtgtggggctacgacctggggttgcgctcactcatccccgcggtgctcaccgtcagcatgctgggctacccattcatcctacccgatatggtgggcggcaacgccgtgccccagcggacagccggcggcgatgtgcccgagcgcgagctctacattcgctggctggaagtggccgcctttatgccggccatgcagttctctatcccgccctggcgctacgacgcggaagtggtggccatcgcgcagaagttcgccgccctgcgggcctcgcttgtggcaccgctgttgcttgagctggcgggcgaggtcaccgacacgggtgaccctatcgtgcgccccctttggtggattgcgcccggcgacgagacagctcaccgtatcgactcgcagttccttattggggacacgctgcttgtggccccggtgctggagccaggcaagcaggagcgcgacgtctatttgcccgccggcaagtggcgcagctacaagggtgagcttttcgacaagacgccggtgctgctcaccgattacccggtcgacctggatgagatcgcctactttacctgggcgtcctgacccagcccagggcccggtaaccgcaaagcccccagtcttcatgcagaccttgaaccctccgtcacacccgcaccatgtactcccaggaacctcccacctctataccacccattaagtggctgctgacttaaatgtgctggaaccagctgctgaaggtggggcctagggagggggcactgaagcaatctcctgctccaacgcacaatccttactgtgccctttccacccccacactcacaccaatctgcagaaacctcttccctggggtggaagccagagagcttagaggaaaaaggtcagctctcttcctgttatacatggttatacatggttggggtttaaaagcacaaagagaaacctccccctcctggctttcgtggccatctttgtccatcttaggtggggacttgatcttatttaaggtctccaaatagcccccaccacacttagaacgtgtgttttcttagtgttagaagccaggccctgagtccccagcactcacctgaactgtggctgatttggtcccagtccagctggggaggtgtttggctgacaaggaggcaagagatcccctcccagggaacaggaggactgggcttagcacagagccatcatcatgttcccaatttgtgaagagactcctaacactgcactaacccatttgtgtacatacatgggctcagccctgggccaaatgtgcctgatgggaacagacttgcagggccatgcaggccagacttcgtgccttaactgaagagtgtgcgtgtgtgtgtgtgagagagagagagagagagaaacacgcatcatgggtccctgatctatgaaatgaacacaacctctctgaggctggatgatctggaggaagggggcatggagcaaatttgaggctctgattgctgagccagcctcctcccaggcggtttccccaggactctcgtaggaaataaatagccctttcaagattcctcagctgcctcaccccctgcacatgtgcctggggtgtggcctagaagggagtgatgttcttactctggtggtctgtgcttctgaacacaggctacatgcacacactgacaactaccaataaacagacaggggaaggtctttcatctcagccattttctcttccccccgcccccccttagatggagtcttgctctgtcacccaggttggagtgcagtggcacaatcagctcactgcaacccctcctcctaggttcaagcgattgagtagctgagattacaggcatgcatcactatgcctggctttttgtattttttagtagagatggggtttaccatgttggccaggctagtctcaaactcctgacctagtgatgcacccaccttggcctcccaaagtgttgggattacaggcatgagccaccacgccagccattttctctttctaagaagagcaacctcagccggagtgagttttttctgactttgcagctgagtctggagaaaagtggcatgccagagcgggtcggtgggaaacagggtgaactttagcttccatcaacagctctggtagcaaaaccagtcccctaccccctagagaatgcatccgtttccccacctgatatggtttggctgtgtccccacctaaaactcatcttgaattgtagctcccataattgccatgtgttgtgggaaggacccagtgggagataattgaaatatgggggcagtttccgccatactgttctggtgatagtgaatagatctcatgagagctgatgattttataagaggtttccccttttgcttagttctcattctctcttgcctgccgccatgtaagacgtgcctttctgtcatgcttgtgaggcctccccagccacgtggagctgtgagttcattaaacctctttttctttataaatt

SEQ ID NO: 6059 - protein, 680 aa, Homo sapiens [sequence omitted]

SEQ ID NO: 6060 - DNA, 591 bp, Homo sapiens
gctgaagggcgggagaagttgcggcgtggcgataggaggccaggatggagacagcagttcgaggaatgcccttggaatgccctcctaggccggagcggctcaatgcctacgagcgcgaagtgatggtgaacatgctgaactcactgtcgcggaaccagcagctgccgcggatcacgccccgatgcgggtgcgtggacccgctgcccggccgcctgcccttccatggttacgaaagtgcttgctcgggccgccactactgtctgcgcgggatggactactacgccagcggggcgccctgcaccgaccgccgcctgcggccttggtgccgggagcaaccgactatgtgtacctccctacgagcaccggcccggaatgcagtgtgctgttacaactcccccgccgtcatactacccatatccgaaccttagatgggacacaagtcacttcaagaagtctggtggtccccagagaaacaactatgttatccatcctgagtttgtgtctgagacctatcccgactatcgttgctggtagagcctgggcttgctgtgccaagggggcagagcaataaataaactcttcaaccccaaa

SEQ ID NO: 6061 - protein, 129 aa, Homo sapiens
MRVRGPAARPPALPWLRKCLLGPPLLSARDGLLRQRGALHRPPPAALVPGATDYVYLPTSTGPECSVLLQLPRRHTTHIRTLDGTQVTSRSLVVPRETTMLSILSLCLRPIPTIVAGRAWACCAKGAEQ

SEQ ID NO: 6062 - DNA, 712 bp, Homo sapiens
tgacagccgccaacacagagccctggagaggtggggagctgctgaagggcgggagaagttgcggcgtggcgataggtctgggtgttctgggaggacccctaaaagggagcagctctgccaggtcagagcttgaggtagcatgtgtgccgcttccaggaggccaggatggagacagcagttcgaggaatgcccttggaatgccctcctaggccggagcggctcaatgcctacgagcgcgaagtgatggtgaacatgctgaactcactgtcgcggaaccagcagctgccgcggatcacgccccgatgcgggtgcgtggacccgctgcccggccgcctgcccttccatggttacgaaagtgcttgctcgggccgccactactgtctgcgcgggatggactactacgccagcggggcgccctgcaccgaccgccgcctgcggccttggtgccgggagcaaccgactatgtgtacctccctacgagcaccggcccggaatgcagtgtgctgttacaactcccccgccgtcatactacccatatccgaaccttagatgggacacaagtcacttcaagaagtctggtggtccccagagaaacaactatgttatccatcctgagtttgtgtctgagacctatcccgactatcgttgctggtagagcctgggcttgctgtgccaagggggcagagcaataaataaactcttcaaccccaaa

SEQ ID NO: 6063 - protein, 129 aa, Homo sapiens; identical to SEQ ID NO: 6061

SEQ ID NO: 6064 - DNA, 1170 bp, Homo sapiens
aatgggcagtgcccatcctggagggggcatcagtgtggggtgggagcaggaaggctgttggggaaggaagctgagagatcctctgcaggaggggattatagcagctaagggcacctgccaggctggaggtgtggcctgtctaggggaagggtggtcactgatgtccagcaggagcccttgacaggtagagcccaccacggcatctccaagaccacaccatgttcctgttctcccgtaagaccaggacccctatcagtacctacagtgactcctacagggctcccacctccatcaaggaggtctataaggacccacccctgtgtgcctgggaagccaacaagtttctgactccgggtctgactcataccatggagcgacatgtggatcccgaagccctgcagaagatggccaaatgtgctgtacaggactacacttatagggggtccatatcaggccacccctacttgcctgagaagtactggctttctcaagaggaagcagacaaatgcagcccaaactacctgggcagtgactggtacaacacatggaggatggaaccttacaacagcagctgctgcaacaagtataccacctaccttcctcggctgcctaaggaggccaggatggagacagcagttcgaggaatgcccttggaatgccctcctaggccggagcggctcaatgcctacgagcgcgaagtgatggtgaacatgctgaactcactgtcgcggaaccagcagctgccgcggatcacgccccgatgcgggtgcgtggacccgctgcccggccgcctgcccttccatggttacgaaagtgcttgctcgggccgccactactgtctgcgcgggatggactactacgccagcggggcgccctgcaccgaccgccgcctgcggccttggtgccgggagcaaccgactatgtgtacctccctacgagcaccggcccggaatgcagtgtgctgttacaactcccccgccgtcatactacccatatccgaaccttagatgggacacaagtcacttcaagaagtctggtggtccccagagaaacaactatgttatccatcctgagtttgtgtctgagacctatcccgactatcgttgctggtagagcctgggcttgctgtgccaagggggcagagcaataaataaactcttcaaccccaaa

SEQ ID NO: 6065 - protein, 262 aa, Homo sapiens; identical to SEQ ID NO: 609

SEQ ID NO: 6066 - DNA, 290 bp, Homo sapiens
aaaggcccaacccctccatgctcgcggcttcctccttctccagatgtgtacctccctacgagcaccggcccggaatgcagtgtgctgttacaactcccccgccgtcatactacccatatccgaaccttagatgggacacaagtcacttcaagaagtctggtggtccccagagaaacaactatgttatccatcctgagtttgtgtctgagacctatcccgactatcgttgctggtagagcctgggcttgctgtgccaagggggcagagcaataaataaactcttcaacccc

SEQ ID NO: 6067 - protein, 72 aa, Homo sapiens
MLAASSFSRCVPPYEHRPGMQCAVTTPPPSYYPYPNLRWDTSHFKKSGGPQRNNYVIHPEFVSETYPDYRCW

SEQ ID NO: 6068 - DNA, 2342 bp, Homo sapiens
tgacagccgccaacacagagccctggagaggtggggagctgctgaagggcgggagaagttgcggcgtggcgataggtctgggtgttctgggaggacccctaaaagggagcagctctgccaggtcagagcttgaggtagcatgtgtgccgcttccaggaggccaggatggagacagcagttcgaggaatgcccttggaatgccctcctaggccggagcggctcaatgcctacgagcgcgaagtgatggtgaacatgctgaactcactgtcgcggaaccagcagctgccgcggatcacgccccgatgcgggtgcgtggacccgctgcccggccgcctgcccttccatggttacgaaagtgcttgctcgggccgccactactgtctgcgcgggatggactactacgccagcggggcgccctgcaccgaccgccgcctgcggccttggtgccgggagcaaccgactgtaaggttcgcagggctccgcccgcctcagccgggctccaccccacacaagccccgccccagaaccccgcccccttccagcccggccagcttccgtgcaggcccccagcctgctctagccccgcgctgcacgctctcgaggccctgccgtgtcccgccctcgggctccaaggcctgaactaacaactgaggcgggagaaccagcacgaaggttactccaagtccccgacccctgtccctctcaaactgggctcaaggtcaacctggcctctctatatgctctggaggtcccgtcagagggtttttgaggaagaaaccccgcacatcagtcgcatcctcttcccccatctccttggccctgccccctttcctggactcctggccctagagacgcaggttctagcctgtggagtgccctgcgttctcagaaaaatgtcctctcttgctggtcccccgtcaccgtcggtagtgggtgcggtcattcctgggggctacgtgagccgggaaatggtgaccactttaccagaatggctctggcctcctcggatcccgcaccacctgcggaggtaggcaccctcgcgtgttactgctaagaaaactgaggcccgagcgcacagctggagcccagactgcagctcggcattcgtcctgcacgcggcggcagccaagcctgggagaactttgtccgcggtagcccagagagctgtgcagtgggggtccatagtgatcccccgcccctctccaggccgagagagcctgattcattgtgcaagactgagtcttatccctctcaagggcataggggagtgggaaagtgtctgagcctctaggaagctcagaaatgatgcctcgtcctactgctggagaaattgctgtccagtggcggggatccggtggttccaggtcctcaacgcccggagcccgaccttccccagggtccagcgctctttcctcaacggcagaaatgaggccttgccgggagggagtcttccaaggggggttcccgaatcggtgctgcagtgggggttttgaagggtgaggaagaaggagaggaggatttccgagccttgggacggacacctgaagcgccgcccaggggcttggtctaaatcgggggatgagagtcaaaaggcccaacccctccatgctcgcggcttcctccttctccagatgtgtacctccctacgagcaccggcccggaatgcagtgtgctgttacaactcccccgccgtcatactacccatatccgaaccttaggtaagtctaacgcgcacacactcatttgcacacgcaccctgaaggcttggtgaggcggggctgggggaggatgtctggtagacgggatgagaacgctccgcggtgcactgacaggcacataccacgagggggagctagtggcatggagcagtcaaaggtggtaaggacagaggaccttaagagagggctaggaggccggtattgaagggttacaggttggcagtgggcttacagccaaaggcgttggttcagagcttgaagtaatgagtaagaagtcgatgttaaggaggaaatattgggtatcagcaacttaacagtagaacctaaggtcaggaggtcagtattggaacccaaggtcagtgctatagacaaagtgtagggataaggttagcattgcaaactggagtcagatattcactttgacatatgaggatccaaaacggctgacccatctcttcctgtagatgggacacaagtcacttcaagaagtctggtggtccccagagaaacaactatgttatccatcctgagtttgtgtctgagacctatcccgactatcgttgctggtagagcctgggcttgctgtgccaagggggcagagcaataaataaactcttcaacccc

SEQ ID NO: 6069 - protein, 157 aa, Homo sapiens
METAVRGMPLECPPRPERLNAYEREVMVNMLNSLSRNQQLPRITPRCGCVDPLPGRLPFHGYESACSGRHYCLRGMDYYASGAPCTDRRLRPWCREQPTVRFAGLRPPQPGSTPHKPRPRTPPPSSPASFRAGPQPALAPRCTLSRPCRVPPSGSKA

SEQ ID NO: 6070 - DNA, 555 bp, Homo sapiens
tgacagccgccaacacagagccctggagaggtggggagctgctgaagggcgggagaagttgcggcgtggcgataggtctgggtgttctgggaggacccctaaaagggagcagctctgccaggtcagagcttgaggtagcatgtgtgccgcttccaggaggccaggatggagacagcagttcgaggaatgcccttggaatgccctcctaggccggagcggctcaatgcctacgagcgcgaagtgatggtgaacatgctgaactcactgtcgcggaaccagcagctgccgcggatcacgccccgatgcggatgtgtacctccctacgagcaccggcccggaatgcagtgtgctgttacaactcccccgccgtcatactacccatatccgaaccttagatgggacacaagtcacttcaagaagtctggtggtccccagagaaacaactatgttatccatcctgagtttgtgtctgagacctatcccgactatcgttgctggtagagcctgggcttgctgtgccaagggggcagagcaataaataaactcttcaacccc

SEQ ID NO: 6071 - protein, 111 aa, Homo sapiens; identical to SEQ ID NO: 613

SEQ ID NO: 6072 - DNA, 716 bp, Homo sapiens
tggagggggcatcagtgtggggtgggagcaggaaggctgttggggaaggaagctgagagatcctctgcaggaggggattatagcagctaagggcacctgccaggctggaggtgtggcctgtctaggggaagggtggtcactgatgtccagcaggagcccttgacaggtagagcccaccacggcatctccaagaccacaccatgttcctgttctcccgtaagaccaggacccctatcagtacctacagtgactcctacagggctcccacctccatcaaggaggtctataaggacccacccctgtgtgcctgggaagccaacaagtttctgactccgggtctgactcataccatggagcgacatgtggatcccgaagccctgcagaagatggccaaatgtgctgtacaggactacacttatagggggtccatatcaggccacccctacttgcctgagaagtactggctttctcaagaggaagcagacaaatgcagcccaaactacctgggcagtgactggtacaacacatggaggatggaaccttacaacagcagctgctgcaacaagtataccacctaccttcctcggctgcctaaggaggccaggatggagacagcagttcgaggaatgcccttggaatgccctcctaggccggagcggctcaatgcctacgagcgcgaagtgatggtgaacatgctgaactcactgtcgcggaac

SEQ ID NO: 6073 - protein, 171 aa, Homo sapiens
MFLFSRKTRTPISTYSDSYRAPTSIKEVYKDPPLCAWEANKFLTPGLTHTMERHVDPEALQKMAKCAVQDYTYRGSISGHPYLPEKYWLSQEEADKCSPNYLGSDWYNTWRMEPYNSSCCNKYTTYLPRLPKEARMETAVRGMPLECPPRPERLNAYEREVMVNMLNSLSR

SEQ ID NO: 6074 - DNA, 376 bp, Homo sapiens
tgcctgggaagccaacaagtttctgactccgggtctgactcataccatggagcgacatgtggatcccgaagccctgcagaagatggccaaatgtgctgtacaggactacacttatagggggtccatatcaggccacccctacttgcctgagaagtactggctttctcaagaggaagcagacaaatgcagcccaaactacctgggcagtgactggtacaacacatggaggatggaaccttacaacagcagctgctgcaacaagtataccacctaccttcctcggctgcctaaggtatctgttgcacccagcacagacgtctggggactgggacacgcataccccaccacctcccaaactacagtgactgatatttca

SEQ ID NO: 6075 - protein, 109 aa, Homo sapiens
MERHVDPEALQKMAKCAVQDYTYRGSISGHPYLPEKYWLSQEEADKCSPNYLGSDWYNTWRMEPYNSSCCNKYTTYLPRLPKVSVAPSTDVWGLGHAYPTTSQTTVTDI

SEQ ID NO: 6076 - DNA, 2478 bp, Homo sapiens
atctgtgtgaccctgactgaattaattaattttgatgtgtctcagtttctccaactttaaaatggggataatagtaccatttacttcacagggttgctgtgaggtttaagtgagttagtatatgtaagacatttagaatgatgcttggcacataaaaaactattatgattattctactgttatccttgcctcacctttgaaatcctataatccagccttgacatagcacctgtggtacttttcacaaatgaaaatttgaccaagacaccctcctacttaaaaccctatagggtttgtctgccttagcccccagtcacctaagcctgtcctacaaggccctccatgatccaacagtctgaaagaatacatatgcgacacggtgtggaggaagccctagcgaagagcagctgtctgaggggaggggtgcagtgctgggatttggagttcggggatggcagtttgcacatactgaaactgaggtgtttggggacatccagatcaagatgactataagcatatgaagaagagtggaattctgatgagaggacaaatctggaaattaggatttgaagctgtcagtaattaaaggcttgtgttaaatcaaatggccttggaggaggagcaaggggagaagagggtgcaggataacaccctgaggaaccccatgtttccacagtggatgcacaggaaagggaggcatcagagaagctgaggaggaagttgtttcaagaagtagagtgtggtcatagcctgtgtgctggaggattaacatacaaaacaacatcaacaacaaaacgagtagagagtggtcagaagagtgcaattcattggtctaggagggtaaaggtctcagagggtaaagactgcagagtcctgtggatttggtaatcagagccatgcaagagcaatttattgtttcatcataggagatgcacattcccaacttccattgggaattctcagtccattcaactcccaaagtgcttggattactggcctgagacaccatgcctggcttttccttcattcttaataccactgctatctgactttcactcctcgccattcattgaagctgtctggctaagttaccaagagttactacatccgagagatttctctgtcactaacacttgacactgatctttgtctaataatgctgtctttattggtttatctttgattttcctcctagttctctggcaataattctctgtcttcttttatggctttttttcctttacctacccttaaatatttatattctccaaagttatgtccttggccattttctctctcttctttggcaatttcatctcttcctatgacttcacccaccatttatatgatgatgacttcaagatctctatctataacccagacctctttcctttgcttcagataagtatatctaactacttgccaaacatcttttcctggatatcctcaaatatttttgttctcaaatgaactccaaatctctaatctgttattccaaacctcagttgatagcattagcattcctccagctgccacagccaaaaactcaagggtcaccctaatctctcaccttaccatccatatggtgaccaaaatctgttcatctactttttaaaattcccttctattgagtatggagtcaggcactctcatattttgcttgtggaaatgtaaattgttacaacccttacttattatggcaatttgaggtatatagcaaaagttttaaaaatgtgtatatcttttctcctaacaatttcatgtctagtaatttatcctaagggaataattggaaatgtgtacaaagatacatgtataagaatgattatactagcaaaattttataaagtacctaaattttcaataagattccttaaatacaccattttgtaataaattttatttatttttataataaacaatatttgcttcctgaaagggcatacgataatatattaacaatggtaattttaggtagtaggattttagaccttttttctttgtgcttctctgagttatctgcattttctacattcagcgtatatttattttggagttagacaaaataaattattttaaaaattctctcctattcaacgaattccttttttcattgtgacaatctccttatctcccacctacatcctccttcctcatctgttcacccctcgctggccttcctgccctcaaccccagcccctgcaattccctgacactgtggccagagtggcctaactcacaattgaaccatgactctccctcccaggttcaaaaacctggagccttatgtccacgctccacaacatagccagagaggcccttcttggtctgcagactcctctctcacccaaggactaaactctcctgctctaacagtttcagtttctggtaggtccctgcccacaggctgccttttctcctgactgtcttctgctggaagcctcctcctcctggatccctcagtaggtctgcccttca

SEQ ID NO: 6077 - protein, 64 aa, Homo sapiens [sequence omitted]

SEQ ID NO: 6078 - DNA, 2038 bp, Homo sapiens
gggtaaggtgggccttacagacaggctgaggtttgggtggtgtgatctgtcctaattggcccctcaccaatgcatctatctgtctgccaccagcccaccccaccctgcccccaccctcacccacgcttctgctcattggtctcaatcccagcctggaagcagggagtaaggctggactccaatggcccattcccctcaccccagcccaagacgtgggaggctgcttcccagtaagaatccaggagcaagctttggtgaatccagtgggctgagtggctctatggatgtggttgtttggatgtggtagggagtgcttagcagaatgtgtgtgtatctctgaggctgtcagggggtgggtgggtgtgtgtctctgttggacctgtctctcctcagtctattcctgtcatagatgtgggtgtccctggtagggaagtgcctgtgtggtctgtttacagtgcagaaggcggctcagcagtgcaatgggctgacagccttggaccgggagtcagaagcctgggttctggttgtagctctggcccctccctgtgatcttcaacaagccacttgctttctctcgtcttcagtttcctcaactagaaaatgaacagcagctgaaattatgttgaagatccttttatacctgaaagagtttcttcatagaaatttctgtggtggggagggggcaatctctgtgtgtctcagtatacctaaaggttggggtggggcggagttgtgtgtctctgtagaaaggcgaaggggcagttcctatcaggactgtgtatgtctgagcacatgtggctctgtttgggattacgtgtttgtctgtgaatgtgtgtgtgtgttggagggttgtctattgtgtgtggctgtatagggtgtctgtagatcaagatgtgtatacagctgcttctgctattgctggtttgggggaggggactggaaagctgagactgaaaatcaagagggaagaggtgggagctggaatggggagcaatgagaggagggagtgagactgttggcttaggaagggtggtacctctccctgcatcatacccaggaactgccagctccaaaatattggggtacagctcaccaccccccactccgccaacccattcctacctcctctagtgcagggacccaagttagatgatgagaaaatgccaaacaaagggaggcaaggacagagaaggtacctgcaggacccacaaggcccatactggcccccatctgaacccacctctcccacccagatcaacatccccccaacccctgtgcccccatcatctggaccccagagccagccctcccactaccaccaccaccaccccggggctccttggctcacctttctagaacatgggtacctcctctttttgggggctcatttagactgctgcctttgctgctgacttgcagtgtgactcgggcccattgttcaatctctgtggccctgagacaccagggaaaatctccccccccacaggacatactagttccctggcaggcaagggcttccaactgaggcagtgcatgtgtggcagagagaggcaggaagctggcagtggcagcttctgtgtctagggaggggtgtggctccctccttccctgtctgggaggttggagggaagaatctaggccttagcttgccctcctgccacccttccccttgtagatactgccttaacactccctcctctctcagctgtggctgccacccagccaggtttctccgtgctcactaatttatttccaggaaggtgtgtggaagacatgagccgtgtataatattttttttaacattttcattgcagtattgaccatcatccttggttgtgtatcgtgtaacacaaataatgatattaaaagcatcaaacaagccagcctcagctccctccctggggtgtgggcaaggggcagatgggctgggaagcagacagaactggtcctctgggcacacatgttactccacctccacctgtgggttcccaggcatgccactgacctgctgcatgaccctgggtgagtcacaacccct

SEQ ID NO: 6079 - protein, 84 aa, Homo sapiens [sequence omitted]

SEQ ID NO: 6080 - DNA, 3765 bp, Homo sapiens
gtcaccgcagtggctgagctgctgacaggaggcggcagcggagtaggaggcgaggcaagacctgcggctcggcccggccacagccgcggtagtgctaggcaagcccacggagtcacgccggcctcagccagtctgcgaacctctcgcccccgcccacccctgcatccgcccggcccctgcccgcccgagtggtccggggaggcctagtctgcaccacccgccgggctcctggggccgccgccccgcgcggtcctgtcggcgtccgcggccgcgcccggcccctggcccgctcgcccgccggcaccatgatggaggagatcgaccggttccaggacccagccgccgcctccatctctgacggagactgtgacgcccgggagggtgagtcagtagccatgaattacaaaccatccccgctccaagtgaagctggagaagcagcgggagctggcccggaagggctccctgaagaatggcagcatgggtagccctgtcaaccagcaacccaagaagaacaatgtcatggcccgaacaaggctggtcgtccccaataaaggctactcctcacttgaccagagccctgatgagaagccactggtagcccttgacacggacagcgatgatgactttgacatgtctagatactcctcctccggctactcctctgctgagcagatcaaccaagatttgaacatccagctgctgaaggacggctaccggttagatgagatccccgacgacgaggacctagacctcatcccccccaagtccgtgaaccccacgtgcatgtgctgccaggccacgtcctccaccgcctgccacattcagtagcgggcggggccactgcggtcgccggggcggggccgccaagggccgggtaggacgggcagaggccgaccccttcccagctcgtctgcctgcccccggccccgcgcccctacagccgccaacctcgtataacagtcattgcttcctcctatggtaggacgtgtacctctgtgtgttcatggagctggagaaaccaaaactgggtctctctccacccgggagctgaggaggggtgggggccgtttgttcagttacctgggggaacctcacccagcaccctgccccgcttcccagggctggccaagagagaagactggacggcagggaggtcaacattaacgagtggggggatcacaaagccaggggcttggccccaccccagcgaagccatgaactcccaagccccggcctcagcctaaccaggaaaggggctcggagggagaaaggcccagggcagtggggacgggtcccagcacctcggagcccccttcacacgccccctaccggcccatgtttctatttgcatttccccctcctcagatgggaagcctggcaaagctgcccaaccgggtagtgcccctcacccatcggatcactgccttcttcctcctcttgccccattcacccgcttccttgcactctgggagtggggcagggtaaggtgggccttacagacaggctgaggtttgggtggtgtgatctgtcctaattggcccctcaccaatgcatctatctgtctgccaccagcccaccccaccctgcccccaccctcacccacgcttctgctcattggtctcaatcccagcctggaagcagggagtaaggctggactccaatggcccattcccctcaccccagcccaagacgtgggaggctgcttcccagtaagaatccaggagcaagctttggtgaatccagtgggctgagtggctctatggatgtggttgtttggatgtggtagggagtgcttagcagaatgtgtgtgtatctctgaggctgtcagggggtgggtgggtgtgtgtctctgttggacctgtctctcctcagtctattcctgtcatagatgtgggtgtccctggtagggaagtgcctgtgtggtctgtttacagtgcagaaggcggctcagcagtgcaatgggctgacagccttggaccgggagtcagaagcctgggttctggttgtagctctggcccctccctgtgatcttcaacaagccacttgctttctctcgtcttcagtttcctcaactagaaaatgaacagcagctgaaattatgttgaagatccttttatacctgaaagagtttcttcatagaaatttctgtggtggggagggggcaatctctgtgtgtctcagtatacctaaaggttggggtggggcggagttgtgtgtctctgtagaaaggcgaaggggcagttcctatcaggactgtgtatgtctgagcacatgtggctctgtttgggattacgtgtttgtctgtgaatgtgtgtgtgtgttggagggttgtctattgtgtgtggctgtatagggtgtctgtagatcaagatgtgtatacagctgcttctgctattgctggtttgggggaggggactggaaagctgagactgaaaatcaagagggaagaggtgaggaaggcccacccctggggctgggcagtgtagacctgccaccgtgtgaagaaaaatgaaagcacagatagcctaagactgcacaggcctgtgcccacataccttatagcacaggcccaggtggatcatctcatgctaacaccccacatgtgctggtggatccactcccatggatccactcacatgctgcaggcatgcagtagactcacccacagcccactctctggacaccaatcctgggaggtgggagctggaatggggagcaatgagaggagggagtgagactgttggcttaggaagggtggtacctctccctgcatcatacccaggaactgccagctccaaaatattggggtacagctcaccaccccccactccgccaacccattcctacctcctctagtgcagggacccaagttagatgatgagaaaatgccaaacaaagggaggcaaggacagagaaggtacctgcaggacccacaaggcccatactggcccccatctgaacccacctctcccacccagatcaacatccccccaacccctgtgcccccatcatctggaccccagagccagccctcccactaccaccaccaccaccccggggctccttggctcacctttctagaacatgggtacctcctctttttgggggctcatttagactgctgcctttgctgctgacttgcagtgtgactcgggcccattgttcaatctctgtggccctgagacaccagggaaaatctccccccccacaggacatactagttccctggcaggcaagggcttccaactgaggcagtgcatgtgtggcagagagaggcaggaagctggcagtggcagcttctgtgtctagggaggggtgtggctccctccttccctgtctgggaggttggagggaagaatctaggccttagcttgccctcctgccacccttccccttgtagatactgccttaacactccctcctctctcagctgtggctgccacccagccaggtttctccgtgctcactaatttatttccaggaaggtgtgtggaagacatgagccgtgtataatattttttttaacattttcattgcagtattgaccatcatccttggttgtgtatcgtgtaacacaaataatgatattaaaagcatcaaacaagccagcctcagctccctccctggggtgtgggcaaggggcagatgggctgggaagcagacagaactggtcctctgggcacacatgttactccacctccacctgtgggttcccaggcatgccactgacctgctgcatgaccctgggtgagtcacaacccct

SEQ ID NO: 6081 - protein, 174 aa, Homo sapiens
MMEEIDRFQDPAAASISDGDCDAREGESVAMNYKPSPLQVKLEKQRELARKGSLKNGSMGSPVNQQPKKNNVMARTRLVVPNKGYSSLDQSPDEKPLVALDTDSDDDFDMSRYSSSGYSSAEQINQDLNIQLLKDGYRLDEIPDDEDLDLIPPKSVNPTCMCCQATSSTACHIQ

SEQ ID NO: 6082 - DNA, 3435 bp, Homo sapiens
gagtcaccgcagtggctgagctgctgacaggaggcggcagcggagtaggaggcgaggcaagacctgcggctcggcccggccacagccgcggtagtgctaggcaagcccacggagtcacgccggcctcagccagtctgcgaacctctcgcccccgcccacccctgcatccgcccggcccctgcccgcccgagtggtccggggagcatgatggaggagatcgaccggttccaggacccagccgccgcctccatctctgacggagactgtgacgcccgggaggagaagcagcgggagctggcccggaagggctccctgaagaatggcagcatgggtagccctgtcaaccagcaacccaagaagaacaatgtcatggcccgaacaaggctggtcgtccccaataaaggctactcctcacttgaccagagccctgatgagaagccactggtagcccttgacacggacagcgatgatgactttgacatgtctagatactcctcctccggctactcctctgctgagcagatcaaccaagatttgaacatccagctgctgaaggacggctaccggttagatgagatccccgacgacgaggacctagacctcatcccccccaagtccgtgaaccccacgtgcatgtgctgccaggccacgtcctccaccgcctgccacattcagtagcgggcggggccactgcggtcgccggggcggggccgccaagggccgggtaggacgggcagaggccgaccccttcccagctcgtctgcctgcccccggccccgcgcccctacagccgccaacctcgtataacagtcattgcttcctcctatggtaggacgtgtacctctgtgtgttcatggagctggagaaaccaaaactgggtctctctccacccgggagctgaggaggggtgggggccgtttgttcagttacctgggggaacctcacccagcaccctgccccgcttcccagggctggccaagagagaagactggacggcagggaggtcaacattaacgagtggggggatcacaaagccaggggcttggccccaccccagcgaagccatgaactcccaagccccggcctcagcctaaccaggaaaggggctcggagggagaaaggcccagggcagtggggacgggtcccagcacctcggagcccccttcacacgccccctaccggcccatgtttctatttgcatttccccctcctcagatgggaagcctggcaaagctgcccaaccgggtagtgcccctcacccatcggatcactgccttcttcctcctcttgccccattcacccgcttccttgcactctgggagtggggcagggtaaggtgggccttacagacaggctgaggtttgggtggtgtgatctgtcctaattggcccctcaccaatgcatctatctgtctgccaccagcccaccccaccctgcccccaccctcacccacgcttctgctcattggtctcaatcccagcctggaagcagggagtaaggctggactccaatggcccattcccctcaccccagcccaagacgtgggaggctgcttcccagtaagaatccaggagcaagctttggtgaatccagtgggctgagtggctctatggatgtggttgtttggatgtggtagggagtgcttagcagaatgtgtgtgtatctctgaggctgtcagggggtgggtgggtgtgtgtctctgttggacctgtctctcctcagtctattcctgtcatagatgtgggtgtccctggtagggaagtgcctgtgtggtctgtttacagtgtatacctgaaagagtttcttcatagaaatttctgtggtggggagggggcaatctctgtgtgtctcagtatacctaaaggttggggtggggcggagttgtgtgtctctgtagaaaggcgaaggggcagttcctatcaggactgtgtatgtctgagcacatgtggctctgtttgggattacgtgtttgtctgtgaatgtgtgtgtgtgttggagggttgtctattgtgtgtggctgtatagggtgtctgtagatcaagatgtgtatacagctgcttctgctattgctggtttgggggaggggactggaaagctgagactgaaaatcaagagggaagaggtgaggaaggcccacccctggggctgggcagtgtagacctgccaccgtgtgaagaaaaatgaaagcacagatagcctaagactgcacaggcctgtgcccacataccttatagcacaggcccaggtggatcatctcatgctaacaccccacatgtgctggtggatccactcccatggatccactcacatgctgcaggcatgcagtagactcacccacagcccactctctggacaccaatcctgggaggtgggagctggaatggggagcaatgagaggagggagtgagactgttggcttaggaagggtggtacctctccctgcatcatacccaggaactgccagctccaaaatattggggtacagctcaccaccccccactccgccaacccattcctacctcctctagtgcagggacccaagttagatgatgagaaaatgccaaacaaagggaggcaaggacagagaaggtacctgcaggacccacaaggcccatactggcccccatctgaacccacctctcccacccagatcaacatccccccaacccctgtgcccccatcatctggaccccagagccagccctcccactaccaccaccaccaccccggggctccttggctcacctttctagaacatgggtacctcctctttttgggggctcatttagactgctgcctttgctgctgacttgcagtgtgactcgggcccattgttcaatctctgtggccctgagacaccagggaaaatctccccccccacaggacatactagttccctggcaggcaagggcttccaactgaggcagtgcatgtgtggcagagagaggcaggaagctggcagtggcagcttctgtgtctagggaggggtgtggctccctccttccctgtctgggaggttggagggaagaatctaggccttagcttgccctcctgccacccttccccttgtagatactgccttaacactccctcctctctcagctgtggctgccacccagccaggtttctccgtgctcactaatttatttccaggaaggtgtgtggaagacatgagccgtgtataatattttttttaacattttcattgcagtattgaccatcatccttggttgtgtatcgtgtaacacaaataatgatattaaaagcatcaaacaagccagcctcagctccctccctggggtgtgggcaaggggcagatgggctgggaagcagacagaactggtcctctgggcacacatgttactccacctccacctgtgggttcccaggcatgccactgacctgctgcatgaccctgggtgagtcacaacccct

SEQ ID NO: 6083 - protein, 157 aa, Homo sapiens
MMEEIDRFQDPAAASISDGDCDAREEKQRELARKGSLKNGSMGSPVNQQPKKNNVMARTRLVVPNKGYSSLDQSPDEKPLVALDTDSDDDFDMSRYSSSGYSSAEQINQDLNIQLLKDGYRLDEIPDDEDLDLIPPKSVNPTCMCCQATSSTACHIQ

SEQ ID NO: 6084 - DNA, 1894 bp, Homo sapiens
gagtcaccgcagtggctgagctgctgacaggaggcggcagcggagtaggaggcgaggcaagacctgcggctcggcccggccacagccgcggtagtgctaggcaagcccacggagtcacgccggcctcagccagtctgcgaacctctcgcccccgcccacccctgcatccgcccggcccctgcccgcccgagtggtccggggaggcctagtctgcaccacccgccgggctcctggggccgccgccccgcgcggtcctgtcggcgtccgcggccgcgcccggcccctggcccgctcgcccgccggcaccatgatggaggagatcgaccggttccaggtgcccaccgcgcactcggagatgcagccgctggacccagccgccgcctccatctctgacggagactgtgacgcccgggagggtgagtcagtagccatgaattacaaaccatccccgctccaagtgaagctgggtgagtgtgttgtatagggtgtctgtagatcaagatgtgtatacagctgcttctgctattgctggtttgggggaggggactggaaagctgagactgaaaatcaagagggaagaggtgaggaaggcccacccctggggctgggcagtgtagacctgccaccgtgtgaagaaaaatgaaagcacagatagcctaagactgcacaggcctgtgcccacataccttatagcacaggcccaggtggatcatctcatgctaacaccccacatgtgctggtggatccactcccatggatccactcacatgctgcaggcatgcagtagactcacccacagcccactctctggacaccaatcctgggaggtgggagctggaatggggagcaatgagaggagggagtgagactgttggcttaggaagggtggtacctctccctgcatcatacccaggaactgccagctccaaaatattggggtacagctcaccaccccccactccgccaacccattcctacctcctctagtgcagggacccaagttagatgatgagaaaatgccaaacaaagggaggcaaggacagagaaggtacctgcaggacccacaaggcccatactggcccccatctgaacccacctctcccacccagatcaacatccccccaacccctgtgcccccatcatctggaccccagagccagccctcccactaccaccaccaccaccccggggctccttggctcacctttctagaacatgggtacctcctctttttgggggctcatttagactgctgcctttgctgctgacttgcagtgtgactcgggcccattgttcaatctctgtggccctgagacaccagggaaaatctccccccccacaggacatactagttccctggcaggcaagggcttccaactgaggcagtgcatgtgtggcagagagaggcaggaagctggcagtggcagcttctgtgtctagggaggggtgtggctccctccttccctgtctgggaggttggagggaagaatctaggccttagcttgccctcctgccacccttccccttgtagatactgccttaacactccctcctctctcagctgtggctgccacccagccaggtttctccgtgctcactaatttatttccaggaaggtgtgtggaagacatgagccgtgtataatattttttttaacattttcattgcagtattgaccatcatccttggttgtgtatcgtgtaacacaaataatgatattaaaagcatcaaacaagccagcctcagctccctccctggggtgtgggcaaggggcagatgggctgggaagcagacagaactggtcctctgggcacacatgttactccacctccacctgtgggttcccaggcatgccactgacctgctgcatgaccctgggtgagtcacaacccct

SEQ ID NO: 6085 - protein, 58 aa, Homo sapiens
MMEEIDRFQVPTAHSEMQPLDPAAASISDGDCDAREGESVAMNYKPSPLQVKLGECVV

SEQ ID NO: 6086 - DNA, 3840 bp, Homo sapiens
aagatccgggcggtgtcccggacccggaagtggagttgccgagtcaccgcagtggctgagctgctgacaggaggcggcagcggagtaggaggcgaggcaagacctgcggctcggcccggccacagccgcggtagtgctaggcaagcccacggagtcacgccggcctcagccagtctgcgaacctctcgcccccgcccacccctgcatccgcccggcccctgcccgcccgagtggtccggggaggcctagtctgcaccacccgccgggctcctggggccgccgccccgcgcggtcctgtcggcgtccgcggccgcgcccggcccctggcccgctcgcccgccggcaccatgatggaggagatcgaccggttccaggtgcccaccgcgcactcggagatgcagccgctggacccagccgccgcctccatctctgacggagactgtgacgcccgggagggtgagtcagtagccatgaattacaaaccatccccgctccaagtgaagctggagaagcagcgggagctggcccggaagggctccctgaagaatggcagcatgggtagccctgtcaaccagcaacccaagaagaacaatgtcatggcccgaacaaggctggtcgtccccaataaaggctactcctcacttgaccagagccctgatgagaagccactggtagcccttgacacggacagcgatgatgactttgacatgtctagatactcctcctccggctactcctctgctgagcagatcaaccaagatttgaacatccagctgctgaaggacggctaccggttagatgagatccccgacgacgaggacctagacctcatcccccccaagtccgtgaaccccacgtgcatgtgctgccaggccacgtcctccaccgcctgccacattcagtagcgggcggggccactgcggtcgccggggcggggccgccaagggccgggtaggacgggcagaggccgaccccttcccagctcgtctgcctgcccccggccccgcgcccctacagccgccaacctcgtataacagtcattgcttcctcctatggtaggacgtgtacctctgtgtgttcatggagctggagaaaccaaaactgggtctctctccacccgggagctgaggaggggtgggggccgtttgttcagttacctgggggaacctcacccagcaccctgccccgcttcccagggctggccaagagagaagactggacggcagggaggtcaacattaacgagtggggggatcacaaagccaggggcttggccccaccccagcgaagccatgaactcccaagccccggcctcagcctaaccaggaaaggggctcggagggagaaaggcccagggcagtggggacgggtcccagcacctcggagcccccttcacacgccccctaccggcccatgtttctatttgcatttccccctcctcagatgggaagcctggcaaagctgcccaaccgggtagtgcccctcacccatcggatcactgccttcttcctcctcttgccccattcacccgcttccttgcactctgggagtggggcagggtaaggtgggccttacagacaggctgaggtttgggtggtgtgatctgtcctaattggcccctcaccaatgcatctatctgtctgccaccagcccaccccaccctgcccccaccctcacccacgcttctgctcattggtctcaatcccagcctggaagcagggagtaaggctggactccaatggcccattcccctcaccccagcccaagacgtgggaggctgcttcccagtaagaatccaggagcaagctttggtgaatccagtgggctgagtggctctatggatgtggttgtttggatgtggtagggagtgcttagcagaatgtgtgtgtatctctgaggctgtcagggggtgggtgggtgtgtgtctctgttggacctgtctctcctcagtctattcctgtcatagatgtgggtgtccctggtagggaagtgcctgtgtggtctgtttacagtgcagaaggcggctcagcagtgcaatgggctgacagccttggaccgggagtcagaagcctgggttctggttgtagctctggcccctccctgtgatcttcaacaagccacttgctttctctcgtcttcagtttcctcaactagaaaatgaacagcagctgaaattatgttgaagatccttttatacctgaaagagtttcttcatagaaatttctgtggtggggagggggcaatctctgtgtgtctcagtatacctaaaggttggggtggggcggagttgtgtgtctctgtagaaaggcgaaggggcagttcctatcaggactgtgtatgtctgagcacatgtggctctgtttgggattacgtgtttgtctgtgaatgtgtgtgtgtgttggagggttgtctattgtgtgtggctgtatagggtgtctgtagatcaagatgtgtatacagctgcttctgctattgctggtttgggggaggggactggaaagctgagactgaaaatcaagagggaagaggtgaggaaggcccacccctggggctgggcagtgtagacctgccaccgtgtgaagaaaaatgaaagcacagatagcctaagactgcacaggcctgtgcccacataccttatagcacaggcccaggtggatcatctcatgctaacaccccacatgtgctggtggatccactcccatggatccactcacatgctgcaggcatgcagtagactcacccacagcccactctctggacaccaatcctgggaggtgggagctggaatggggagcaatgagaggagggagtgagactgttggcttaggaagggtggtacctctccctgcatcatacccaggaactgccagctccaaaatattggggtacagctcaccaccccccactccgccaacccattcctacctcctctagtgcagggacccaagttagatgatgagaaaatgccaaacaaagggaggcaaggacagagaaggtacctgcaggacccacaaggcccatactggcccccatctgaacccacctctcccacccagatcaacatccccccaacccctgtgcccccatcatctggaccccagagccagccctcccactaccaccaccaccaccccggggctccttggctcacctttctagaacatgggtacctcctctttttgggggctcatttagactgctgcctttgctgctgacttgcagtgtgactcgggcccattgttcaatctctgtggccctgagacaccagggaaaatctccccccccacaggacatactagttccctggcaggcaagggcttccaactgaggcagtgcatgtgtggcagagagaggcaggaagctggcagtggcagcttctgtgtctagggaggggtgtggctccctccttccctgtctgggaggttggagggaagaatctaggccttagcttgccctcctgccacccttccccttgtagatactgccttaacactccctcctctctcagctgtggctgccacccagccaggtttctccgtgctcactaatttatttccaggaaggtgtgtggaagacatgagccgtgtataatattttttttaacattttcattgcagtattgaccatcatccttggttgtgtatcgtgtaacacaaataatgatattaaaagcatcaaacaagccagcctcagctccctccctggggtgtgggcaaggggcagatgggctgggaagcagacagaactggtcctctgggcacacatgttactccacctccacctgtgggttcccaggcatgccactgacctgctgcatgaccctgggtgagtcacaacccct

SEQ ID NO: 6087 - protein, 185 aa, Homo sapiens
MMEEIDRFQVPTAHSEMQPLDPAAASISDGDCDAREGESVAMNYKPSPLQVKLEKQRELARKGSLKNGSMGSPVNQQPKKNNVMARTRLVVPNKGYSSLDQSPDEKPLVALDTDSDDDFDMSRYSSSGYSSAEQINQDLNIQLLKDGYRLDEIPDDEDLDLIPPKSVNPTCMCCQATSSTACHIQ

SEQ ID NO: 6088 - DNA, 3789 bp, Homo sapiens
aagatccgggcggtgtcccggacccggaagtggagttgccgagtcaccgcagtggctgagctgctgacaggaggcggcagcggagtaggaggcgaggcaagacctgcggctcggcccggccacagccgcggtagtgctaggcaagcccacggagtcacgccggcctcagccagtctgcgaacctctcgcccccgcccacccctgcatccgcccggcccctgcccgcccgagtggtccggggaggcctagtctgcaccacccgccgggctcctggggccgccgccccgcgcggtcctgtcggcgtccgcggccgcgcccggcccctggcccgctcgcccgccggcaccatgatggaggagatcgaccggttccaggtgcccaccgcgcactcggagatgcagccgctggacccagccgccgcctccatctctgacggagactgtgacgcccgggaggagaagcagcgggagctggcccggaagggctccctgaagaatggcagcatgggtagccctgtcaaccagcaacccaagaagaacaatgtcatggcccgaacaaggctggtcgtccccaataaaggctactcctcacttgaccagagccctgatgagaagccactggtagcccttgacacggacagcgatgatgactttgacatgtctagatactcctcctccggctactcctctgctgagcagatcaaccaagatttgaacatccagctgctgaaggacggctaccggttagatgagatccccgacgacgaggacctagacctcatcccccccaagtccgtgaaccccacgtgcatgtgctgccaggccacgtcctccaccgcctgccacattcagtagcgggcggggccactgcggtcgccggggcggggccgccaagggccgggtaggacgggcagaggccgaccccttcccagctcgtctgcctgcccccggccccgcgcccctacagccgccaacctcgtataacagtcattgcttcctcctatggtaggacgtgtacctctgtgtgttcatggagctggagaaaccaaaactgggtctctctccacccgggagctgaggaggggtgggggccgtttgttcagttacctgggggaacctcacccagcaccctgccccgcttcccagggctggccaagagagaagactggacggcagggaggtcaacattaacgagtggggggatcacaaagccaggggcttggccccaccccagcgaagccatgaactcccaagccccggcctcagcctaaccaggaaaggggctcggagggagaaaggcccagggcagtggggacgggtcccagcacctcggagcccccttcacacgccccctaccggcccatgtttctatttgcatttccccctcctcagatgggaagcctggcaaagctgcccaaccgggtagtgcccctcacccatcggatcactgccttcttcctcctcttgccccattcacccgcttccttgcactctgggagtggggcagggtaaggtgggccttacagacaggctgaggtttgggtggtgtgatctgtcctaattggcccctcaccaatgcatctatctgtctgccaccagcccaccccaccctgcccccaccctcacccacgcttctgctcattggtctcaatcccagcctggaagcagggagtaaggctggactccaatggcccattcccctcaccccagcccaagacgtgggaggctgcttcccagtaagaatccaggagcaagctttggtgaatccagtgggctgagtggctctatggatgtggttgtttggatgtggtagggagtgcttagcagaatgtgtgtgtatctctgaggctgtcagggggtgggtgggtgtgtgtctctgttggacctgtctctcctcagtctattcctgtcatagatgtgggtgtccctggtagggaagtgcctgtgtggtctgtttacagtgcagaaggcggctcagcagtgcaatgggctgacagccttggaccgggagtcagaagcctgggttctggttgtagctctggcccctccctgtgatcttcaacaagccacttgctttctctcgtcttcagtttcctcaactagaaaatgaacagcagctgaaattatgttgaagatccttttatacctgaaagagtttcttcatagaaatttctgtggtggggagggggcaatctctgtgtgtctcagtatacctaaaggttggggtggggcggagttgtgtgtctctgtagaaaggcgaaggggcagttcctatcaggactgtgtatgtctgagcacatgtggctctgtttgggattacgtgtttgtctgtgaatgtgtgtgtgtgttggagggttgtctattgtgtgtggctgtatagggtgtctgtagatcaagatgtgtatacagctgcttctgctattgctggtttgggggaggggactggaaagctgagactgaaaatcaagagggaagaggtgaggaaggcccacccctggggctgggcagtgtagacctgccaccgtgtgaagaaaaatgaaagcacagatagcctaagactgcacaggcctgtgcccacataccttatagcacaggcccaggtggatcatctcatgctaacaccccacatgtgctggtggatccactcccatggatccactcacatgctgcaggcatgcagtagactcacccacagcccactctctggacaccaatcctgggaggtgggagctggaatggggagcaatgagaggagggagtgagactgttggcttaggaagggtggtacctctccctgcatcatacccaggaactgccagctccaaaatattggggtacagctcaccaccccccactccgccaacccattcctacctcctctagtgcagggacccaagttagatgatgagaaaatgccaaacaaagggaggcaaggacagagaaggtacctgcaggacccacaaggcccatactggcccccatctgaacccacctctcccacccagatcaacatccccccaacccctgtgcccccatcatctggaccccagagccagccctcccactaccaccaccaccaccccggggctccttggctcacctttctagaacatgggtacctcctctttttgggggctcatttagactgctgcctttgctgctgacttgcagtgtgactcgggcccattgttcaatctctgtggccctgagacaccagggaaaatctccccccccacaggacatactagttccctggcaggcaagggcttccaactgaggcagtgcatgtgtggcagagagaggcaggaagctggcagtggcagcttctgtgtctagggaggggtgtggctccctccttccctgtctgggaggttggagggaagaatctaggccttagcttgccctcctgccacccttccccttgtagatactgccttaacactccctcctctctcagctgtggctgccacccagccaggtttctccgtgctcactaatttatttccaggaaggtgtgtggaagacatgagccgtgtataatattttttttaacattttcattgcagtattgaccatcatccttggttgtgtatcgtgtaacacaaataatgatattaaaagcatcaaacaagccagcctcagctccctccctggggtgtgggcaaggggcagatgggctgggaagcagacagaactggtcctctgggcacacatgttactccacctccacctgtgggttcccaggcatgccactgacctgctgcatgaccctgggtgagtcacaacccct

SEQ ID NO: 6089 - protein, 168 aa, Homo sapiens; identical to SEQ ID NO: 615

SEQ ID NO: 6090 - DNA, 942 bp, Homo sapiens
catccagctgctgaaggacggctaccggttagatgagatccccgacgacgaggacctagacctcatcccccccaagtccgtgaaccccacgtgcatgtgctgccaggccacgtcctccaccgcctgccacattcagtagcgggcggggccactgcggtcgccggggcggggccgccaagggccgggtaggacgggcagaggccgaccccttcccagctcgtctgcctgcccccggccccgcgcccctacagccgccaacctcgtataacagtcattgcttcctcctatggtaggacgtgtacctctgtgtgttcatggagctggagaaaccaaaactgggtctctctccacccgggagctgaggaggggtgggggccgtttgttcagttacctgggggaacctcacccagcaccctgccccgcttcccagggctggccaagagagaagactggacggcagggaggtcaacattaacgagtggggggatcacaaagccaggggcttggccccaccccagcgaagccatgaactcccaagccccggcctcagcctaaccaggaaaggggctcggagggagaaaggcccagggcagtggggacgggtcccagcacctcggagcccccttcacacgccccctaccggcccatgtttctatttgcatttccccctcctcagatgggaagcctggcaaagctgcccaaccgggtagtgcccctcacccttccccttgtagatactgccttaacactccctcctctctcagctgtggctgccacccagccaggtttctccgtgctcactaatttatttccaggaaggtgtgtggaagacatgagccgtgtataatattttttttaacattttcattgcagtattgaccatcatccttggttgtgtatcgtgtaacacaaataatgatattaaaagcatcaaacaagcca

SEQ ID NO: 6091 - protein, 66 aa, Homo sapiens
MFLFAFPPPQMGSLAKLPNRVVPLTLPLVDTALTLPPLSAVAATQPGFSVLTNLFPGRCVEDMSRV

SEQ ID NO: 6092 - DNA, 1882 bp, Homo sapiens
gggtaaggtgggccttacagacaggctgaggtttgggtggtgtgatctgtcctaattggcccctcaccaatgcatctatctgtctgccaccagcccaccccaccctgcccccaccctcacccacgcttctgctcattggtctcaatcccagcctggaagcagggagtaaggctggactccaatggcccattcccctcaccccagcccaagacgtgggaggctgcttcccagtaagaatccaggagcaagctttggtgaatccagtgggctgagtggctctatggatgtggttgtttggatgtggtagggagtgcttagcagaatgtgtgtgtatctctgaggctgtcagggggtgggtgggtgtgtgtctctgttggacctgtctctcctcagtctattcctgtcatagatgtgggtgtccctggtagggaagtgcctgtgtggtctgtttacagtgcagaaggcggctcagcagtgcaatgggctgacagccttggaccgggagtcagaagcctgggttctggttgtagctctggcccctccctgtgatcttcaacaagccacttgctttctctcgtcttcagtttcctcaactagaaaatgaacagcagctgaaattatgttgaagatccttttatacctgaaagagtttcttcatagaaatttctgtggtggggagggggcaatctctgtgtgtctcagtatacctaaaggttggggtggggcggagttgtgtgtctctgtagaaaggcgaaggggcagttcctatcaggactgtgtatgtctgagcacatgtggctctgtttgggattacgtgtttgtctgtgaatgtgtgtgtgtgttggagggttgtctattgtgtgtggctgtatagggtgtctgtagatcaagatgtgtatacagctgcttctgctattgctggtttgggggaggggactggaaagctgagactgaaaatcaagagggaagaggtgggagctggaatggggagcaatgagaggagggagtgagactgttggcttaggaagggtggtacctctccctgcatcatacccaggaactgccagctccaaaatattggggtacagctcaccaccccccactccgccaacccattcctacctcctctagtgcagggacccaagttagatgatgagaaaatgccaaacaaagggaggcaaggacagagaaggtacctgcaggacccacaaggcccatactggcccccatctgaacccacctctcccacccagatcaacatccccccaacccctgtgcccccatcatctggaccccagagccagccctcccactaccaccaccaccaccccggggctccttggctcacctttctagaacatgggtacctcctctttttgggggctcatttagactgctgcctttgctgctgacttgcagtgtgactcgggcccattgttcaatctctgtggccctgagacaccagggaaaatctccccccccacaggacatactagttccctggcaggcaagggcttccaactgaggcagtgcatgtgtggcagagagaggcaggaagctggcagtggcagcttctgtgtctagggaggggtgtggctccctccttccctgtctgggaggttggagggaagaatctaggccttagcttgccctcctgccacccttccccttgtagatactgccttaacactccctcctctctcagctgtggctgccacccagccaggtttctccgtgctcactaatttatttccaggaaggtgtgtggaagacatgagccgtgtataatattttttttaacattttcattgcagtattgaccatcatccttggttgtgtatcgtgtaacacaaataatgatattaaaagcatcaaacaagcc

SEQ ID NO: 6093 - protein, 84 aa, Homo sapiens [sequence omitted]

SEQ ID NO: 6094 - DNA, 3609 bp, Homo sapiens
gtcaccgcagtggctgagctgctgacaggaggcggcagcggagtaggaggcgaggcaagacctgcggctcggcccggccacagccgcggtagtgctaggcaagcccacggagtcacgccggcctcagccagtctgcgaacctctcgcccccgcccacccctgcatccgcccggcccctgcccgcccgagtggtccggggaggcctagtctgcaccacccgccgggctcctggggccgccgccccgcgcggtcctgtcggcgtccgcggccgcgcccggcccctggcccgctcgcccgccggcaccatgatggaggagatcgaccggttccaggacccagccgccgcctccatctctgacggagactgtgacgcccgggagggtgagtcagtagccatgaattacaaaccatccccgctccaagtgaagctggagaagcagcgggagctggcccggaagggctccctgaagaatggcagcatgggtagccctgtcaaccagcaacccaagaagaacaatgtcatggcccgaacaaggctggtcgtccccaataaaggctactcctcacttgaccagagccctgatgagaagccactggtagcccttgacacggacagcgatgatgactttgacatgtctagatactcctcctccggctactcctctgctgagcagatcaaccaagatttgaacatccagctgctgaaggacggctaccggttagatgagatccccgacgacgaggacctagacctcatcccccccaagtccgtgaaccccacgtgcatgtgctgccaggccacgtcctccaccgcctgccacattcagtagcgggcggggccactgcggtcgccggggcggggccgccaagggccgggtaggacgggcagaggccgaccccttcccagctcgtctgcctgcccccggccccgcgcccctacagccgccaacctcgtataacagtcattgcttcctcctatggtaggacgtgtacctctgtgtgttcatggagctggagaaaccaaaactgggtctctctccacccgggagctgaggaggggtgggggccgtttgttcagttacctgggggaacctcacccagcaccctgccccgcttcccagggctggccaagagagaagactggacggcagggaggtcaacattaacgagtggggggatcacaaagccaggggcttggccccaccccagcgaagccatgaactcccaagccccggcctcagcctaaccaggaaaggggctcggagggagaaaggcccagggcagtggggacgggtcccagcacctcggagcccccttcacacgccccctaccggcccatgtttctatttgcatttccccctcctcagatgggaagcctggcaaagctgcccaaccgggtagtgcccctcacccatcggatcactgccttcttcctcctcttgccccattcacccgcttccttgcactctgggagtggggcagggtaaggtgggccttacagacaggctgaggtttgggtggtgtgatctgtcctaattggcccctcaccaatgcatctatctgtctgccaccagcccaccccaccctgcccccaccctcacccacgcttctgctcattggtctcaatcccagcctggaagcagggagtaaggctggactccaatggcccattcccctcaccccagcccaagacgtgggaggctgcttcccagtaagaatccaggagcaagctttggtgaatccagtgggctgagtggctctatggatgtggttgtttggatgtggtagggagtgcttagcagaatgtgtgtgtatctctgaggctgtcagggggtgggtgggtgtgtgtctctgttggacctgtctctcctcagtctattcctgtcatagatgtgggtgtccctggtagggaagtgcctgtgtggtctgtttacagtgcagaaggcggctcagcagtgcaatgggctgacagccttggaccgggagtcagaagcctgggttctggttgtagctctggcccctccctgtgatcttcaacaagccacttgctttctctcgtcttcagtttcctcaactagaaaatgaacagcagctgaaattatgttgaagatccttttatacctgaaagagtttcttcatagaaatttctgtggtggggagggggcaatctctgtgtgtctcagtatacctaaaggttggggtggggcggagttgtgtgtctctgtagaaaggcgaaggggcagttcctatcaggactgtgtatgtctgagcacatgtggctctgtttgggattacgtgtttgtctgtgaatgtgtgtgtgtgttggagggttgtctattgtgtgtggctgtatagggtgtctgtagatcaagatgtgtatacagctgcttctgctattgctggtttgggggaggggactggaaagctgagactgaaaatcaagagggaagaggtgaggaaggcccacccctggggctgggcagtgtagacctgccaccgtgtgaagaaaaatgaaagcacagatagcctaagactgcacaggcctgtgcccacataccttatagcacaggcccaggtggatcatctcatgctaacaccccacatgtgctggtggatccactcccatggatccactcacatgctgcaggcatgcagtagactcacccacagcccactctctggacaccaatcctgggaggtgggagctggaatggggagcaatgagaggagggagtgagactgttggcttaggaagggtggtacctctccctgcatcatacccaggaactgccagctccaaaatattggggtacagctcaccaccccccactccgccaacccattcctacctcctctagtgcagggacccaagttagatgatgagaaaatgccaaacaaagggaggcaaggacagagaaggtacctgcaggacccacaaggcccatactggcccccatctgaacccacctctcccacccagatcaacatccccccaacccctgtgcccccatcatctggaccccagagccagccctcccactaccaccaccaccaccccggggctccttggctcacctttctagaacatgggtacctcctctttttgggggctcatttagactgctgcctttgctgctgacttgcagtgtgactcgggcccattgttcaatctctgtggccctgagacaccagggaaaatctccccccccacaggacatactagttccctggcaggcaagggcttccaactgaggcagtgcatgtgtggcagagagaggcaggaagctggcagtggcagcttctgtgtctagggaggggtgtggctccctccttccctgtctgggaggttggagggaagaatctaggccttagcttgccctcctgccacccttccccttgtagatactgccttaacactccctcctctctcagctgtggctgccacccagccaggtttctccgtgctcactaatttatttccaggaaggtgtgtggaagacatgagccgtgtataatattttttttaacattttcattgcagtattgaccatcatccttggttgtgtatcgtgtaacacaaataatgatattaaaagcatcaaacaagcc

SEQ ID NO: 6095 - protein, 174 aa, Homo sapiens; identical to SEQ ID NO: 6081

SEQ ID NO: 6096 - DNA, 3279 bp, Homo sapiens
gagtcaccgcagtggctgagctgctgacaggaggcggcagcggagtaggaggcgaggcaagacctgcggctcggcccggccacagccgcggtagtgctaggcaagcccacggagtcacgccggcctcagccagtctgcgaacctctcgcccccgcccacccctgcatccgcccggcccctgcccgcccgagtggtccggggagcatgatggaggagatcgaccggttccaggacccagccgccgcctccatctctgacggagactgtgacgcccgggaggagaagcagcgggagctggcccggaagggctccctgaagaatggcagcatgggtagccctgtcaaccagcaacccaagaagaacaatgtcatggcccgaacaaggctggtcgtccccaataaaggctactcctcacttgaccagagccctgatgagaagccactggtagcccttgacacggacagcgatgatgactttgacatgtctagatactcctcctccggctactcctctgctgagcagatcaaccaagatttgaacatccagctgctgaaggacggctaccggttagatgagatccccgacgacgaggacctagacctcatcccccccaagtccgtgaaccccacgtgcatgtgctgccaggccacgtcctccaccgcctgccacattcagtagcgggcggggccactgcggtcgccggggcggggccgccaagggccgggtaggacgggcagaggccgaccccttcccagctcgtctgcctgcccccggccccgcgcccctacagccgccaacctcgtataacagtcattgcttcctcctatggtaggacgtgtacctctgtgtgttcatggagctggagaaaccaaaactgggtctctctccacccgggagctgaggaggggtgggggccgtttgttcagttacctgggggaacctcacccagcaccctgccccgcttcccagggctggccaagagagaagactggacggcagggaggtcaacattaacgagtggggggatcacaaagccaggggcttggccccaccccagcgaagccatgaactcccaagccccggcctcagcctaaccaggaaaggggctcggagggagaaaggcccagggcagtggggacgggtcccagcacctcggagcccccttcacacgccccctaccggcccatgtttctatttgcatttccccctcctcagatgggaagcctggcaaagctgcccaaccgggtagtgcccctcacccatcggatcactgccttcttcctcctcttgccccattcacccgcttccttgcactctgggagtggggcagggtaaggtgggccttacagacaggctgaggtttgggtggtgtgatctgtcctaattggcccctcaccaatgcatctatctgtctgccaccagcccaccccaccctgcccccaccctcacccacgcttctgctcattggtctcaatcccagcctggaagcagggagtaaggctggactccaatggcccattcccctcaccccagcccaagacgtgggaggctgcttcccagtaagaatccaggagcaagctttggtgaatccagtgggctgagtggctctatggatgtggttgtttggatgtggtagggagtgcttagcagaatgtgtgtgtatctctgaggctgtcagggggtgggtgggtgtgtgtctctgttggacctgtctctcctcagtctattcctgtcatagatgtgggtgtccctggtagggaagtgcctgtgtggtctgtttacagtgtatacctgaaagagtttcttcatagaaatttctgtggtggggagggggcaatctctgtgtgtctcagtatacctaaaggttggggtggggcggagttgtgtgtctctgtagaaaggcgaaggggcagttcctatcaggactgtgtatgtctgagcacatgtggctctgtttgggattacgtgtttgtctgtgaatgtgtgtgtgtgttggagggttgtctattgtgtgtggctgtatagggtgtctgtagatcaagatgtgtatacagctgcttctgctattgctggtttgggggaggggactggaaagctgagactgaaaatcaagagggaagaggtgaggaaggcccacccctggggctgggcagtgtagacctgccaccgtgtgaagaaaaatgaaagcacagatagcctaagactgcacaggcctgtgcccacataccttatagcacaggcccaggtggatcatctcatgctaacaccccacatgtgctggtggatccactcccatggatccactcacatgctgcaggcatgcagtagactcacccacagcccactctctggacaccaatcctgggaggtgggagctggaatggggagcaatgagaggagggagtgagactgttggcttaggaagggtggtacctctccctgcatcatacccaggaactgccagctccaaaatattggggtacagctcaccaccccccactccgccaacccattcctacctcctctagtgcagggacccaagttagatgatgagaaaatgccaaacaaagggaggcaaggacagagaaggtacctgcaggacccacaaggcccatactggcccccatctgaacccacctctcccacccagatcaacatccccccaacccctgtgcccccatcatctggaccccagagccagccctcccactaccaccaccaccaccccggggctccttggctcacctttctagaacatgggtacctcctctttttgggggctcatttagactgctgcctttgctgctgacttgcagtgtgactcgggcccattgttcaatctctgtggccctgagacaccagggaaaatctccccccccacaggacatactagttccctggcaggcaagggcttccaactgaggcagtgcatgtgtggcagagagaggcaggaagctggcagtggcagcttctgtgtctagggaggggtgtggctccctccttccctgtctgggaggttggagggaagaatctaggccttagcttgccctcctgccacccttccccttgtagatactgccttaacactccctcctctctcagctgtggctgccacccagccaggtttctccgtgctcactaatttatttccaggaaggtgtgtggaagacatgagccgtgtataatattttttttaacattttcattgcagtattgaccatcatccttggttgtgtatcgtgtaacacaaataatgatattaaaagcatcaaacaagcc

SEQ ID NO: 6097 - protein, 157 aa, Homo sapiens; identical to SEQ ID NO: 6083

SEQ ID NO: 6098 - DNA, 1738 bp, Homo sapiens
gagtcaccgcagtggctgagctgctgacaggaggcggcagcggagtaggaggcgaggcaagacctgcggctcggcccggccacagccgcggtagtgctaggcaagcccacggagtcacgccggcctcagccagtctgcgaacctctcgcccccgcccacccctgcatccgcccggcccctgcccgcccgagtggtccggggaggcctagtctgcaccacccgccgggctcctggggccgccgccccgcgcggtcctgtcggcgtccgcggccgcgcccggcccctggcccgctcgcccgccggcaccatgatggaggagatcgaccggttccaggtgcccaccgcgcactcggagatgcagccgctggacccagccgccgcctccatctctgacggagactgtgacgcccgggagggtgagtcagtagccatgaattacaaaccatccccgctccaagtgaagctgggtgagtgtgttgtatagggtgtctgtagatcaagatgtgtatacagctgcttctgctattgctggtttgggggaggggactggaaagctgagactgaaaatcaagagggaagaggtgaggaaggcccacccctggggctgggcagtgtagacctgccaccgtgtgaagaaaaatgaaagcacagatagcctaagactgcacaggcctgtgcccacataccttatagcacaggcccaggtggatcatctcatgctaacaccccacatgtgctggtggatccactcccatggatccactcacatgctgcaggcatgcagtagactcacccacagcccactctctggacaccaatcctgggaggtgggagctggaatggggagcaatgagaggagggagtgagactgttggcttaggaagggtggtacctctccctgcatcatacccaggaactgccagctccaaaatattggggtacagctcaccaccccccactccgccaacccattcctacctcctctagtgcagggacccaagttagatgatgagaaaatgccaaacaaagggaggcaaggacagagaaggtacctgcaggacccacaaggcccatactggcccccatctgaacccacctctcccacccagatcaacatccccccaacccctgtgcccccatcatctggaccccagagccagccctcccactaccaccaccaccaccccggggctccttggctcacctttctagaacatgggtacctcctctttttgggggctcatttagactgctgcctttgctgctgacttgcagtgtgactcgggcccattgttcaatctctgtggccctgagacaccagggaaaatctccccccccacaggacatactagttccctggcaggcaagggcttccaactgaggcagtgcatgtgtggcagagagaggcaggaagctggcagtggcagcttctgtgtctagggaggggtgtggctccctccttccctgtctgggaggttggagggaagaatctaggccttagcttgccctcctgccacccttccccttgtagatactgccttaacactccctcctctctcagctgtggctgccacccagccaggtttctccgtgctcactaatttatttccaggaaggtgtgtggaagacatgagccgtgtataatattttttttaacattttcattgcagtattgaccatcatccttggttgtgtatcgtgtaacacaaataatgatattaaaagcatcaaacaagcc

SEQ ID NO: 6099 - protein, 58 aa, Homo sapiens; identical to SEQ ID NO: 6085

SEQ ID NO: 6100 - DNA, 3684 bp, Homo sapiens
aagatccgggcggtgtcccggacccggaagtggagttgccgagtcaccgcagtggctgagctgctgacaggaggcggcagcggagtaggaggcgaggcaagacctgcggctcggcccggccacagccgcggtagtgctaggcaagcccacggagtcacgccggcctcagccagtctgcgaacctctcgcccccgcccacccctgcatccgcccggcccctgcccgcccgagtggtccggggaggcctagtctgcaccacccgccgggctcctggggccgccgccccgcgcggtcctgtcggcgtccgcggccgcgcccggcccctggcccgctcgcccgccggcaccatgatggaggagatcgaccggttccaggtgcccaccgcgcactcggagatgcagccgctggacccagccgccgcctccatctctgacggagactgtgacgcccgggagggtgagtcagtagccatgaattacaaaccatccccgctccaagtgaagctggagaagcagcgggagctggcccggaagggctccctgaagaatggcagcatgggtagccctgtcaaccagcaacccaagaagaacaatgtcatggcccgaacaaggctggtcgtccccaataaaggctactcctcacttgaccagagccctgatgagaagccactggtagcccttgacacggacagcgatgatgactttgacatgtctagatactcctcctccggctactcctctgctgagcagatcaaccaagatttgaacatccagctgctgaaggacggctaccggttagatgagatccccgacgacgaggacctagacctcatcccccccaagtccgtgaaccccacgtgcatgtgctgccaggccacgtcctccaccgcctgccacattcagtagcgggcggggccactgcggtcgccggggcggggccgccaagggccgggtaggacgggcagaggccgaccccttcccagctcgtctgcctgcccccggccccgcgcccctacagccgccaacctcgtataacagtcattgcttcctcctatggtaggacgtgtacctctgtgtgttcatggagctggagaaaccaaaactgggtctctctccacccgggagctgaggaggggtgggggccgtttgttcagttacctgggggaacctcacccagcaccctgccccgcttcccagggctggccaagagagaagactggacggcagggaggtcaacattaacgagtggggggatcacaaagccaggggcttggccccaccccagcgaagccatgaactcccaagccccggcctcagcctaaccaggaaaggggctcggagggagaaaggcccagggcagtggggacgggtcccagcacctcggagcccccttcacacgccccctaccggcccatgtttctatttgcatttccccctcctcagatgggaagcctggcaaagctgcccaaccgggtagtgcccctcacccatcggatcactgccttcttcctcctcttgccccattcacccgcttccttgcactctgggagtggggcagggtaaggtgggccttacagacaggctgaggtttgggtggtgtgatctgtcctaattggcccctcaccaatgcatctatctgtctgccaccagcccaccccaccctgcccccaccctcacccacgcttctgctcattggtctcaatcccagcctggaagcagggagtaaggctggactccaatggcccattcccctcaccccagcccaagacgtgggaggctgcttcccagtaagaatccaggagcaagctttggtgaatccagtgggctgagtggctctatggatgtggttgtttggatgtggtagggagtgcttagcagaatgtgtgtgtatctctgaggctgtcagggggtgggtgggtgtgtgtctctgttggacctgtctctcctcagtctattcctgtcatagatgtgggtgtccctggtagggaagtgcctgtgtggtctgtttacagtgcagaaggcggctcagcagtgcaatgggctgacagccttggaccgggagtcagaagcctgggttctggttgtagctctggcccctccctgtgatcttcaacaagccacttgctttctctcgtcttcagtttcctcaactagaaaatgaacagcagctgaaattatgttgaagatccttttatacctgaaagagtttcttcatagaaatttctgtggtggggagggggcaatctctgtgtgtctcagtatacctaaaggttggggtggggcggagttgtgtgtctctgtagaaaggcgaaggggcagttcctatcaggactgtgtatgtctgagcacatgtggctctgtttgggattacgtgtttgtctgtgaatgtgtgtgtgtgttggagggttgtctattgtgtgtggctgtatagggtgtctgtagatcaagatgtgtatacagctgcttctgctattgctggtttgggggaggggactggaaagctgagactgaaaatcaagagggaagaggtgaggaaggcccacccctggggctgggcagtgtagacctgccaccgtgtgaagaaaaatgaaagcacagatagcctaagactgcacaggcctgtgcccacataccttatagcacaggcccaggtggatcatctcatgctaacaccccacatgtgctggtggatccactcccatggatccactcacatgctgcaggcatgcagtagactcacccacagcccactctctggacaccaatcctgggaggtgggagctggaatggggagcaatgagaggagggagtgagactgttggcttaggaagggtggtacctctccctgcatcatacccaggaactgccagctccaaaatattggggtacagctcaccaccccccactccgccaacccattcctacctcctctagtgcagggacccaagttagatgatgagaaaatgccaaacaaagggaggcaaggacagagaaggtacctgcaggacccacaaggcccatactggcccccatctgaacccacctctcccacccagatcaacatccccccaacccctgtgcccccatcatctggaccccagagccagccctcccactaccaccaccaccaccccggggctccttggctcacctttctagaacatgggtacctcctctttttgggggctcatttagactgctgcctttgctgctgacttgcagtgtgactcgggcccattgttcaatctctgtggccctgagacaccagggaaaatctccccccccacaggacatactagttccctggcaggcaagggcttccaactgaggcagtgcatgtgtggcagagagaggcaggaagctggcagtggcagcttctgtgtctagggaggggtgtggctccctccttccctgtctgggaggttggagggaagaatctaggccttagcttgccctcctgccacccttccccttgtagatactgccttaacactccctcctctctcagctgtggctgccacccagccaggtttctccgtgctcactaatttatttccaggaaggtgtgtggaagacatgagccgtgtataatattttttttaacattttcattgcagtattgaccatcatccttggttgtgtatcgtgtaacacaaataatgatattaaaagcatcaaacaagcc

SEQ ID NO: 6101 - protein, 185 aa, Homo sapiens; identical to SEQ ID NO: 6087

SEQ ID NO: 6102 - DNA, 3600 bp, Homo sapiens
aagatccgggcggtgtcccggacccggaagtggagttgccgagtcaccgcagtggctgagctgctgacaggaggcggcagcggagtaggaggcgaggcaagacctgcggctcggcccggccacagccgcggtagtgctaggcaagcccacggagtcacgccggcctcagccagtctgcgaacctctcgcccccgcccacccctgcatccgcccggcccctgcccgcccgagtggtccggggaggcctagtctgcaccacccgccgggctcctggggccgccgccccgcgcggtcctgtcggcgtccgcggccgcgcccggcccctggcccgctcgcccgccggcaccatgatggaggagatcgaccggttccaggacccagccgccgcctccatctctgacggagactgtgacgcccgggaggagaagcagcgggagctggcccggaagggctccctgaagaatggcagcatgggtagccctgtcaaccagcaacccaagaagaacaatgtcatggcccgaacaaggctggtcgtccccaataaaggctactcctcacttgaccagagccctgatgagaagccactggtagcccttgacacggacagcgatgatgactttgacatgtctagatactcctcctccggctactcctctgctgagcagatcaaccaagatttgaacatccagctgctgaaggacggctaccggttagatgagatccccgacgacgaggacctagacctcatcccccccaagtccgtgaaccccacgtgcatgtgctgccaggccacgtcctccaccgcctgccacattcagtagcgggcggggccactgcggtcgccggggcggggccgccaagggccgggtaggacgggcagaggccgaccccttcccagctcgtctgcctgcccccggccccgcgcccctacagccgccaacctcgtataacagtcattgcttcctcctatggtaggacgtgtacctctgtgtgttcatggagctggagaaaccaaaactgggtctctctccacccgggagctgaggaggggtgggggccgtttgttcagttacctgggggaacctcacccagcaccctgccccgcttcccagggctggccaagagagaagactggacggcagggaggtcaacattaacgagtggggggatcacaaagccaggggcttggccccaccccagcgaagccatgaactcccaagccccggcctcagcctaaccaggaaaggggctcggagggagaaaggcccagggcagtggggacgggtcccagcacctcggagcccccttcacacgccccctaccggcccatgtttctatttgcatttccccctcctcagatgggaagcctggcaaagctgcccaaccgggtagtgcccctcacccatcggatcactgccttcttcctcctcttgccccattcacccgcttccttgcactctgggagtggggcagggtaaggtgggccttacagacaggctgaggtttgggtggtgtgatctgtcctaattggcccctcaccaatgcatctatctgtctgccaccagcccaccccaccctgcccccaccctcacccacgcttctgctcattggtctcaatcccagcctggaagcagggagtaaggctggactccaatggcccattcccctcaccccagcccaagacgtgggaggctgcttcccagtaagaatccaggagcaagctttggtgaatccagtgggctgagtggctctatggatgtggttgtttggatgtggtagggagtgcttagcagaatgtgtgtgtatctctgaggctgtcagggggtgggtgggtgtgtgtctctgttggacctgtctctcctcagtctattcctgtcatagatgtgggtgtccctggtagggaagtgcctgtgtggtctgtttacagtgcagaaggcggctcagcagtgcaatgggctgacagccttggaccgggagtcagaagcctgggttctggttgtagctctggcccctccctgtgatcttcaacaagccacttgctttctctcgtcttcagtttcctcaactagaaaatgaacagcagctgaaattatgttgaagatccttttatacctgaaagagtttcttcatagaaatttctgtggtggggagggggcaatctctgtgtgtctcagtatacctaaaggttggggtggggcggagttgtgtgtctctgtagaaaggcgaaggggcagttcctatcaggactgtgtatgtctgagcacatgtggctctgtttgggattacgtgtttgtctgtgaatgtgtgtgtgtgttggagggttgtctattgtgtgtggctgtatagggtgtctgtagatcaagatgtgtatacagctgcttctgctattgctggtttgggggaggggactggaaagctgagactgaaaatcaagagggaagaggtgaggaaggcccacccctggggctgggcagtgtagacctgccaccgtgtgaagaaaaatgaaagcacagatagcctaagactgcacaggcctgtgcccacataccttatagcacaggcccaggtggatcatctcatgctaacaccccacatgtgctggtggatccactcccatggatccactcacatgctgcaggcatgcagtagactcacccacagcccactctctggacaccaatcctgggaggtgggagctggaatggggagcaatgagaggagggagtgagactgttggcttaggaagggtggtacctctccctgcatcatacccaggaactgccagctccaaaatattggggtacagctcaccaccccccactccgccaacccattcctacctcctctagtgcagggacccaagttagatgatgagaaaatgccaaacaaagggaggcaaggacagagaaggtacctgcaggacccacaaggcccatactggcccccatctgaacccacctctcccacccagatcaacatccccccaacccctgtgcccccatcatctggaccccagagccagccctcccactaccaccaccaccaccccggggctccttggctcacctttctagaacatgggtacctcctctttttgggggctcatttagactgctgcctttgctgctgacttgcagtgtgactcgggcccattgttcaatctctgtggccctgagacaccagggaaaatctccccccccacaggacatactagttccctggcaggcaagggcttccaactgaggcagtgcatgtgtggcagagagaggcaggaagctggcagtggcagcttctgtgtctagggaggggtgtggctccctccttccctgtctgggaggttggagggaagaatctaggccttagcttgccctcctgccacccttccccttgtagatactgccttaacactccctcctctctcagctgtggctgccacccagccaggtttctccgtgctcactaatttatttccaggaaggtgtgtggaagacatgagccgtgtataatattttttttaacattttcattgcagtattgaccatcatccttggttgtgtatcgtgtaacacaaataatgatattaaaagcatcaaacaagcc

SEQ ID NO: 6103 - protein, 157 aa, Homo sapiens; identical to SEQ ID NO: 6083

SEQ ID NO: 6104 - DNA, 3633 bp, Homo sapiens
aagatccgggcggtgtcccggacccggaagtggagttgccgagtcaccgcagtggctgagctgctgacaggaggcggcagcggagtaggaggcgaggcaagacctgcggctcggcccggccacagccgcggtagtgctaggcaagcccacggagtcacgccggcctcagccagtctgcgaacctctcgcccccgcccacccctgcatccgcccggcccctgcccgcccgagtggtccggggaggcctagtctgcaccacccgccgggctcctggggccgccgccccgcgcggtcctgtcggcgtccgcggccgcgcccggcccctggcccgctcgcccgccggcaccatgatggaggagatcgaccggttccaggtgcccaccgcgcactcggagatgcagccgctggacccagccgccgcctccatctctgacggagactgtgacgcccgggaggagaagcagcgggagctggcccggaagggctccctgaagaatggcagcatgggtagccctgtcaaccagcaacccaagaagaacaatgtcatggcccgaacaaggctggtcgtccccaataaaggctactcctcacttgaccagagccctgatgagaagccactggtagcccttgacacggacagcgatgatgactttgacatgtctagatactcctcctccggctactcctctgctgagcagatcaaccaagatttgaacatccagctgctgaaggacggctaccggttagatgagatccccgacgacgaggacctagacctcatcccccccaagtccgtgaaccccacgtgcatgtgctgccaggccacgtcctccaccgcctgccacattcagtagcgggcggggccactgcggtcgccggggcggggccgccaagggccgggtaggacgggcagaggccgaccccttcccagctcgtctgcctgcccccggccccgcgcccctacagccgccaacctcgtataacagtcattgcttcctcctatggtaggacgtgtacctctgtgtgttcatggagctggagaaaccaaaactgggtctctctccacccgggagctgaggaggggtgggggccgtttgttcagttacctgggggaacctcacccagcaccctgccccgcttcccagggctggccaagagagaagactggacggcagggaggtcaacattaacgagtggggggatcacaaagccaggggcttggccccaccccagcgaagccatgaactcccaagccccggcctcagcctaaccaggaaaggggctcggagggagaaaggcccagggcagtggggacgggtcccagcacctcggagcccccttcacacgccccctaccggcccatgtttctatttgcatttccccctcctcagatgggaagcctggcaaagctgcccaaccgggtagtgcccctcacccatcggatcactgccttcttcctcctcttgccccattcacccgcttccttgcactctgggagtggggcagggtaaggtgggccttacagacaggctgaggtttgggtggtgtgatctgtcctaattggcccctcaccaatgcatctatctgtctgccaccagcccaccccaccctgcccccaccctcacccacgcttctgctcattggtctcaatcccagcctggaagcagggagtaaggctggactccaatggcccattcccctcaccccagcccaagacgtgggaggctgcttcccagtaagaatccaggagcaagctttggtgaatccagtgggctgagtggctctatggatgtggttgtttggatgtggtagggagtgcttagcagaatgtgtgtgtatctctgaggctgtcagggggtgggtgggtgtgtgtctctgttggacctgtctctcctcagtctattcctgtcatagatgtgggtgtccctggtagggaagtgcctgtgtggtctgtttacagtgcagaaggcggctcagcagtgcaatgggctgacagccttggaccgggagtcagaagcctgggttctggttgtagctctggcccctccctgtgatcttcaacaagccacttgctttctctcgtcttcagtttcctcaactagaaaatgaacagcagctgaaattatgttgaagatccttttatacctgaaagagtttcttcatagaaatttctgtggtggggagggggcaatctctgtgtgtctcagtatacctaaaggttggggtggggcggagttgtgtgtctctgtagaaaggcgaaggggcagttcctatcaggactgtgtatgtctgagcacatgtggctctgtttgggattacgtgtttgtctgtgaatgtgtgtgtgtgttggagggttgtctattgtgtgtggctgtatagggtgtctgtagatcaagatgtgtatacagctgcttctgctattgctggtttgggggaggggactggaaagctgagactgaaaatcaagagggaagaggtgaggaaggcccacccctggggctgggcagtgtagacctgccaccgtgtgaagaaaaatgaaagcacagatagcctaagactgcacaggcctgtgcccacataccttatagcacaggcccaggtggatcatctcatgctaacaccccacatgtgctggtggatccactcccatggatccactcacatgctgcaggcatgcagtagactcacccacagcccactctctggacaccaatcctgggaggtgggagctggaatggggagcaatgagaggagggagtgagactgttggcttaggaagggtggtacctctccctgcatcatacccaggaactgccagctccaaaatattggggtacagctcaccaccccccactccgccaacccattcctacctcctctagtgcagggacccaagttagatgatgagaaaatgccaaacaaagggaggcaaggacagagaaggtacctgcaggacccacaaggcccatactggcccccatctgaacccacctctcccacccagatcaacatccccccaacccctgtgcccccatcatctggaccccagagccagccctcccactaccaccaccaccaccccggggctccttggctcacctttctagaacatgggtacctcctctttttgggggctcatttagactgctgcctttgctgctgacttgcagtgtgactcgggcccattgttcaatctctgtggccctgagacaccagggaaaatctccccccccacaggacatactagttccctggcaggcaagggcttccaactgaggcagtgcatgtgtggcagagagaggcaggaagctggcagtggcagcttctgtgtctagggaggggtgtggctccctccttccctgtctgggaggttggagggaagaatctaggccttagcttgccctcctgccacccttccccttgtagatactgccttaacactccctcctctctcagctgtggctgccacccagccaggtttctccgtgctcactaatttatttccaggaaggtgtgtggaagacatgagccgtgtataatattttttttaacattttcattgcagtattgaccatcatccttggttgtgtatcgtgtaacacaaataatgatattaaaagcatcaaacaagcc

SEQ ID NO: 6105 - protein, 168 aa, Homo sapiens; identical to SEQ ID NO: 615

SEQ ID NO: 6106 - DNA, 1090 bp, Homo sapiens
aagatccgggcggtgtcccggacccggaagtggagttgccgagtcaccgcagtggctgagctgctgacaggaggcggcagcggagtaggaggcgaggcaagacctgcggctcggcccggccacagccgcggtagtgctaggcaagcccacggagtcacgccggcctcagccagtctgcgaacctctcgcccccgcccacccctgcatccgcccggcccctgcccgcccgagtggtccggggaggcctagtctgcaccacccgccgggctcctggggccgccgccccgcgcggtcctgtcggcgtccgcggccgcgcccggcccctggcccgctcgcccgccggcaccatgatggaggagatcgaccggttccaggtgcccaccgcgcactcggagatgcagccgctggacccagccgccgcctccatctctgacggagactgtgacgcccgggagggtgagtcagtagccatgaattacaaaccatccccgctccaagtgaagctggagaagcagcgggagctggcccggaagggctccctgaagaatggcagcatgggtagccctgtcaaccagcaacccaagaagaacaatgtcatggcccgaacaaggctggtcgtccccaataaaggctactcctcacttgaccagagccctgatgagaagccactggtagcccttgacacggacaggtgtgtatgggggcttgggggtagctgggcagcccaaaggaacctgtatagcacaagtgggctgtacaggccacacctgctatattgtcagaattgggatattcttcagccagaatctctccaagggtgaattctccagggatgggaatttttttacaccagggactgggggttgaagagaggtggcagagagaggaaaggggggcctgcgttgtctgctgtcatcctgggacaactgatccaatggttgtccctaattggcctgtgatgttgtctctggacagcagaatatgatgcttaatgccccatcccctcaggaaggagccctactccctggaaaacacctggctagacttggactttgggaatatcctacaagtcagggtgatttgagtctac

SEQ ID NO: 6107 - protein, 157 aa, Homo sapiens
MMEEIDRFQVPTAHSEMQPLDPAAASISDGDCDAREGESVAMNYKPSPLQVKLEKQRELARKGSLKNGSMGSPVNQQPKKNNVMARTRLVVPNKGYSSLDQSPDEKPLVALDTDRCVWGLGGSWAAQRNLYSTSGLYRPHLLYCQNWDILQPESLQG

SEQ ID NO: 6108 - DNA, 3198 bp, Homo sapiens
gggggcggggccttgccgctgcggaggccggagacgcggcggcgctggacgcggaggcgctgggcgcacggcgcggagccggccggagctcgaggccggcggcggcgggagagcgacccgggcggcctcgtagcggggccccggatccccgagtggcggccggagcctcgaaaagagattctcagcgctgattttgagatgatgggcttgggaaacgggcgtcgcagcatgaagtcgccgcccctcgtgctggccgccctggtggcctgcatcatcgtcttgggcttcaactactggattgcgagctcccggagcgtggacctccagacacggatcatggagctggaaggcagggtccgcagggcggctgcagagagaggcgccgtggagctgaagaagaacgagttccagggagagctggagaagcagcgggagcagcttgacaaaatccagtccagccacaacttccagctggagagcgtcaacaagctgtaccaggacgaaaaggcggttttggtgaataacatcaccacaggtgagaggctcatccgagtgctgcaagaccagttaaagaccctgcagaggaattacggcaggctgcagcaggatgtcctccagtttcagaagaaccagaccaacctggagaggaagttctcctacgacctgagccagtgcatcaatcagatgaaggaggtgaaggaacagtgtgaggagcgaatagaagaggtcaccaaaaaggggaatgaagctgtagcttccagagacctgagtgaaaacaacgaccagagacagcagctccaagccctcagtgagcctcagcccaggctgcaggcagcaggcctgccacacacagaggtgccacaagggaagggaaacgtgcttggtaacagcaagtcccagacaccagcccccagttccgaagtggttttggattcaaagagacaagttgagaaagaggaaaccaatgagatccaggtggtgaatgaggagcctcagagggacaggctgccgcaggagccaggccgggagcaggtggtggaagacagacctgtaggtggaagaggcttcgggggagccggagaactgggccagaccccacaggtgcaggctgccctgtcagtgagccaggaaaatccagagatggagggccctgagcgagaccagcttgtcatccccgacggacaggaggaggagcaggaagctgccggggaagggagaaaccagcagaaactgagaggagaagatgactacaacatggatgaaaatgaagcagaatctgagacagacaagcaagcagccctggcagggaatgacagaaacatagatgtttttaatgttgaagatcagaaaagagacaccataaatttacttgatcagcgtgaaaagcggaatcatacactctgaattgaactggaatcacatatttcacaacagggccgaagagatgactataaaatgttcatgagggactgaatactgaaaactgtgaaatgtactaaataaaatgtacatctgaagatgattattgtgaaattttagtatgcactttgtgtaggaaaaaatggaatggtcttttaaacagcttttggggggtactttggaagtgtctaataaggtgtcacaatttttggtagtaggtatttcgtgagaagttcaacaccaaaactggaacatagttctccttcaagtgttggcgacagcggggcttcctgattctggaatataactttgtgtaaattaacagccacctatagaagagtccatctgctgtgaaggagagacagagaactctgggttccgtcgtcctgtccacgtgctgtaccaagtgctggtgccagcctgttacctgttctcactgaaaagtctggctaatgctcttgtgtagtcacttctgattctgacaatcaatcaatcaatggcctagagcactgactgttaacacaaacgtcactagcaaagtagcaacagctttaagtctaaatacaaagctgttctgtgtgagaattttttaaaaggctacttgtataataacccttgtcatttttaatgtacaaaacgctattaagtggcttagaatttgaacatttgtggtctttatttactttgcttcgtgtgtgggcaaagcaacatcttccctaaatatatattaccaagaaaagcaagaagcagattaggtttttgacaaaacaaacaggccaaaagggggctgacctggagcagagcatggtgagaggcaaggcatgagagggcaagtttgttgtggacagatctgtgcctactttattactggagtaaaagaaaacaaagttcattgatgtcgaaggatatatacagtgttagaaattaggactgtttagaaaaacaggaatacaatggttgtttttatcatagtgtacacatttagcttgtggtaaatgactcacaaaactgattttaaaatcaagttaatgtgaattttgaaaattactacttaatcctaattcacaataacaatggcattaaggtttgacttgagttggttcttagtattatttatggtaaataggctcttaccacttgcaaataactggccacatcattaatgactgacttcccagtaaggctctctaaggggtaagtaggaggatccacaggatttgagatgctaaggccccagagatcgtttgatccaaccctcttattttcagaggggaaaatggggcctagaagttacagagcatctagctggtgcgctggcacccctggcctcacacagactcccgagtagctgggactacaggcacacagtcactgaagcaggccctgtttgcaattcacgttgccacctccaacttaaacattcttcatatgtgatgtccttagtcactaaggttaaactttcccacccagaaaaggcaacttagataaaatcttagagtactttcatactcttctaagtcctcttccagcctcactttgagtcctccttggggttgataggaattttctcttgctttctcaataaagtctctattcatctcatgtttaatttgtacgcatagaattgctgagaaataaaatgttctgttcaacttataaaacttgtcacagctctgtttttttgcttttccccttcatcctctattagatccttaaagaatccaccctcaaactgtggactaaggatggcagtttgccttaaaccttctgtggaatgag

SEQ ID NO: 6109 - protein, 401 aa, Homo sapiens
MMGLGNGRRSMKSPPLVLAALVACIIVLGFNYWIASSRSVDLQTRIMELEGRVRRAAAERGAVELKKNEFQGELEKQREQLDKIQSSHNFQLESVNKLYQDEKAVLVNNITTGERLIRVLQDQLKTLQRNYGRLQQDVLQFQKNQTNLERKFSYDLSQCINQMKEVKEQCEERIEEVTKKGNEAVASRDLSENNDQRQQLQALSEPQPRLQAAGLPHTEVPQGKGNVLGNSKSQTPAPSSEVVLDSKRQVEKEETNEIQVVNEEPQRDRLPQEPGREQVVEDRPVGGRGFGGAGELGQTPQVQAALSVSQENPEMEGPERDQLVIPDGQEEEQEAAGEGRNQQKLRGEDDYNMDENEAESETDKQAALAGNDRNIDVFNVEDQKRDTINLLDQREKRNHTL

SEQ ID NO: 6110 - DNA, 3198 bp, Homo sapiens
gtttcaaatgcagctgcccgggctataagatcacacccgaaggcgtccgggaatcttcactttttccgttgctagcagtggaagggtcacagaccaaacactaaggcctgagcggtgacaaccgaggcgagatgatggtcaacagggaatgcctcgtgggagaaaaaagacaattttattctcagcgctgattttgagatgatgggcttgggaaacgggcgtcgcagcatgaagtcgccgcccctcgtgctggccgccctggtggcctgcatcatcgtcttgggcttcaactactggattgcgagctcccggagcgtggacctccagacacggatcatggagctggaaggcagggtccgcagggcggctgcagagagaggcgccgtggagctgaagaagaacgagttccagggagagctggagaagcagcgggagcagcttgacaaaatccagtccagccacaacttccagctggagagcgtcaacaagctgtaccaggacgaaaaggcggttttggtgaataacatcaccacaggtgagaggctcatccgagtgctgcaagaccagttaaagaccctgcagaggaattacggcaggctgcagcaggatgtcctccagtttcagaagaaccagaccaacctggagaggaagttctcctacgacctgagccagtgcatcaatcagatgaaggaggtgaaggaacagtgtgaggagcgaatagaagaggtcaccaaaaaggggaatgaagctgtagcttccagagacctgagtgaaaacaacgaccagagacagcagctccaagccctcagtgagcctcagcccaggctgcaggcagcaggcctgccacacacagaggtgccacaagggaagggaaacgtgcttggtaacagcaagtcccagacaccagcccccagttccgaagtggttttggattcaaagagacaagttgagaaagaggaaaccaatgagatccaggtggtgaatgaggagcctcagagggacaggctgccgcaggagccaggccgggagcaggtggtggaagacagacctgtaggtggaagaggcttcgggggagccggagaactgggccagaccccacaggtgcaggctgccctgtcagtgagccaggaaaatccagagatggagggccctgagcgagaccagcttgtcatccccgacggacaggaggaggagcaggaagctgccggggaagggagaaaccagcagaaactgagaggagaagatgactacaacatggatgaaaatgaagcagaatctgagacagacaagcaagcagccctggcagggaatgacagaaacatagatgtttttaatgttgaagatcagaaaagagacaccataaatttacttgatcagcgtgaaaagcggaatcatacactctgaattgaactggaatcacatatttcacaacagggccgaagagatgactataaaatgttcatgagggactgaatactgaaaactgtgaaatgtactaaataaaatgtacatctgaagatgattattgtgaaattttagtatgcactttgtgtaggaaaaaatggaatggtcttttaaacagcttttggggggtactttggaagtgtctaataaggtgtcacaatttttggtagtaggtatttcgtgagaagttcaacaccaaaactggaacatagttctccttcaagtgttggcgacagcggggcttcctgattctggaatataactttgtgtaaattaacagccacctatagaagagtccatctgctgtgaaggagagacagagaactctgggttccgtcgtcctgtccacgtgctgtaccaagtgctggtgccagcctgttacctgttctcactgaaaagtctggctaatgctcttgtgtagtcacttctgattctgacaatcaatcaatcaatggcctagagcactgactgttaacacaaacgtcactagcaaagtagcaacagctttaagtctaaatacaaagctgttctgtgtgagaattttttaaaaggctacttgtataataacccttgtcatttttaatgtacaaaacgctattaagtggcttagaatttgaacatttgtggtctttatttactttgcttcgtgtgtgggcaaagcaacatcttccctaaatatatattaccaagaaaagcaagaagcagattaggtttttgacaaaacaaacaggccaaaagggggctgacctggagcagagcatggtgagaggcaaggcatgagagggcaagtttgttgtggacagatctgtgcctactttattactggagtaaaagaaaacaaagttcattgatgtcgaaggatatatacagtgttagaaattaggactgtttagaaaaacaggaatacaatggttgtttttatcatagtgtacacatttagcttgtggtaaatgactcacaaaactgattttaaaatcaagttaatgtgaattttgaaaattactacttaatcctaattcacaataacaatggcattaaggtttgacttgagttggttcttagtattatttatggtaaataggctcttaccacttgcaaataactggccacatcattaatgactgacttcccagtaaggctctctaaggggtaagtaggaggatccacaggatttgagatgctaaggccccagagatcgtttgatccaaccctcttattttcagaggggaaaatggggcctagaagttacagagcatctagctggtgcgctggcacccctggcctcacacagactcccgagtagctgggactacaggcacacagtcactgaagcaggccctgtttgcaattcacgttgccacctccaacttaaacattcttcatatgtgatgtccttagtcactaaggttaaactttcccacccagaaaaggcaacttagataaaatcttagagtactttcatactcttctaagtcctcttccagcctcactttgagtcctccttggggttgataggaattttctcttgctttctcaataaagtctctattcatctcatgtttaatttgtacgcatagaattgctgagaaataaaatgttctgttcaacttataaaacttgtcacagctctgtttttttgcttttccccttcatcctctattagatccttaaagaatccaccctcaaactgtggactaaggatggcagtttgccttaaaccttctgtggaatgag

SEQ ID NO: 6111 - protein, 401 aa, Homo sapiens; identical to SEQ ID NO: 6109

SEQ ID NO: 6112 - DNA, 3076 bp, Homo sapiens
gggggcggggccttgccgctgcggaggccggagacgcggcggcgctggacgcggaggcgctgggcgcacggcgcggagccggccggagctcgaggccggcggcggcgggagagcgacccgggcggcctcgtagcggggccccggatccccgagtggcggccggagcctcgaaaagagattctcagcgctgattttgagatgatgggcttgggaaacgggcgtcgcagcatgaagtcgccgcccctcgtgctggccgccctggtggcctgcatcatcgtcttgggcttcaactactggattgcgagctcccggagcgtggacctccagacacggatcatggagctggaaggcagggtccgcagggcggctgcagagagaggcgccgtggagctgaagaagaacgagttccagggagagctggagaagcagcgggagcagcttgacaaaatccagtccagccacaacttccagctggagagcgtcaacaagctgtaccaggacgaaaaggcggttttggtgaataacatcaccacaggtgagaggctcatccgagtgctgcaagaccagttaaagaccctgcagaggaattacggcaggctgcagcaggatgtcctccagtttcagaagaaccagaccaacctggagaggaagttctcctacgacctgagccagtgcatcaatcagatgaaggaggtgaaggaacagtgtgaggagcgaatagaagaggtcaccaaaaaggggaatgaagctgtagcttccagagacctgagtgaaaacaacgaccagagacagcagctccaagccctcagtgagcctcagcccaggctgcaggcagcaggcctgccacacacagaggtgccacaagggaagggaaacgtgcttggtaacagcaagtcccagacaccagcccccagttccgaagtggttttggattcaaagagacaagttgagaaagaggaaaccaatgagatccaggtggtgaatgaggagcctcagagggacaggctgccgcaggagccaggccgggagcaggtggtggaagacagacctgtaggtggaagaggcttcgggggagccggagaactgggccagaccccacaggtgcaggctgccctgtcagtgagccaggaaaatccagagatggagggccctgagcgagaccagcttgtcatccccgacggacaggaggaggagcaggaagctgccggggaagggagaaaccagcagaaactgagaggagaagatgactacaacatggatgaaaatgaagcagaatctgagacagacaagcaagcagccctggcagggaatgacagaaacatagatgtttttaatgttgaagatcagaaaagagacaccataaatttacttgatcagcgtgaaaagcggaatcatacactctgaattgaactggaatcacatatttcacaacagggccgaagagatgactataaaatgttcatgagggactgaatactgaaaactgtgaaatgtactaaataaaatgtacatctgaagatgattattgtgaaattttagtatgcactttgtgtaggaaaaaatggaatggtcttttaaacagcttttggggggtactttggaagtgtctaataaggtgtcacaatttttggtagtaggtatttcgtgagaagttcaacaccaaaactggaacatagttctccttcaagtgttggcgacagcggggcttcctgattctggaatataactttgtgtaaattaacagccacctatagaagagtccatctgctgtgaaggagagacagagaactctgggttccgtcgtcctgtccacgtgctgtaccaagtgctggtgccagcctgttacctgttctcactgaaaagtctggctaatgctcttgtgtagtcacttctgattctgacaatcaatcaatcaatggcctagagcactgactgttaacacaaacgtcactagcaaagtagcaacagctttaagtctaaatacaaagctgttctgtgtgagaattttttaaaaggctacttgtataataacccttgtcatttttaatgtacaaaacgctattaagtggcttagaatttgaacatttgtggtctttatttactttgcttcgtgtgtgggcaaagcaacatcttccctaaatatatattaccaagaaaagcaagaagcagattaggtttttgacaaaacaaacaggccaaaagggggctgacctggagcagagcatggtgagaggcaaggcatgagagggcaagtttgttgtggacagatctgtgcctactttattactggagtaaaagaaaacaaagttcattgatgtcgaaggatatatacagtgttagaaattaggactgtttagaaaaacaggaatacaatggttgtttttatcatagtgtacacatttagcttgtggtaaatgactcacaaaactgattttaaaatcaagttaatgtgaattttgaaaattactacttaatcctaattcacaataacaatggcattaaggtttgacttgagttggttcttagtattatttatggtaaataggctcttaccacttgcaaataactggccacatcattaatgactgacttcccagtaaggctctctaaggggtaagtaggaggatccacaggatttgagatgctaaggccccagagatcgtttgatccaaccctcttattttcagaggggaaaatggggcctagaagttacagagcatctagctggtgcgctggcacccctggcctcacacagactcccgagtagctgggactacaggcacacagtcactgaagcaggccctgtttgcaattcacgttgccacctccaacttaaacattcttcatatgtgatgtccttagtcactaaggttaaactttcccacccagaaaaggcaacttagataaaatcttagagtactttcatactcttctaagtcctcttccagcctcactttgagtcctccttggggttgataggaattttctcttgctttctcaataaagtctctattcatctcatgtttaatttgtacgcatagaattgctgagaaataaaatgttctgttcaacttat

SEQ ID NO: 6113 - protein, 401 aa, Homo sapiens; identical to SEQ ID NO: 6109

SEQ ID NO: 6114 - DNA, 3076 bp, Homo sapiens
gtttcaaatgcagctgcccgggctataagatcacacccgaaggcgtccgggaatcttcactttttccgttgctagcagtggaagggtcacagaccaaacactaaggcctgagcggtgacaaccgaggcgagatgatggtcaacagggaatgcctcgtgggagaaaaaagacaattttattctcagcgctgattttgagatgatgggcttgggaaacgggcgtcgcagcatgaagtcgccgcccctcgtgctggccgccctggtggcctgcatcatcgtcttgggcttcaactactggattgcgagctcccggagcgtggacctccagacacggatcatggagctggaaggcagggtccgcagggcggctgcagagagaggcgccgtggagctgaagaagaacgagttccagggagagctggagaagcagcgggagcagcttgacaaaatccagtccagccacaacttccagctggagagcgtcaacaagctgtaccaggacgaaaaggcggttttggtgaataacatcaccacaggtgagaggctcatccgagtgctgcaagaccagttaaagaccctgcagaggaattacggcaggctgcagcaggatgtcctccagtttcagaagaaccagaccaacctggagaggaagttctcctacgacctgagccagtgcatcaatcagatgaaggaggtgaaggaacagtgtgaggagcgaatagaagaggtcaccaaaaaggggaatgaagctgtagcttccagagacctgagtgaaaacaacgaccagagacagcagctccaagccctcagtgagcctcagcccaggctgcaggcagcaggcctgccacacacagaggtgccacaagggaagggaaacgtgcttggtaacagcaagtcccagacaccagcccccagttccgaagtggttttggattcaaagagacaagttgagaaagaggaaaccaatgagatccaggtggtgaatgaggagcctcagagggacaggctgccgcaggagccaggccgggagcaggtggtggaagacagacctgtaggtggaagaggcttcgggggagccggagaactgggccagaccccacaggtgcaggctgccctgtcagtgagccaggaaaatccagagatggagggccctgagcgagaccagcttgtcatccccgacggacaggaggaggagcaggaagctgccggggaagggagaaaccagcagaaactgagaggagaagatgactacaacatggatgaaaatgaagcagaatctgagacagacaagcaagcagccctggcagggaatgacagaaacatagatgtttttaatgttgaagatcagaaaagagacaccataaatttacttgatcagcgtgaaaagcggaatcatacactctgaattgaactggaatcacatatttcacaacagggccgaagagatgactataaaatgttcatgagggactgaatactgaaaactgtgaaatgtactaaataaaatgtacatctgaagatgattattgtgaaattttagtatgcactttgtgtaggaaaaaatggaatggtcttttaaacagcttttggggggtactttggaagtgtctaataaggtgtcacaatttttggtagtaggtatttcgtgagaagttcaacaccaaaactggaacatagttctccttcaagtgttggcgacagcggggcttcctgattctggaatataactttgtgtaaattaacagccacctatagaagagtccatctgctgtgaaggagagacagagaactctgggttccgtcgtcctgtccacgtgctgtaccaagtgctggtgccagcctgttacctgttctcactgaaaagtctggctaatgctcttgtgtagtcacttctgattctgacaatcaatcaatcaatggcctagagcactgactgttaacacaaacgtcactagcaaagtagcaacagctttaagtctaaatacaaagctgttctgtgtgagaattttttaaaaggctacttgtataataacccttgtcatttttaatgtacaaaacgctattaagtggcttagaatttgaacatttgtggtctttatttactttgcttcgtgtgtgggcaaagcaacatcttccctaaatatatattaccaagaaaagcaagaagcagattaggtttttgacaaaacaaacaggccaaaagggggctgacctggagcagagcatggtgagaggcaaggcatgagagggcaagtttgttgtggacagatctgtgcctactttattactggagtaaaagaaaacaaagttcattgatgtcgaaggatatatacagtgttagaaattaggactgtttagaaaaacaggaatacaatggttgtttttatcatagtgtacacatttagcttgtggtaaatgactcacaaaactgattttaaaatcaagttaatgtgaattttgaaaattactacttaatcctaattcacaataacaatggcattaaggtttgacttgagttggttcttagtattatttatggtaaataggctcttaccacttgcaaataactggccacatcattaatgactgacttcccagtaaggctctctaaggggtaagtaggaggatccacaggatttgagatgctaaggccccagagatcgtttgatccaaccctcttattttcagaggggaaaatggggcctagaagttacagagcatctagctggtgcgctggcacccctggcctcacacagactcccgagtagctgggactacaggcacacagtcactgaagcaggccctgtttgcaattcacgttgccacctccaacttaaacattcttcatatgtgatgtccttagtcactaaggttaaactttcccacccagaaaaggcaacttagataaaatcttagagtactttcatactcttctaagtcctcttccagcctcactttgagtcctccttggggttgataggaattttctcttgctttctcaataaagtctctattcatctcatgtttaatttgtacgcatagaattgctgagaaataaaatgttctgttcaacttat

SEQ ID NO: 6115 - protein, 401 aa, Homo sapiens; identical to SEQ ID NO: 6109

SEQ ID NO: 6116 - DNA, 2065 bp, Homo sapiens
ccgctgcggaggccggagacgcggcggcgctggacgcggaggcgctgggcgcacggcgcggagccggccggagctcgaggccggcggcggcgggagagcgacccgggcggcctcgtagcggggccccggatccccgagtggcggccggagcctcgaaaagagattctcagcgctgattttgagatgatgggcttgggaaacgggcgtcgcagcatgaagtcgccgcccctcgtgctggccgccctggtggcctgcatcatcgtcttgggcttcaactactggattgcgagctcccggagcgtggacctccagacacggatcatggagctggaaggcagggtccgcagggcggctgcagagagaggcgccgtggagctgaagaagaacgagttccagggagagctggagaagcagcgggagcagcttgacaaaatccagtccagccacaacttccagctggagagcgtcaacaagctgtaccaggacgaaaaggcggttttggtgaataacatcaccacaggtgagaggctcatccgagtgctgcaagaccagttaaagaccctgcagaggaattacggcaggctgcagcaggatgtcctccagtttcagaagaaccagaccaacctggagaggaagttctcctacgacctgagccagtgcatcaatcagatgaaggaggtgaaggaacagtgtgaggagcgaatagaagaggtcaccaaaaaggggaatgaagctgtagcttccagagacctgagtgaaaacaacgaccagagacagcagctccaagccctcagtgagcctcagcccaggctgcaggcagcaggcctgccacacacagaggtgccacaagggaagggaaacgtgcttggtaacagcaagtcccagacaccagcccccagttccgaagtggttttggattcaaagagacaagttgagaaagaggaaaccaatgagatccaggtggtgaatgaggagcctcagagggacaggctgccgcaggagccaggccgggagcaggtggtggaagacagacctgtaggtggaagaggcttcgggggagccggagaactgggccagaccccacaggtgcaggctgccctgtcagtgagccaggaaaatccagagatggagggccctgagcgagaccagcttgtcatccccgacggacaggaggaggagcaggaagctgccggggaagggagaaaccagcagaaactgagaggagaagatgactacaacatggatgaaaatgaagcagaatctgagacagacaagcaagcagccctggcagggaatgacagaaacatagatgtttttaatgttgaagatcagaaaagagacaccataaatttacttgatcagcgtgaaaagcggaatcatacactctgaattgaactggaatcacatatttcacaacagggccgaagagatgactataaaatgttcatgagggactgaatactgaaaactgtgaaatgtactaaataaaatgtacatctgaagatgattattgtgaaattttagtatgcactttgtgtaggaaaaaatggaatggtcttttaaacagcttttggggggtactttggaagtgtctaataaggtgtcacaatttttggtagtaggtatttcgtgagaagttcaacaccaaaactggaacatagttctccttcaagtgttggcgacagcggggcttcctgattctggaatataactttgtgtaaattaacagccacctatagaagagtccatctgctgtgaaggagagacagagaactctgggttccgtcgtcctgtccacgtgctgtaccaagtgctggtgccagcctgttacctgttctcactgaaaagtctggctaatgctcttgtgtagtcacttctgattctgacaatcaatcaatcaatggcctagagcactgactgttaacacaaacgtcactagcaaagtagcaacagctttaagtctaaatacaaagctgttctgtgtgagaattttttaaaaggctacttgtataataacccttgtcatttttaatgtacaaaacgctattaagtggcttagaatttg

SEQ ID NO: 6117 - protein, 401 aa, Homo sapiens; identical to SEQ ID NO: 6109

SEQ ID NO: 6118 - DNA, 1509 bp, Homo sapiens
ccgctgcggaggccggagacgcggcggcgctggacgcggaggcgctgggcgcacggcgcggagccggccggagctcgaggccggcggcggcgggagagcgacccgggcggcctcgtagcggggccccggatccccgagtggcggccggagcctcgaaaagagattctcagcgctgattttgagatgatgggcttgggaaacgggcgtcgcagcatgaagtcgccgcccctcgtgctggccgccctggtggcctgcatcatcgtcttgggcttcaactactggattgcgagctcccggagcgtggacctccagacacggatcatggagctggaaggcagggtccgcagggcggctgcagagagaggcgccgtggagctgaagaagaacgagttccagggagagctggagaagcagcgggagcagcttgacaaaatccagtccagccacaacttccagctggagagcgtcaacaagctgtaccaggacgaaaaggcggttttggtgaataacatcaccacaggtgagaggctcatccgagtgctgcaagaccagttaaagaccctgcagaggaattacggcaggctgcagcaggatgtcctccagtttcagaagaaccagaccaacctggagaggaagttctcctacgacctgagccagtgcatcaatcagatgaaggaggtgaaggaacagtgtgaggagcgaatagaagaggtcaccaaaaaggggaatgaagctgtagcttccagagacctgagtgaaaacaacgaccagagacagcagctccaagccctcagtgagcctcagcccaggctgcaggcagcaggcctgccacacacagaggtgccacaagggaagggaaacgtgcttggtaacagcaagtcccagacaccagcccccagttccgaagtggttttggattcaaagagacaagttgagaaagaggaaaccaatgagatccaggtggtgaatgaggagcctcagagggacaggctgccgcaggagccaggccgggagcaggtggtggaagacagacctgtaggtggaagaggcttcgggggagccggagaactgggccagaccccacaggtgcaggctgccctgtcagtgagccaggaaaatccagagatggagggccctgagcgagaccagcttgtcatccccgacggacaggaggaggagcaggaagctgccggggaagggagaaaccagcagaaactgagaggagaagatgactacaacatggatgaaaatgaagcagaatctgagacagacaagcaagcagccctggcagggaatgacagaaacatagatgtttttaatgttgaagatcagaaaagagacaccataaatttacttgatcagcgtgaaaagcggaatcatacactctgaattgaactggaatcacatatttcacaacagggccgaagagatgactataaaatgttcatgagggactgaatactgaaaactgtgaaatgtactaaataaaatgtacatctgaagatgatt

SEQ ID NO: 6119 - protein, 401 aa, Homo sapiens; identical to SEQ ID NO: 6109

SEQ ID NO: 6120 - DNA, 2771 bp, Homo sapiens
agacaaaacgatcgcggttaaagcttgcggctcagagcccacctggccgcgctgctgggaaacggacggagcggcgcttcaatcagaggtattactcagcacagaaattcaggagacacagacaagttcttccacgatgtcgtacagacgagaactagagaaataccgtgacctggatgaagatgaaatccttggagccctaacagaggaagagctgaggaccctggaaaatgagctggatgagctggaccctgataatgcactgctgcctgcaggcctgaggcagaaggatcagaccaccaaggcgcccacgggcccctttaaaagagaggagctcttggatcacttggaaaagcaagcaaaggagtttaaggaccgagaagatctggtcccctacacaggggaaaaacgaggaaaggtctgggttcctaagcagaagccactggatcctgtgctggaaagtgtgacgctggaaccggagctggaggaagccttggcaaatgcttcagatgcagaactctgtgacattgcagcgatcctgggcatgcacacgctcatgagtaaccagcagtactaccaggccctgagcagcagctccatcatgaacaaggaggggctcaacagcgtgattaaacccacacaatacaagcctgtgcccgacgaagaaccaaattcaacagacgtagaggaaacgctggaacggataaagaacaacgacccaaaacttgaagaagttaacctcaataatatccggaatatccccatccccaccctcaaggcatatgcagaagccctgaaagaaaactcatatgtgaagaagttcagcatcgtggggacacggagtaatgaccccgtggcgtatgcccttgctgagatgctcaaggagaacaaggtgttgaagacactgaatgtggaatccaacttcatttctggagctgggattctgcgcctggtagaagccctcccatacaacacttctctggtggaaatgaaaattgacaaccagagccagcccctgggcaacaaagtggaaatggagattgtgagcatgttggaaaaaaacgcaacacttctcaaattcggctaccactttacccagcaaggaccccggcttcgggcatccaacgcaatgatgaacaacaatgaccttgtgaggaagaggaggcttgcggacctgactgggcccatcattcccaagtgccggagtggtgtctagtgtgtggcggtggagtccatgcctttgaactggatgtgttctattgatgacctgtgctctgcaggggaaaccagaaggcaaaatgctggcagcatgaaacccttttgtggttcagttctttatgcactaaggttttaggttgactagtggttgtagttgaaaattttataaaataccgttaatgtgaagtttttctttagtcacagaagttgaatctggttattatttaaaaactagaagcccccaaaccagcagatcttactgaagatgatgttccagcagcagcgacttagccccaggagcccagtttcaatggccttgctgtgtggtgtttcaagtgcatttaaaatgtgtgacacagaaacggcacactcttccacatgcttttgaagtattataaaacactttattacaaatttgtcttagctattagcaaataaaactgattatcattctttattaaccctccttggaattttgaaaacctcgattaaagttgccaaattgattactggatccagaacacaattttcccctcagaacagatagacagactgaagccactgaactctgccaggagtcaacatgagattccttttgctggatatgcagaaatgataggaaaaaaaccaatggtgaaatttcaagtttcaaaaaccaacctttcattaccaatcccaggcaacaaacatgtccctgagtgttctttaagaacatttgggatttatgtacaatttaatactggagttagaactttttccttattgaatgccaaccttatgatggatgtgaaaatctacggccaaatacttttgaaaacacctttctatattgcacagtgggcaaatggcttatgtgaggtaagacactagagggataaatttccagatcaacatggctatggtatttagtaatggcccagcttagagacttcagctactgatctcatcacttattagacaaattgctgctgaccttacgcctgtatattaagcctccgcaggatgccggacaatggtgaagaaactccagatatcaaggaattgggaaatcctggccaaaccaccccaagatgattacactgaaatgtagtattagtactgctgccagatctctttttaacatcatgtgcgtctcttgggatccagcaaaagtgttaagccacaatgcccttgtgccttttaatataccacagtgccagttaaactaatatttttgtttgttgcttttgggagttattttcattagtgatttcagcaaatctcatgataaaggacaaggtcaagaactccagagcactgagcagagaggctggtgatgaaaaggtgaaggcctgcgcactgaactgtaaggcagtgggcagtacagggtaactggaggcggggccagggcctcagcgctatggaagagtgtccactgaggctgcacatggcccaggagtggcaccatgttgcagggacaaccatccccatttggcttctccttaaaacacaattgcagctgcattctgcatcgctgaaaactgcaatataatattaaatctgttggtctatgc

SEQ ID NO: 6121 - protein, 359 aa, Homo sapiens; identical to SEQ ID NO: 617

SEQ ID NO: 6122 - DNA, 3265 bp, Homo sapiens
agacaaaacgatcgcggttaaagcttgcggctcagagcccacctggccgcgctgctgggaaacggacggagcggcgcttcaatcagaggtattactcagcacagaaattcaggagacacagacaagttcttccacgatgtcgtacagacgagaactagagaaataccgtgacctggatgaagatgaaatccttggagccctaacagaggaagagctgaggaccctggaaaatgagctggatgagctggaccctgataatgcactgctgcctgcaggcctgaggcagaaggatcagaccaccaaggcgcccacgggcccctttaaaagagaggagctcttggatcacttggaaaagcaagcaaaggagtttaaggaccgagaagatctggtcccctacacaggggaaaaacgaggaaaggtctgggttcctaagcagaagccactggatcctgtgctggaaagtgtgacgctggaaccggagctggaggaagccttggcaaatgcttcagatgcagaactctgtgacattgcagcgatcctgggcatgcacacgctcatgagtaaccagcagtactaccaggccctgagcagcagctccatcatgaacaaggaggggctcaacagcgtgattaaacccacacaatacaagcctgtgcccgacgaagaaccaaattcaacagacgtagaggaaacgctggaacggataaagaacaacgacccaaaacttgaagaagttaacctcaataatatccggaatatccccatccccaccctcaaggcatatgcagaagccctgaaagaaaactcatatgtgaagaagttcagcatcgtggggacacggagtaatgaccccgtggcgtatgcccttgctgagatgctcaaggagaacaaggtgttgaagacactgaatgtggaatccaacttcatttctggagctgggattctgcgcctggtagaagccctcccatacaacacttctctggtggaaatgaaaattgacaaccagagccagcccctgggcaacaaagtggaaatggagattgtgagcatgttggaaaaaaacgcaacacttctcaaattcggctaccactttacccagcaaggaccccggcttcgggcatccaacgcaatgatgaacaacaatgaccttgtgaggaagaggaggcttgcggacctgactgggcccatcattcccaagtgccggagtggtgtctagtgtgtggcggtggagtccatgcctttgaactggatgtgttctattgatgacctgtgctctgcaggggaaaccagaaggcaaaatgctggcagcatgaaacccttttgtggttcagttctttatgcactaaggttttaggttgactagtggttgtagttgaaaattttataaaataccgttaatgtgaagtttttctttagtcacagaagttgaatctggttattatttaaaaactagaagcccccaaaccagcagatcttactgaagatgatgttccagcagcagcgacttagccccaggagcccagtttcaatggccttgctgtgtggtgtttcaagtgcatttaaaatgtgtgacacagaaacggcacactcttccacatgcttttgaagtattataaaacactttattacaaatttgtcttagctattagcaaataaaactgattatcattctttattaaccctccttggaattttgaaaacctcgattaaagttgccaaattgattactggatccagaacacaattttcccctcagaacagatagacagactgaagccactgaactctgccaggagtcaacatgagattccttttgctggatatgcagaaatgataggaaaaaaaccaatggtgaaatttcaagtttcaaaaaccaacctttcattaccaatcccaggcaacaaacatgtccctgagtgttctttaagaacatttgggatttatgtacaatttaatactggagttagaactttttccttattgaatgccaaccttatgatggatgtgaaaatctacggccaaatacttttgaaaacacctttctatattgcacagtgggcaaatggcttatgtgaggtaagacactagagggataaatttccagatcaacatggctatggtatttagtaatggcccagcttagagacttcagctactgatctcatcacttattagacaaattgctgctgaccttacgcctgtatattaagcctccgcaggatgccggacaatggtgaagaaactccagatatcaaggaattgggaaatcctggccaaaccaccccaagatgattacactgaaatgtagtattagtactgctgccagatctctttttaacatcatgtgcgtctcttgggatccagcaaaagtgttaagccacaatgcccttgtgccttttaatataccacagtgccagttaaactaatatttttgtttgttgcttttgggagttattttcattagtgatttcagcaaatctcatgataaaggacaaggtcaagaactccagagcactgagcagagaggctggtgatgaaaaggtgaaggcctgcgcactgaactgtaaggcagtgggcagtacagggtaactggaggcggggccagggcctcagcgctatggaagagtgtccactgaggctgcacatggcccaggagtggcaccatgttgcagggacaaccatccccatttggcttctccttaaaacacaattgcagctgcattctgcatcgctgaaaactgcaatataatattaaatctgttggtctatgcatggctgcgtatgtgtttcttggaacctgtgtgacagggacatgtgcctggcacactggccagaagactgggcagccaccatggcagtgctggatgacctcagtaagaatgtgtcatgtattccaggtgctgatctaaaaactgtggctcaaatgtcaccgagcttatatgaagctcccagagagaacatttaaaagctcagagagtaagtgctggggaaagcagagctatcagaggaaatctctcatagaaacgaaaccaaaccaacagaaaatgaagaaggccacatctttaaggccacctctgcctctatcagatgagctgctggtctagatcaggggctggcaaacttttctgtaaaaggccagacagtaaaaatttccgattttgcaggccacatagtgtctgttgcaactattcaactctgccatagatcatgtgtaaaggaatgggtgtggctgttcaataaactatacagttgacccttgaacaat

SEQ ID NO: 6123 - protein, 359 aa, Homo sapiens; identical to SEQ ID NO: 617

SEQ ID NO: 6124 - DNA, 3406 bp, Homo sapiens
agacaaaacgatcgcggttaaagcttgcggctcagagcccacctggccgcgctgctgggaaacggacggagcggcgcttcaatcagaggtattactcagcacagaaattcaggagacacagacaagttcttccacgatgtcgtacagacgagaactagagaaataccgtgacctggatgaagatgaaatccttggagccctaacagaggaagagctgaggaccctggaaaatgagctggatgagctggaccctgataatgcactgctgcctgcaggcctgaggcagaaggatcagaccaccaaggcgcccacgggcccctttaaaagagaggagctcttggatcacttggaaaagcaagcaaaggagtttaaggaccgagaagatctggtcccctacacaggggaaaaacgaggaaaggtctgggttcctaagcagaagccactggatcctgtgctggaaagtgtgacgctggaaccggagctggaggaagccttggcaaatgcttcagatgcagaactctgtgacattgcagcgatcctgggcatgcacacgctcatgagtaaccagcagtactaccaggccctgagcagcagctccatcatgaacaaggaggggctcaacagcgtgattaaacccacacaatacaagcctgtgcccgacgaagaaccaaattcaacagacgtagaggaaacgctggaacggataaagaacaacgacccaaaacttgaagaagttaacctcaataatatccggaatatccccatccccaccctcaaggcatatgcagaagccctgaaagaaaactcatatgtgaagaagttcagcatcgtggggacacggagtaatgaccccgtggcgtatgcccttgctgagatgctcaaggagaacaaggtgttgaagacactgaatgtggaatccaacttcatttctggagctgggattctgcgcctggtagaagccctcccatacaacacttctctggtggaaatgaaaattgacaaccagagccagcccctgggcaacaaagtggaaatggagattgtgagcatgttggaaaaaaacgcaacacttctcaaattcggctaccactttacccagcaaggaccccggcttcgggcatccaacgcaatgatgaacaacaatgaccttgtgaggaagaggaggcttgcggacctgactgggcccatcattcccaagtgccggagtggtgtctagtgtgtggcggtggagtccatgcctttgaactggatgtgttctattgatgacctgtgctctgcaggggaaaccagaaggcaaaatgctggcagcatgaaacccttttgtggttcagttctttatgcactaaggttttaggttgactagtggttgtagttgaaaattttataaaataccgttaatgtgaagtttttctttagtcacagaagttgaatctggttattatttaaaaactagaagcccccaaaccagcagatcttactgaagatgatgttccagcagcagcgacttagccccaggagcccagtttcaatggccttgctgtgtggtgtttcaagtgcatttaaaatgtgtgacacagaaacggcacactcttccacatgcttttgaagtattataaaacactttattacaaatttgtcttagctattagcaaataaaactgattatcattctttattaaccctccttggaattttgaaaacctcgattaaagttgccaaattgattactggatccagaacacaattttcccctcagaacagatagacagactgaagccactgaactctgccaggagtcaacatgagattccttttgctggatatgcagaaatgataggaaaaaaaccaatggtgaaatttcaagtttcaaaaaccaacctttcattaccaatcccaggcaacaaacatgtccctgagtgttctttaagaacatttgggatttatgtacaatttaatactggagttagaactttttccttattgaatgccaaccttatgatggatgtgaaaatctacggccaaatacttttgaaaacacctttctatattgcacagtgggcaaatggcttatgtgaggtaagacactagagggataaatttccagatcaacatggctatggtatttagtaatggcccagcttagagacttcagctactgatctcatcacttattagacaaattgctgctgaccttacgcctgtatattaagcctccgcaggatgccggacaatggtgaagaaactccagatatcaaggaattgggaaatcctggccaaaccaccccaagatgattacactgaaatgtagtattagtactgctgccagatctctttttaacatcatgtgcgtctcttgggatccagcaaaagtgttaagccacaatgcccttgtgccttttaatataccacagtgccagttaaactaatatttttgtttgttgcttttgggagttattttcattagtgatttcagcaaatctcatgataaaggacaaggtcaagaactccagagcactgagcagagaggctggtgatgaaaaggtgaaggcctgcgcactgaactgtaaggcagtgggcagtacagggtaactggaggcggggccagggcctcagcgctatggaagagtgtccactgaggctgcacatggcccaggagtggcaccatgttgcagggacaaccatccccatttggcttctccttaaaacacaattgcagctgcattctgcatcgctgaaaactgcaatataatattaaatctgttggtctatgcatggctgcgtatgtgtttcttggaacctgtgtgacagggacatgtgcctggcacactggccagaagactgggcagccaccatggcagtgctggatgacctcagtaagaatgtgtcatgtattccaggtgctgatctaaaaactgtggctcaaatgtcaccgagcttatatgaagctcccagagagaacatttaaaagctcagagagtaagtgctggggaaagcagagctatcagaggaaatctctcatagaaacgaaaccaaaccaacagaaaatgaagaaggccacatctttaaggccacctctgcctctatcagatgagctgctggtctagatcaggggctggcaaacttttctgtaaaaggccagacagtaaaaatttccgattttgcaggccacatagtgtctgttgcaactattcaactctgccatagatcatgtgtaaaggaatgggtgtggctgttcaataaactatacagttgacccttgaacaatatgggtttgaactgcatggctgcacttatatatggatttttttcaaccatacaggttgaaaatacagtattggcagggggcgaaacctgcgtacatggagggctgatttatcacatacgtgggttctgtagggcccactgt

SEQ ID NO: 6125 - protein, 359 aa, Homo sapiens; identical to SEQ ID NO: 617

SEQ ID NO: 6126 - DNA, 1754 bp, Homo sapiens
agctcccgcccgcccgcggccgcccgggagctcgtccagccccgcgctgcgctcgcccgcccgctgcccgccggagcaccgcggcctccgcccgcgtccatctgcccgccgcccgcgcctgttccgcagcccgcgtccgcgccggccccacagctctgcgtccgggtattactcagcacagaaattcaggagacacagacaagttcttccacgatgtcgtacagacgagaactagagaaataccgtgacctggatgaagatgaaatccttggagccctaacagaggaagagctgaggaccctggaaaatgagctggatgagctggaccctgataatgcactgctgcctgcaggcctgaggcagaaggatcagaccaccaaggcgcccacgggcccctttaaaagagaggagctcttggatcacttggaaaagcaagcaaaggagtttaaggaccgagaagatctggtcccctacacaggggaaaaacgaggaaaggtctgggttcctaagcagaagccactggatcctgtgctggaaagtgtgacgctggaaccggagctggaggaagccttggcaaatgcttcagatgcagaactctgtgacattgcagcgatcctgggcatgcacacgctcatgagtaaccagcagtactaccaggccctgagcagcagctccatcatgaacaaggaggggctcaacagcgtgattaaacccacacaatacaagcctgtgcccgacgaagaaccaaattcaacagacgtagaggaaacgctggaacggataaagaacaacgacccaaaacttgaagaagttaacctcaataatatccggaatatccccatccccaccctcaaggcatatgcagaagccctgaaagaaaactcatatgtgaagaagttcagcatcgtggggacacggagtaatgaccccgtggcgtatgcccttgctgagatgctcaaggagaacaaggtgttgaagacactgaatgtggaatccaacttcatttctggagctgggattctgcgcctggtagaagccctcccatacaacacttctctggtggaaatgaaaattgacaaccagagccagcccctgggcaacaaagtggaaatggagattgtgagcatgttggaaaaaaacgcaacacttctcaaattcggctaccactttacccagcaaggaccccggcttcgggcatccaacgcaatgatgaacaacaatgaccttgtgaggaagaggaggcttgcggacctgactgggcccatcattcccaagtgccggagtggtgtctagtgtgtggcggtggagtccatgcctttgaactggatgtgttctattgatgacctgtgctctgcaggggaaaccagaaggcaaaatgctggcagcatgaaacccttttgtggttcagttctttatgcactaaggttttaggttgactagtggttgtagttgaaaattttataaaataccgttaatgtgaagtttttctttagtcacagaagttgaatctggttattatttaaaaactagaagcccccaaaccagcagatcttactgaagatgatgttccagcagcagcgacttagccccaggagcccagtttcaatggccttgctgtgtggtgtttcaagtgcatttaaaatgtgtgacacagaaacggcacactcttccacatgcttttgaagtattataaaacactttattacaaatttgtcttagctattagcaaataaaactgattatcattctttatt

SEQ ID NO: 6127 - protein, 359 aa, Homo sapiens; identical to SEQ ID NO: 617

SEQ ID NO: 6128 - DNA, 2848 bp, Homo sapiens
agctcccgcccgcccgcggccgcccgggagctcgtccagccccgcgctgcgctcgcccgcccgctgcccgccggagcaccgcggcctccgcccgcgtccatctgcccgccgcccgcgcctgttccgcagcccgcgtccgcgccggccccacagctctgcgtccgggtattactcagcacagaaattcaggagacacagacaagttcttccacgatgtcgtacagacgagaactagagaaataccgtgacctggatgaagatgaaatccttggagccctaacagaggaagagctgaggaccctggaaaatgagctggatgagctggaccctgataatgcactgctgcctgcaggcctgaggcagaaggatcagaccaccaaggcgcccacgggcccctttaaaagagaggagctcttggatcacttggaaaagcaagcaaaggagtttaaggaccgagaagatctggtcccctacacaggggaaaaacgaggaaaggtctgggttcctaagcagaagccactggatcctgtgctggaaagtgtgacgctggaaccggagctggaggaagccttggcaaatgcttcagatgcagaactctgtgacattgcagcgatcctgggcatgcacacgctcatgagtaaccagcagtactaccaggccctgagcagcagctccatcatgaacaaggaggggctcaacagcgtgattaaacccacacaatacaagcctgtgcccgacgaagaaccaaattcaacagacgtagaggaaacgctggaacggataaagaacaacgacccaaaacttgaagaagttaacctcaataatatccggaatatccccatccccaccctcaaggcatatgcagaagccctgaaagaaaactcatatgtgaagaagttcagcatcgtggggacacggagtaatgaccccgtggcgtatgcccttgctgagatgctcaaggagaacaaggtgttgaagacactgaatgtggaatccaacttcatttctggagctgggattctgcgcctggtagaagccctcccatacaacacttctctggtggaaatgaaaattgacaaccagagccagcccctgggcaacaaagtggaaatggagattgtgagcatgttggaaaaaaacgcaacacttctcaaattcggctaccactttacccagcaaggaccccggcttcgggcatccaacgcaatgatgaacaacaatgaccttgtgaggaagaggaggcttgcggacctgactgggcccatcattcccaagtgccggagtggtgtctagtgtgtggcggtggagtccatgcctttgaactggatgtgttctattgatgacctgtgctctgcaggggaaaccagaaggcaaaatgctggcagcatgaaacccttttgtggttcagttctttatgcactaaggttttaggttgactagtggttgtagttgaaaattttataaaataccgttaatgtgaagtttttctttagtcacagaagttgaatctggttattatttaaaaactagaagcccccaaaccagcagatcttactgaagatgatgttccagcagcagcgacttagccccaggagcccagtttcaatggccttgctgtgtggtgtttcaagtgcatttaaaatgtgtgacacagaaacggcacactcttccacatgcttttgaagtattataaaacactttattacaaatttgtcttagctattagcaaataaaactgattatcattctttattaaccctccttggaattttgaaaacctcgattaaagttgccaaattgattactggatccagaacacaattttcccctcagaacagatagacagactgaagccactgaactctgccaggagtcaacatgagattccttttgctggatatgcagaaatgataggaaaaaaaccaatggtgaaatttcaagtttcaaaaaccaacctttcattaccaatcccaggcaacaaacatgtccctgagtgttctttaagaacatttgggatttatgtacaatttaatactggagttagaactttttccttattgaatgccaaccttatgatggatgtgaaaatctacggccaaatacttttgaaaacacctttctatattgcacagtgggcaaatggcttatgtgaggtaagacactagagggataaatttccagatcaacatggctatggtatttagtaatggcccagcttagagacttcagctactgatctcatcacttattagacaaattgctgctgaccttacgcctgtatattaagcctccgcaggatgccggacaatggtgaagaaactccagatatcaaggaattgggaaatcctggccaaaccaccccaagatgattacactgaaatgtagtattagtactgctgccagatctctttttaacatcatgtgcgtctcttgggatccagcaaaagtgttaagccacaatgcccttgtgccttttaatataccacagtgccagttaaactaatatttttgtttgttgcttttgggagttattttcattagtgatttcagcaaatctcatgataaaggacaaggtcaagaactccagagcactgagcagagaggctggtgatgaaaaggtgaaggcctgcgcactgaactgtaaggcagtgggcagtacagggtaactggaggcggggccagggcctcagcgctatggaagagtgtccactgaggctgcacatggcccaggagtggcaccatgttgcagggacaaccatccccatttggcttctccttaaaacacaattgcagctgcattctgcatcgctgaaaactgcaatataatattaaatctgttggtctatgc

SEQ ID NO: 6129 - protein, 359 aa, Homo sapiens; identical to SEQ ID NO: 617

SEQ ID NO: 6130 - DNA, 3342 bp, Homo sapiens
agctcccgcccgcccgcggccgcccgggagctcgtccagccccgcgctgcgctcgcccgcccgctgcccgccggagcaccgcggcctccgcccgcgtccatctgcccgccgcccgcgcctgttccgcagcccgcgtccgcgccggccccacagctctgcgtccgggtattactcagcacagaaattcaggagacacagacaagttcttccacgatgtcgtacagacgagaactagagaaataccgtgacctggatgaagatgaaatccttggagccctaacagaggaagagctgaggaccctggaaaatgagctggatgagctggaccctgataatgcactgctgcctgcaggcctgaggcagaaggatcagaccaccaaggcgcccacgggcccctttaaaagagaggagctcttggatcacttggaaaagcaagcaaaggagtttaaggaccgagaagatctggtcccctacacaggggaaaaacgaggaaaggtctgggttcctaagcagaagccactggatcctgtgctggaaagtgtgacgctggaaccggagctggaggaagccttggcaaatgcttcagatgcagaactctgtgacattgcagcgatcctgggcatgcacacgctcatgagtaaccagcagtactaccaggccctgagcagcagctccatcatgaacaaggaggggctcaacagcgtgattaaacccacacaatacaagcctgtgcccgacgaagaaccaaattcaacagacgtagaggaaacgctggaacggataaagaacaacgacccaaaacttgaagaagttaacctcaataatatccggaatatccccatccccaccctcaaggcatatgcagaagccctgaaagaaaactcatatgtgaagaagttcagcatcgtggggacacggagtaatgaccccgtggcgtatgcccttgctgagatgctcaaggagaacaaggtgttgaagacactgaatgtggaatccaacttcatttctggagctgggattctgcgcctggtagaagccctcccatacaacacttctctggtggaaatgaaaattgacaaccagagccagcccctgggcaacaaagtggaaatggagattgtgagcatgttggaaaaaaacgcaacacttctcaaattcggctaccactttacccagcaaggaccccggcttcgggcatccaacgcaatgatgaacaacaatgaccttgtgaggaagaggaggcttgcggacctgactgggcccatcattcccaagtgccggagtggtgtctagtgtgtggcggtggagtccatgcctttgaactggatgtgttctattgatgacctgtgctctgcaggggaaaccagaaggcaaaatgctggcagcatgaaacccttttgtggttcagttctttatgcactaaggttttaggttgactagtggttgtagttgaaaattttataaaataccgttaatgtgaagtttttctttagtcacagaagttgaatctggttattatttaaaaactagaagcccccaaaccagcagatcttactgaagatgatgttccagcagcagcgacttagccccaggagcccagtttcaatggccttgctgtgtggtgtttcaagtgcatttaaaatgtgtgacacagaaacggcacactcttccacatgcttttgaagtattataaaacactttattacaaatttgtcttagctattagcaaataaaactgattatcattctttattaaccctccttggaattttgaaaacctcgattaaagttgccaaattgattactggatccagaacacaattttcccctcagaacagatagacagactgaagccactgaactctgccaggagtcaacatgagattccttttgctggatatgcagaaatgataggaaaaaaaccaatggtgaaatttcaagtttcaaaaaccaacctttcattaccaatcccaggcaacaaacatgtccctgagtgttctttaagaacatttgggatttatgtacaatttaatactggagttagaactttttccttattgaatgccaaccttatgatggatgtgaaaatctacggccaaatacttttgaaaacacctttctatattgcacagtgggcaaatggcttatgtgaggtaagacactagagggataaatttccagatcaacatggctatggtatttagtaatggcccagcttagagacttcagctactgatctcatcacttattagacaaattgctgctgaccttacgcctgtatattaagcctccgcaggatgccggacaatggtgaagaaactccagatatcaaggaattgggaaatcctggccaaaccaccccaagatgattacactgaaatgtagtattagtactgctgccagatctctttttaacatcatgtgcgtctcttgggatccagcaaaagtgttaagccacaatgcccttgtgccttttaatataccacagtgccagttaaactaatatttttgtttgttgcttttgggagttattttcattagtgatttcagcaaatctcatgataaaggacaaggtcaagaactccagagcactgagcagagaggctggtgatgaaaaggtgaaggcctgcgcactgaactgtaaggcagtgggcagtacagggtaactggaggcggggccagggcctcagcgctatggaagagtgtccactgaggctgcacatggcccaggagtggcaccatgttgcagggacaaccatccccatttggcttctccttaaaacacaattgcagctgcattctgcatcgctgaaaactgcaatataatattaaatctgttggtctatgcatggctgcgtatgtgtttcttggaacctgtgtgacagggacatgtgcctggcacactggccagaagactgggcagccaccatggcagtgctggatgacctcagtaagaatgtgtcatgtattccaggtgctgatctaaaaactgtggctcaaatgtcaccgagcttatatgaagctcccagagagaacatttaaaagctcagagagtaagtgctggggaaagcagagctatcagaggaaatctctcatagaaacgaaaccaaaccaacagaaaatgaagaaggccacatctttaaggccacctctgcctctatcagatgagctgctggtctagatcaggggctggcaaacttttctgtaaaaggccagacagtaaaaatttccgattttgcaggccacatagtgtctgttgcaactattcaactctgccatagatcatgtgtaaaggaatgggtgtggctgttcaataaactatacagttgacccttgaacaat

SEQ ID NO: 6131 - protein, 359 aa, Homo sapiens; identical to SEQ ID NO: 617

SEQ ID NO: 6132 - DNA, 3483 bp, Homo sapiens
agctcccgcccgcccgcggccgcccgggagctcgtccagccccgcgctgcgctcgcccgcccgctgcccgccggagcaccgcggcctccgcccgcgtccatctgcccgccgcccgcgcctgttccgcagcccgcgtccgcgccggccccacagctctgcgtccgggtattactcagcacagaaattcaggagacacagacaagttcttccacgatgtcgtacagacgagaactagagaaataccgtgacctggatgaagatgaaatccttggagccctaacagaggaagagctgaggaccctggaaaatgagctggatgagctggaccctgataatgcactgctgcctgcaggcctgaggcagaaggatcagaccaccaaggcgcccacgggcccctttaaaagagaggagctcttggatcacttggaaaagcaagcaaaggagtttaaggaccgagaagatctggtcccctacacaggggaaaaacgaggaaaggtctgggttcctaagcagaagccactggatcctgtgctggaaagtgtgacgctggaaccggagctggaggaagccttggcaaatgcttcagatgcagaactctgtgacattgcagcgatcctgggcatgcacacgctcatgagtaaccagcagtactaccaggccctgagcagcagctccatcatgaacaaggaggggctcaacagcgtgattaaacccacacaatacaagcctgtgcccgacgaagaaccaaattcaacagacgtagaggaaacgctggaacggataaagaacaacgacccaaaacttgaagaagttaacctcaataatatccggaatatccccatccccaccctcaaggcatatgcagaagccctgaaagaaaactcatatgtgaagaagttcagcatcgtggggacacggagtaatgaccccgtggcgtatgcccttgctgagatgctcaaggagaacaaggtgttgaagacactgaatgtggaatccaacttcatttctggagctgggattctgcgcctggtagaagccctcccatacaacacttctctggtggaaatgaaaattgacaaccagagccagcccctgggcaacaaagtggaaatggagattgtgagcatgttggaaaaaaacgcaacacttctcaaattcggctaccactttacccagcaaggaccccggcttcgggcatccaacgcaatgatgaacaacaatgaccttgtgaggaagaggaggcttgcggacctgactgggcccatcattcccaagtgccggagtggtgtctagtgtgtggcggtggagtccatgcctttgaactggatgtgttctattgatgacctgtgctctgcaggggaaaccagaaggcaaaatgctggcagcatgaaacccttttgtggttcagttctttatgcactaaggttttaggttgactagtggttgtagttgaaaattttataaaataccgttaatgtgaagtttttctttagtcacagaagttgaatctggttattatttaaaaactagaagcccccaaaccagcagatcttactgaagatgatgttccagcagcagcgacttagccccaggagcccagtttcaatggccttgctgtgtggtgtttcaagtgcatttaaaatgtgtgacacagaaacggcacactcttccacatgcttttgaagtattataaaacactttattacaaatttgtcttagctattagcaaataaaactgattatcattctttattaaccctccttggaattttgaaaacctcgattaaagttgccaaattgattactggatccagaacacaattttcccctcagaacagatagacagactgaagccactgaactctgccaggagtcaacatgagattccttttgctggatatgcagaaatgataggaaaaaaaccaatggtgaaatttcaagtttcaaaaaccaacctttcattaccaatcccaggcaacaaacatgtccctgagtgttctttaagaacatttgggatttatgtacaatttaatactggagttagaactttttccttattgaatgccaaccttatgatggatgtgaaaatctacggccaaatacttttgaaaacacctttctatattgcacagtgggcaaatggcttatgtgaggtaagacactagagggataaatttccagatcaacatggctatggtatttagtaatggcccagcttagagacttcagctactgatctcatcacttattagacaaattgctgctgaccttacgcctgtatattaagcctccgcaggatgccggacaatggtgaagaaactccagatatcaaggaattgggaaatcctggccaaaccaccccaagatgattacactgaaatgtagtattagtactgctgccagatctctttttaacatcatgtgcgtctcttgggatccagcaaaagtgttaagccacaatgcccttgtgccttttaatataccacagtgccagttaaactaatatttttgtttgttgcttttgggagttattttcattagtgatttcagcaaatctcatgataaaggacaaggtcaagaactccagagcactgagcagagaggctggtgatgaaaaggtgaaggcctgcgcactgaactgtaaggcagtgggcagtacagggtaactggaggcggggccagggcctcagcgctatggaagagtgtccactgaggctgcacatggcccaggagtggcaccatgttgcagggacaaccatccccatttggcttctccttaaaacacaattgcagctgcattctgcatcgctgaaaactgcaatataatattaaatctgttggtctatgcatggctgcgtatgtgtttcttggaacctgtgtgacagggacatgtgcctggcacactggccagaagactgggcagccaccatggcagtgctggatgacctcagtaagaatgtgtcatgtattccaggtgctgatctaaaaactgtggctcaaatgtcaccgagcttatatgaagctcccagagagaacatttaaaagctcagagagtaagtgctggggaaagcagagctatcagaggaaatctctcatagaaacgaaaccaaaccaacagaaaatgaagaaggccacatctttaaggccacctctgcctctatcagatgagctgctggtctagatcaggggctggcaaacttttctgtaaaaggccagacagtaaaaatttccgattttgcaggccacatagtgtctgttgcaactattcaactctgccatagatcatgtgtaaaggaatgggtgtggctgttcaataaactatacagttgacccttgaacaatatgggtttgaactgcatggctgcacttatatatggatttttttcaaccatacaggttgaaaatacagtattggcagggggcgaaacctgcgtacatggagggctgatttatcacatacgtgggttctgtagggcccactgt

SEQ ID NO: 6133 - protein, 359 aa, Homo sapiens; identical to SEQ ID NO: 617

SEQ ID NO: 6134 - DNA, 2515 bp, Homo sapiens
gtgccaggtcagagctgcaactctgtgctacgtttctgtgtggctttcttgaaactacttctctttatttttgttggcgtggctatttattgttatctgtaacgacgcaatatgctgccgaagtctgggaaggagaggggagctgtaagtctacaccagtgttaactggctaaccttggatgcctgtcatttgatgttggacatttgaaagatggcagcatctctggggaaggagggactgaacacttttgaccacctaccatgtcccaggttctatcgatcctgggcatgcacacgctcatgagtaaccagcagtactaccaggccctgagcagcagctccatcatgaacaaggaggggctcaacagcgtgattaaacccacacaatacaagcctgtgcccgacgaagaaccaaattcaacagacgtagaggaaacgctggaacggataaagaacaacgacccaaaacttgaagaagttaacctcaataatatccggaatatccccatccccaccctcaaggcatatgcagaagccctgaaagaaaactcatatgtgaagaagttcagcatcgtggggacacggagtaatgaccccgtggcgtatgcccttgctgagatgctcaaggagaacaaggtgttgaagacactgaatgtggaatccaacttcatttctggagctgggattctgcgcctggtagaagccctcccatacaacacttctctggtggaaatgaaaattgacaaccagagccagcccctgggcaacaaagtggaaatggagattgtgagcatgttggaaaaaaacgcaacacttctcaaattcggctaccactttacccagcaaggaccccggcttcgggcatccaacgcaatgatgaacaacaatgaccttgtgaggaagaggaggcttgcggacctgactgggcccatcattcccaagtgccggagtggtgtctagtgtgtggcggtggagtccatgcctttgaactggatgtgttctattgatgacctgtgctctgcaggggaaaccagaaggcaaaatgctggcagcatgaaacccttttgtggttcagttctttatgcactaaggttttaggttgactagtggttgtagttgaaaattttataaaataccgttaatgtgaagtttttctttagtcacagaagttgaatctggttattatttaaaaactagaagcccccaaaccagcagatcttactgaagatgatgttccagcagcagcgacttagccccaggagcccagtttcaatggccttgctgtgtggtgtttcaagtgcatttaaaatgtgtgacacagaaacggcacactcttccacatgcttttgaagtattataaaacactttattacaaatttgtcttagctattagcaaataaaactgattatcattctttattaaccctccttggaattttgaaaacctcgattaaagttgccaaattgattactggatccagaacacaattttcccctcagaacagatagacagactgaagccactgaactctgccaggagtcaacatgagattccttttgctggatatgcagaaatgataggaaaaaaaccaatggtgaaatttcaagtttcaaaaaccaacctttcattaccaatcccaggcaacaaacatgtccctgagtgttctttaagaacatttgggatttatgtacaatttaatactggagttagaactttttccttattgaatgccaaccttatgatggatgtgaaaatctacggccaaatacttttgaaaacacctttctatattgcacagtgggcaaatggcttatgtgaggtaagacactagagggataaatttccagatcaacatggctatggtatttagtaatggcccagcttagagacttcagctactgatctcatcacttattagacaaattgctgctgaccttacgcctgtatattaagcctccgcaggatgccggacaatggtgaagaaactccagatatcaaggaattgggaaatcctggccaaaccaccccaagatgattacactgaaatgtagtattagtactgctgccagatctctttttaacatcatgtgcgtctcttgggatccagcaaaagtgttaagccacaatgcccttgtgccttttaatataccacagtgccagttaaactaatatttttgtttgttgcttttgggagttattttcattagtgatttcagcaaatctcatgataaaggacaaggtcaagaactccagagcactgagcagagaggctggtgatgaaaaggtgaaggcctgcgcactgaactgtaaggcagtgggcagtacagggtaactggaggcggggccagggcctcagcgctatggaagagtgtccactgaggctgcacatggcccaggagtggcaccatgttgcagggacaaccatccccatttggcttctccttaaaacacaattgcagctgcattctgcatcgctgaaaactgcaatataatattaaatctgttggtctatgc

SEQ ID NO: 6135 - protein, 232 aa, Homo sapiens
MSQVLSILGMHTLMSNQQYYQALSSSSIMNKEGLNSVIKPTQYKPVPDEEPNSTDVEETLERIKNNDPKLEEVNLNNIRNIPIPTLKAYAEALKENSYVKKFSIVGTRSNDPVAYALAEMLKENKVLKTLNVESNFISGAGILRLVEALPYNTSLVEMKIDNQSQPLGNKVEMEIVSMLEKNATLLKFGYHFTQQGPRLRASNAMMNNNDLVRKRRLADLTGPIIPKCRSGV

SEQ ID NO: 6136 - DNA, 3009 bp, Homo sapiens
gtgccaggtcagagctgcaactctgtgctacgtttctgtgtggctttcttgaaactacttctctttatttttgttggcgtggctatttattgttatctgtaacgacgcaatatgctgccgaagtctgggaaggagaggggagctgtaagtctacaccagtgttaactggctaaccttggatgcctgtcatttgatgttggacatttgaaagatggcagcatctctggggaaggagggactgaacacttttgaccacctaccatgtcccaggttctatcgatcctgggcatgcacacgctcatgagtaaccagcagtactaccaggccctgagcagcagctccatcatgaacaaggaggggctcaacagcgtgattaaacccacacaatacaagcctgtgcccgacgaagaaccaaattcaacagacgtagaggaaacgctggaacggataaagaacaacgacccaaaacttgaagaagttaacctcaataatatccggaatatccccatccccaccctcaaggcatatgcagaagccctgaaagaaaactcatatgtgaagaagttcagcatcgtggggacacggagtaatgaccccgtggcgtatgcccttgctgagatgctcaaggagaacaaggtgttgaagacactgaatgtggaatccaacttcatttctggagctgggattctgcgcctggtagaagccctcccatacaacacttctctggtggaaatgaaaattgacaaccagagccagcccctgggcaacaaagtggaaatggagattgtgagcatgttggaaaaaaacgcaacacttctcaaattcggctaccactttacccagcaaggaccccggcttcgggcatccaacgcaatgatgaacaacaatgaccttgtgaggaagaggaggcttgcggacctgactgggcccatcattcccaagtgccggagtggtgtctagtgtgtggcggtggagtccatgcctttgaactggatgtgttctattgatgacctgtgctctgcaggggaaaccagaaggcaaaatgctggcagcatgaaacccttttgtggttcagttctttatgcactaaggttttaggttgactagtggttgtagttgaaaattttataaaataccgttaatgtgaagtttttctttagtcacagaagttgaatctggttattatttaaaaactagaagcccccaaaccagcagatcttactgaagatgatgttccagcagcagcgacttagccccaggagcccagtttcaatggccttgctgtgtggtgtttcaagtgcatttaaaatgtgtgacacagaaacggcacactcttccacatgcttttgaagtattataaaacactttattacaaatttgtcttagctattagcaaataaaactgattatcattctttattaaccctccttggaattttgaaaacctcgattaaagttgccaaattgattactggatccagaacacaattttcccctcagaacagatagacagactgaagccactgaactctgccaggagtcaacatgagattccttttgctggatatgcagaaatgataggaaaaaaaccaatggtgaaatttcaagtttcaaaaaccaacctttcattaccaatcccaggcaacaaacatgtccctgagtgttctttaagaacatttgggatttatgtacaatttaatactggagttagaactttttccttattgaatgccaaccttatgatggatgtgaaaatctacggccaaatacttttgaaaacacctttctatattgcacagtgggcaaatggcttatgtgaggtaagacactagagggataaatttccagatcaacatggctatggtatttagtaatggcccagcttagagacttcagctactgatctcatcacttattagacaaattgctgctgaccttacgcctgtatattaagcctccgcaggatgccggacaatggtgaagaaactccagatatcaaggaattgggaaatcctggccaaaccaccccaagatgattacactgaaatgtagtattagtactgctgccagatctctttttaacatcatgtgcgtctcttgggatccagcaaaagtgttaagccacaatgcccttgtgccttttaatataccacagtgccagttaaactaatatttttgtttgttgcttttgggagttattttcattagtgatttcagcaaatctcatgataaaggacaaggtcaagaactccagagcactgagcagagaggctggtgatgaaaaggtgaaggcctgcgcactgaactgtaaggcagtgggcagtacagggtaactggaggcggggccagggcctcagcgctatggaagagtgtccactgaggctgcacatggcccaggagtggcaccatgttgcagggacaaccatccccatttggcttctccttaaaacacaattgcagctgcattctgcatcgctgaaaactgcaatataatattaaatctgttggtctatgcatggctgcgtatgtgtttcttggaacctgtgtgacagggacatgtgcctggcacactggccagaagactgggcagccaccatggcagtgctggatgacctcagtaagaatgtgtcatgtattccaggtgctgatctaaaaactgtggctcaaatgtcaccgagcttatatgaagctcccagagagaacatttaaaagctcagagagtaagtgctggggaaagcagagctatcagaggaaatctctcatagaaacgaaaccaaaccaacagaaaatgaagaaggccacatctttaaggccacctctgcctctatcagatgagctgctggtctagatcaggggctggcaaacttttctgtaaaaggccagacagtaaaaatttccgattttgcaggccacatagtgtctgttgcaactattcaactctgccatagatcatgtgtaaaggaatgggtgtggctgttcaataaactatacagttgacccttgaacaat

SEQ ID NO: 6137 - protein, 232 aa, Homo sapiens; identical to SEQ ID NO: 6135

SEQ ID NO: 6138 - DNA, 3150 bp, Homo sapiens
gtgccaggtcagagctgcaactctgtgctacgtttctgtgtggctttcttgaaactacttctctttatttttgttggcgtggctatttattgttatctgtaacgacgcaatatgctgccgaagtctgggaaggagaggggagctgtaagtctacaccagtgttaactggctaaccttggatgcctgtcatttgatgttggacatttgaaagatggcagcatctctggggaaggagggactgaacacttttgaccacctaccatgtcccaggttctatcgatcctgggcatgcacacgctcatgagtaaccagcagtactaccaggccctgagcagcagctccatcatgaacaaggaggggctcaacagcgtgattaaacccacacaatacaagcctgtgcccgacgaagaaccaaattcaacagacgtagaggaaacgctggaacggataaagaacaacgacccaaaacttgaagaagttaacctcaataatatccggaatatccccatccccaccctcaaggcatatgcagaagccctgaaagaaaactcatatgtgaagaagttcagcatcgtggggacacggagtaatgaccccgtggcgtatgcccttgctgagatgctcaaggagaacaaggtgttgaagacactgaatgtggaatccaacttcatttctggagctgggattctgcgcctggtagaagccctcccatacaacacttctctggtggaaatgaaaattgacaaccagagccagcccctgggcaacaaagtggaaatggagattgtgagcatgttggaaaaaaacgcaacacttctcaaattcggctaccactttacccagcaaggaccccggcttcgggcatccaacgcaatgatgaacaacaatgaccttgtgaggaagaggaggcttgcggacctgactgggcccatcattcccaagtgccggagtggtgtctagtgtgtggcggtggagtccatgcctttgaactggatgtgttctattgatgacctgtgctctgcaggggaaaccagaaggcaaaatgctggcagcatgaaacccttttgtggttcagttctttatgcactaaggttttaggttgactagtggttgtagttgaaaattttataaaataccgttaatgtgaagtttttctttagtcacagaagttgaatctggttattatttaaaaactagaagcccccaaaccagcagatcttactgaagatgatgttccagcagcagcgacttagccccaggagcccagtttcaatggccttgctgtgtggtgtttcaagtgcatttaaaatgtgtgacacagaaacggcacactcttccacatgcttttgaagtattataaaacactttattacaaatttgtcttagctattagcaaataaaactgattatcattctttattaaccctccttggaattttgaaaacctcgattaaagttgccaaattgattactggatccagaacacaattttcccctcagaacagatagacagactgaagccactgaactctgccaggagtcaacatgagattccttttgctggatatgcagaaatgataggaaaaaaaccaatggtgaaatttcaagtttcaaaaaccaacctttcattaccaatcccaggcaacaaacatgtccctgagtgttctttaagaacatttgggatttatgtacaatttaatactggagttagaactttttccttattgaatgccaaccttatgatggatgtgaaaatctacggccaaatacttttgaaaacacctttctatattgcacagtgggcaaatggcttatgtgaggtaagacactagagggataaatttccagatcaacatggctatggtatttagtaatggcccagcttagagacttcagctactgatctcatcacttattagacaaattgctgctgaccttacgcctgtatattaagcctccgcaggatgccggacaatggtgaagaaactccagatatcaaggaattgggaaatcctggccaaaccaccccaagatgattacactgaaatgtagtattagtactgctgccagatctctttttaacatcatgtgcgtctcttgggatccagcaaaagtgttaagccacaatgcccttgtgccttttaatataccacagtgccagttaaactaatatttttgtttgttgcttttgggagttattttcattagtgatttcagcaaatctcatgataaaggacaaggtcaagaactccagagcactgagcagagaggctggtgatgaaaaggtgaaggcctgcgcactgaactgtaaggcagtgggcagtacagggtaactggaggcggggccagggcctcagcgctatggaagagtgtccactgaggctgcacatggcccaggagtggcaccatgttgcagggacaaccatccccatttggcttctccttaaaacacaattgcagctgcattctgcatcgctgaaaactgcaatataatattaaatctgttggtctatgcatggctgcgtatgtgtttcttggaacctgtgtgacagggacatgtgcctggcacactggccagaagactgggcagccaccatggcagtgctggatgacctcagtaagaatgtgtcatgtattccaggtgctgatctaaaaactgtggctcaaatgtcaccgagcttatatgaagctcccagagagaacatttaaaagctcagagagtaagtgctggggaaagcagagctatcagaggaaatctctcatagaaacgaaaccaaaccaacagaaaatgaagaaggccacatctttaaggccacctctgcctctatcagatgagctgctggtctagatcaggggctggcaaacttttctgtaaaaggccagacagtaaaaatttccgattttgcaggccacatagtgtctgttgcaactattcaactctgccatagatcatgtgtaaaggaatgggtgtggctgttcaataaactatacagttgacccttgaacaatatgggtttgaactgcatggctgcacttatatatggatttttttcaaccatacaggttgaaaatacagtattggcagggggcgaaacctgcgtacatggagggctgatttatcacatacgtgggttctgtagggcccactgt

SEQ ID NO: 6139 - protein, 232 aa, Homo sapiens; identical to SEQ ID NO: 6135

SEQ ID NO: 6140 - DNA, 889 bp, Homo sapiens
aatatagacaactttacatacaaatcgtctattttgtgaccagggttttttttctttttttttctttccattcaatattggttcatggccatctttacatgctatggccaaggatttgcaccatcattttagagctgcccacattctatttagtatggttgaactatcatttatctgagcaactctctatgaattctttttttttcaatttttatttattttttgttttttggagacagagtctcgctctgtcgcctgggctggagggcagtggcacaatttcggctcgctgcaaactctgcctcccgggttcaagccattctccctgtctctactaaaaatacaaaaaattagccgggcatggtggcaggcacctgtaatcccagctccttgggaggctgaggcaggaggatcgcttgaacccgggaggcagaaattgcagtgagccaagaccacaccattgcacttcagtgtgggcaacaagaaaactccatcaaaaaaaaaagaagaagaaaaaaagaaaaggctactcctttcctcacagccacccaagccagaaatctgggcctgttcctagatgctgcctccaccccagccagccagtcacctccttgccaatcccagtgtcctgccgtgtatgttgagccctcgtcacagttatctcctccaacatcctcaggcccccagctcctccagggcaggcacccctggcactcatcccaagtctccttccgaagcttgccttgtcacccctccacttagaaccctcacttgcctcccattgctctcagtcaggccccttgaaatgactcccaagtctcttaataatagctgactcttacatggcacttactgtgtgttagagactgttctgaatacttcccatctc

SEQ ID NO: 6141 - protein, 79 aa, Homo sapiens [sequence omitted]

SEQ ID NO: 6142 - DNA, 3832 bp, Homo sapiens
ctatgttccccaggcttccccttgtattttaatacttacccatcttctagctttcctgtctttttctctcctttactttctttctcatatgtcgtttctgttgtccacccctcttgcccttttctcttttactcatgcacacacacttagacacattcttcttgctcctttgcattaaaaatgtatctattccaactttattccataactttttgctcacacctgcctgtgggttcttagccttcaacgtgggttcgaccttaatatagaacagtttacaaagcctgtagtcagccacgtacttgcccagctcctccatgtacagtgacaatagagcagtggccatttcctgacctaccagtgaccatacaatggaccagcaaattcacatggcaatttagatcccagttgcctggtttttatcactagggttaggccaagtatgaggatgcaaaattctttgactagttatttctaaactaccaggtctccattgccctcattttaggaggagggagattgaggatacctggaattactggaattactaagttatttcatcatgatcatcaagtagtgttcttttcagacagttgtaattatgaagagaagagatttgggtggaaagaaacaaagcaacacgtaagtcaggctgggtgagtcatgattgggttttggtttttttgtctttgttttaatataatttttttggtttggttttaggaatccatttatccccaggtgaatttcataaagaagtagaaaagtttttatctcaggcaaatcaagaacaaagtgatactatccttcttgattgcagaaacttctatgaaagcaaaataggacgattccaaggctgcttagccccagacatcaggaaattcagttacttccctagctacgttgacaaaaatctagaacttttcagagagaagagagtgctgatgtactgtaccgggggcatccgctgtgagcggggttcagcctacctcaaagccaagggagtgtgcaaggaggtgttccagctcaagggtggcatccacaagtacctggaagagtttcctgatggcttttacaaagggaagttgtttgtttttgatgaacgctatgctctgtcctacaacagtgatgtggtgtcagagtgttcatactgtggagcccgctgggaccagtataaactctgctctactccccagtgccgccagctcgttttgacctgccctgcctgtcaaggacaaggattcacagcctgttgtgtcacatgtcaagacaaggggagcaggaaagtttcaggccctatgcaagacagctttaaagaggaatgcgagtgcacagcccgacggccacgcatacctagggaactcttgcagcatgtgcgacagcctgtgagcccagagccagggcctgatgctgatgaggatgggccagtgcttatgtgagcagcacctttggcattttcccaggccctcggtaaaagtaggtttggggtgactatacagagaaagcatggcaagactgcagaaacagagaaatcgggaacttcagttctggccgctgccaccgtggcagccgtctacacttcacagcgggaggggaggagtcacgttgtctaccacttacctgagacattctgatttggatgatgctagagcacagaaaataggtgagctgcatgggatcccaaagctgctgagggatagagcctgagcctggtggccacagcatatgccctttctgttccatgcagctggggctgttagtagtcattgcccttgtcagcagaccttctaccctggtggcaaacacatgaaagctgtggccctgggagtggcctcctaaaacaagccacttaggtcatctgccatctacccttaacctctgtctctcgcctgaggggaatctgcaagctgtgcattgggcttacctcctgcttttgtagaaataaccatcctttggtatacatggaggatagttccagaacgcctgagtatacaaaaacccaatgcatactcaagtcccacagtgggccctacagaacccacgtatgtgataaatcagccctccatgtacgcaggtttcgccccctgccaatactgtattttcaacctgtatggttgaaaaaaatccatatataagtgcagccatgcagttcaaacccatattgttcaagggtcaactgtatagtttattgaacagccacacccattcctttacacatgatctatggcagagttgaatagttgcaacagacactatgtggcctgcaaaatcggaaatttttactgtctggccttttacagaaaagtttgccagcccctgatctagaccagcagctcatctgatagaggcagaggtggccttaaagatgtggccttcttcattttctgttggtttggtttcgtttctatgagagatttcctctgatagctctgctttccccagcacttactctctgagcttttaaatgttctctctgggagcttcatataagctcggtgacatttgagccacagtttttagatcagcacctggaatacatgacacattcttactgaggtcatccagcactgccatggtggctgcccagtcttctggccagtgtgccaggcacatgtccctgtcacacaggttccaagaaacacatacgcagccatgcatagaccaacagatttaatattatattgcagttttcagcgatgcagaatgcagctgcaattgtgttttaaggagaagccaaatggggatggttgtccctgcaacatggtgccactcctgggccatgtgcagcctcagtggacactcttccatagcgctgaggccctggccccgcctccagttaccctgtactgcccactgccttacagttcagtgcgcaggccttcaccttttcatcaccagcctctctgctcagtgctctggagttcttgaccttgtcctttatcatgagatttgctgaaatcactaatgaaaataactcccaaaagcaacaaacaaaaatattagtttaactggcactgtggtatattaaaaggcacaagggcattgtggcttaacacttttgctggatcccaagagacgcacatgatgttaaaaagagatctggcagcagtactaatactacatttcagtgtaatcatcttggggtggtttggccaggatttcccaattccttgatatctggagtttcttcaccattgtccggcatcctgcggaggcttaatatacaggcgtaaggtcagcagcaatttgtctaataagtgatgagatcagtagctgaagtctctaagctgggccattactaaataccatagccatgttgatctggaaatttatccctctagtgtcttacctcacataagccatttgcccactgtgcaatatagaaaggtgttttcaaaagtatttggccgtagattttcacatccatcataaggttggcattcaataaggaaaaagttctaactccagtattaaattgtacataaatcccaaatgttcttaaagaacactcagggacatgtttgttgcctgggattggtaatgaaaggttggtttttgaaacttgaaatttcaccattggtttttttcctatcatttctgcatatccagcaaaaggaatctcatgttgactcctggcagagttcagtggcttcagtctgtctatctgttctgaggggaaaattgtgttctggatccagtaatcaatttggcaactttaatcgaggttttcaaaattccaaggagggttaataaagaatgataatcagttttatttgctaatagctaagacaaatttgtaataaagtgttttataatacttcaaaagcatgtg

SEQ ID NO: 6143 - protein, 164 aa, Homo sapiens
MYCTGGIRCERGSAYLKAKGVCKEVFQLKGGIHKYLEEFPDGFYKGKLFVFDERYALSYNSDVVSECSYCGARWDQYKLCSTPQCRQLVLTCPACQGQGFTACCVTCQDKGSRKVSGPMQDSFKEECECTARRPRIPRELLQHVRQPVSPEPGPDADEDGPVLM

SEQ ID NO: 6144 - DNA, 6714 bp, Homo sapiens
ggaaaaagtattcagcattactactaatcaaaaatattaaaaaaaaaaatagggtagcatttcttttgccttttatttggaccaacattaaaaatattgatgataaaaaatactgatagaactcagtgaggctatggataaaatggcacccacatgcttttctggttagagtataaattggtacatttttcctggaagtcactattacagattaaaatttcatgttctttgacccctcaatttttattttagatattctaagtaggtggttaaagatatagaaagatagatgcatggaatgctcattcaacatggcttttaattgcaaatattagaaacaatctaaatgttcatcagttggtaactggttaagagaattttctgtttgattgttttacaataagcataagtaatttttataaaaacagtaatattattttccaagaaggaagatattttggtacgtttcttcctggtctttttcaatgtactttttaatgtggttaagattacattgcataagcaattttatccaatttttttcacttaatattatatcataaaatatttttccatataacttaaaactggctgcttaatattccatggtaagcatacttcataatttactttccatattcctttcgaaaataactaatagtgttatttgtgatattttaggccaaactgtattatgtattttccagtgtgacttagtcttatatcctgagaataaaattatgatgctgagagttatttaacctcctcaatataaagcctagttttaatttctctaatagtctcttctaaagcttactaataagagaagtgttacttctcagagaattgtataacataatggaacataaaactagaagcccctgtggaaagataatctaaagaatcttagtgagacttctattagccataaacctaaggttatttaacagtgttagcatttgaaatctaattgcaggcctttgccctttttgtcaaaaccaaagaagttccaacaaaaaggagttttgaatgtaaagaaaaattgtggaaatgctgtcggcagctattcacagaccaaaccagcatccatagacatgtggcaacacaacatgctgatgaaatttatcaccagacagcttctattttaaagcaactggctgtgacattgagcacctcaaagagtctttcgtctgcagatgaaaagaaccctttaaaagagtgccttccacatagccatgacgtgtctgcttggctccctgatataagctgctttaaccctgatgagctgataagtggccagggcagtgaagaaggggaggtgctcctttattactgctaccatgacctggaggatccccaatggatctgtgcctggcagacagctctgtgtcagcacctgcacctcacaggcaagattcgaattgctgcagaaggaatcaatgggacagttggtggaagcaaattggctaccagactttatgtggaagtcatgctttccttcccattgtttaaggatgacctgtgtaaagatgattttaagaccagcaaaggaggagctcactgttttccagaattgcgtgttggtgtatttgaagaaatcgtgcccatggggatcagccccaaaaagatctcctacaagaagcctggaatccatttatccccaggtgaatttcataaagaagtagaaaagtttttatctcaggcaaatcaagaacaaagtgatactatccttcttgattgcagaaacttctatgaaagcaaaataggacgattccaaggctgcttagccccagacatcaggaaattcagttacttccctagctacgttgacaaaaatctagaacttttcagagagaagagagtgctgatgtactgtaccgggggcatccgctgtgagcggggttcagcctacctcaaagccaagggagtgtgcaaggaggtgttccagctcaagggtggcatccacaagtacctggaagagtttcctgatggcttttacaaagggaagttgtttgtttttgatgaacgctatgctctgtcctacaacagtgatgtggtgtcaggtaggtcagcacaggctcagagcccaaactgaaatgaagcacattgtcagttcactattctagaaaaatgacacagggaagacaggccagtgctcattactgagcactgaataagcagggaaaataagtacattgtgccaccattttcccagctgtggagctgagagaaccctagcccaggagtcaggaggcctgggttgggatcctggcttcaccattgctagctggacaagcccattaacatggggatcatctcacctgccctgcctgcctgtctacctgccaagagctgtactactgggctaattcagggctcttaacctggaattggtacatagatttcagggattctgtgaatttggatggaaaaataattgtatctttgttttcaataacacctcactaaaatgaagcatttcctttagttatgaatgtaggcaacaaagtaccagttgtattaatgtacctgtgactttgtcttcagtaggattcacaatactttcatatcatgttctagttgcctcagatatctcaaaatagtatttatactcatcactgcttcaaaatgaaaatagttattaggcccaccactaagagttgatatataatgtgttaataaatggcacgtcttattatatattacagattttgaaaaagactttgatattttgtatttctgtatagttggtttcctttgtaatcttacatattttatgcatttaaaaatatttttctaggtcaggcacagaggctcatgcctgtaatcccatcacttttggaggccaaggtaggaggatcacttgagccctggagtttgagaccagtctgggcaacatagctcactatgtctctacaaaaacttttttaaattagctgagcatggtggtgtgtaccagatactcaggaggctgaggcaggaggattgcttgagcccgggaggttgaggttgcagtgagtttaaatcatgccactgtactccagcctgggtgacacagcaagaccctgtctcaaaaaagtttttctaggccaggatctatagtcttcaccagactaccaagtaaatccgtagcacacatgattttaggaactcatagctctctgtggacccaggtggcatgcacatttgagtaagatttgcgtttgattgtcctctcctactttcttggtcttattttcattttagtggttttgagttgtctcttattgatcactacttcgatctgttttggagctagatggagtataaattctaaacaagtagaaagagtagatttgattttacagaggttatattggctggactcgatgggtacctgcgtgtgagtatgaaggagagagggaaggctcagaggtagcttagataagcaaggtaaggaaaagtgaggaagaatgatgttatcaatagtaacaggaggtcatcagggaaaaacaggtgaagaagatggtgtgagttttaggaatcagatggtcaagtgccctagcaacagcaggagagacacaggcctcggggagaggggtgtggactgcgcatgttcactgtaggtgggttatcgcctgtatttaggtgtgttgtcccccctggaaaagggaacaatcaaagaggaaaagaccacttaacaagggggttgggaggtagttggccagctttggaatagctggtgagagagagaaactttcattaccatctagttaccacctgttctctagatgggaaaaagaaaaaaaaagtcagtaaatactggaagcagacagttaccagaagtcacccccacaaaaaaataagctgggtggtgggggtggtggttagttgttgttgctagaagacagaagacttactatttggaaaccttccccgggttccacaggatctacgagattctagtcagcaaagggagcaatgcctgtccacgtgtgtgtgaatgtatgtgtttataatgatggcttttccttcctccccagagtgttcatactgtggagcccgctgggaccagtataaactctgctctactccccagtgccgccagctcgttttgacctgccctgcctgtcaaggacaaggattcacagcctgttgtgtcacatgtcaagacaaggggagcaggaaagtttcaggccctatgcaagacagctttaaagaggaatgcgagtgcacagcccgacggccacgcatacctagggaactcttgcagcatgtgcgacagcctgtgagcccagagccagggcctgatgctgatgaggatgggccagtgcttatgtgagcagcacctttggcattttcccaggccctcggtaaaagtaggtttggggtgactatacagagaaagcatggcaagactgcagaaacagagaaatcgggaacttcagttctggccgctgccaccgtggcagccgtctacacttcacagcgggaggggaggagtcacgttgtctaccacttacctgagacattctgatttggatgatgctagagcacagaaaataggtgagctgcatgggatcccaaagctgctgagggatagagcctgagcctggtggccacagcatatgccctttctgttccatgcagctggggctgttagtagtcattgcccttgtcagcagaccttctaccctggtggcaaacacatgaaagctgtggccctgggagtggcctcctaaaacaagccacttaggtcatctgccatctacccttaacctctgtctctcgcctgaggggaatctgcaagctgtgcattgggcttacctcctgcttttgtagaaataaccatcctttggtatacatggaggatagttccagaacgcctgagtatacaaaaacccaatgcatactcaagtcccacagtgggccctacagaacccacgtatgtgataaatcagccctccatgtacgcaggtttcgccccctgccaatactgtattttcaacctgtatggttgaaaaaaatccatatataagtgcagccatgcagttcaaacccatattgttcaagggtcaactgtatagtttattgaacagccacacccattcctttacacatgatctatggcagagttgaatagttgcaacagacactatgtggcctgcaaaatcggaaatttttactgtctggccttttacagaaaagtttgccagcccctgatctagaccagcagctcatctgatagaggcagaggtggccttaaagatgtggccttcttcattttctgttggtttggtttcgtttctatgagagatttcctctgatagctctgctttccccagcacttactctctgagcttttaaatgttctctctgggagcttcatataagctcggtgacatttgagccacagtttttagatcagcacctggaatacatgacacattcttactgaggtcatccagcactgccatggtggctgcccagtcttctggccagtgtgccaggcacatgtccctgtcacacaggttccaagaaacacatacgcagccatgcatagaccaacagatttaatattatattgcagttttcagcgatgcagaatgcagctgcaattgtgttttaaggagaagccaaatggggatggttgtccctgcaacatggtgccactcctgggccatgtgcagcctcagtggacactcttccatagcgctgaggccctggccccgcctccagttaccctgtactgcccactgccttacagttcagtgcgcaggccttcaccttttcatcaccagcctctctgctcagtgctctggagttcttgaccttgtcctttatcatgagatttgctgaaatcactaatgaaaataactcccaaaagcaacaaacaaaaatattagtttaactggcactgtggtatattaaaaggcacaagggcattgtggcttaacacttttgctggatcccaagagacgcacatgatgttaaaaagagatctggcagcagtactaatactacatttcagtgtaatcatcttggggtggtttggccaggatttcccaattccttgatatctggagtttcttcaccattgtccggcatcctgcggaggcttaatatacaggcgtaaggtcagcagcaatttgtctaataagtgatgagatcagtagctgaagtctctaagctgggccattactaaataccatagccatgttgatctggaaatttatccctctagtgtcttacctcacataagccatttgcccactgtgcaatatagaaaggtgttttcaaaagtatttggccgtagattttcacatccatcataaggttggcattcaataaggaaaaagttctaactccagtattaaattgtacataaatcccaaatgttcttaaagaacactcagggacatgtttgttgcctgggattggtaatgaaaggttggtttttgaaacttgaaatttcaccattggtttttttcctatcatttctgcatatccagcaaaaggaatctcatgttgactcctggcagagttcagtggcttcagtctgtctatctgttctgaggggaaaattgtgttctggatccagtaatcaatttggcaactttaatcgaggttttcaaaattccaaggagggttaataaagaatgataatcagttttatttgctaatagctaagacaaatttgtaataaagtgttttataatacttcaaaagcatgtg

SEQ ID NO: 6145 - protein, 201 aa, Homo sapiens
MLSFPLFKDDLCKDDFKTSKGGAHCFPELRVGVFEEIVPMGISPKKISYKKPGIHLSPGEFHKEVEKFLSQANQEQSDTILLDCRNFYESKIGRFQGCLAPDIRKFSYFPSYVDKNLELFREKRVLMYCTGGIRCERGSAYLKAKGVCKEVFQLKGGIHKYLEEFPDGFYKGKLFVFDERYALSYNSDVVSGRSAQAQSPN

SEQ ID NO: 6146 - DNA, 2636 bp, Homo sapiens
gagacttccggagcttggtgacgtcacgagcgagcttttctacccaaatacgcggcgggggaataggctcgagggcggtgagcagtgacaattgctaggcggagacagtgcagggaagagagaccttagaaaggatcaggactggcgggaggtatttaactgaaaggaatatctgcttcactgttgcaaccaaaccagatgccttcttccacttcaccagaccaaggagatgacctggagaactgcattttaagattttctgacctggatttaaaagatatgagtcttattaatcccagcagcagtcttaaagcagaattagatggcagtacaaaaaagaaatactcgtttgcaaagaaaaaggtagaattcttatgaatgtttcatgatcatgtatgtgtggttaacgcagatacatttggaagtcggttatcaaggttgctctccagctcaaggcctttgccctttttgtcaaaaccaaagaagttccaacaaaaaggagttttgaatgtaaagaaaaattgtggaaatgctgtcggcagctattcacagaccaaaccagcatccatagacatgtggcaacacaacatgctgatgaaatttatcaccagacagcttctattttaaagcaactggctgtgacattgagcacctcaaagagtctttcgtctgcagatgaaaagaaccctttaaaagagtgccttccacatagccatgacgtgtctgcttggctccctgatataagctgctttaaccctgatgagctgataagtggccagggcagtgaagaaggggaggtgctcctttattactgctaccatgacctggaggatccccaatggatctgtgcctggcagacagctctgtgtcagcacctgcacctcacaggcaagattcgaattgctgcagaaggaatcaatgggacagttggtggaagcaaattggctaccagactttatgtggaagtcatgctttccttcccattgtttaaggatgacctgtgtaaagatgattttaagaccagcaaaggaggagctcactgttttccagaattgcgtgttggtgtatttgaagaaatcgtgcccatggggatcagccccaaaaagatctcctacaagaagcctggaatccatttatccccaggtgaatttcataaagaagtagaaaagtttttatctcaggcaaatcaagaacaaagtgatactatccttcttgattgcagaaacttctatgaaagcaaaataggacgattccaaggctgcttagccccagacatcaggaaattcagttacttccctagctacgttgacaaaaatctagaacttttcagagagaagagagtgctgatgtactgtaccgggggcatccgctgtgagcggggttcagcctacctcaaagccaagggagtgtgcaaggaggtgttccagctcaagggtggcatccacaagtacctggaagagtttcctgatggcttttacaaagggaagttgtttgtttttgatgaacgctatgctctgtcctacaacagtgatgtggtgtcagagtgttcatactgtggagcccgctgggaccagtataaactctgctctactccccatggacactcttccatagcgctgaggccctggccccgcctccagttaccctgtactgcccactgccttacagttcagtgcgcaggccttcaccttttcatcaccagcctctctgctcagtgctctggagttcttgaccttgtcctttatcatgagatttgctgaaatcactaatgaaaataactcccaaaagcaacaaacaaaaatattagtttaactggcactgtggtatattaaaaggcacaagggcattgtggcttaacacttttgctggatcccaagagacgcacatgatgttaaaaagagatctggcagcagtactaatactacatttcagtgtaatcatcttggggtggtttggccaggatttcccaattccttgatatctggagtttcttcaccattgtccggcatcctgcggaggcttaatatacaggcgtaaggtcagcagcaatttgtctaataagtgatgagatcagtagctgaagtctctaagctgggccattactaaataccatagccatgttgatctggaaatttatccctctagtgtcttacctcacataagccatttgcccactgtgcaatatagaaaggtgttttcaaaagtatttggccgtagattttcacatccatcataaggttggcattcaataaggaaaaagttctaactccagtattaaattgtacataaatcccaaatgttcttaaagaacactcagggacatgtttgttgcctgggattggtaatgaaaggttggtttttgaaacttgaaatttcaccattggtttttttcctatcatttctgcatatccagcaaaaggaatctcatgttgactcctggcagagttcagtggcttcagtctgtctatctgttctgaggggaaaattgtgttctggatccagtaatcaatttggcaactttaatcgaggttttcaaaattccaaggagggttaataaagaatgataatcagttttatttgctaatagctaagacaaatttgtaataaagtgttttataatacttcaaaagcatgtg

SEQ ID NO: 6147 - protein, 263 aa, Homo sapiens [sequence omitted]

SEQ ID NO: 6148 - DNA, 4249 bp, Homo sapiens
cggccgctctagtctccgcctccgctcaggccggtcctccggggcttctcaatggtttcccggtggcctctcaatggttttcccggcggcccttgcgccgacgccaggagacttccggagcttggtgacgtcacgagcgagcttttctacccaaatacgcggcgggggaataggctcgagggcggtgagcagtgacaattgctaggcggagacagtgcagggaagagagaccttagaaaggatcaggactggcgggaggtatttaactgaaaggaatatctgcttcactgttgcaaccaaaccagatgccttcttccacttcaccagaccaaggagatgacctggagaactgcattttaagattttctgacctggatttaaaagatatgagtcttattaatcccagcagcagtcttaaagcagaattagatggcagtacaaaaaagaaatactcgtttgcaaagaaaaaggcctttgccctttttgtcaaaaccaaagaagttccaacaaaaaggagttttgaatgtaaagaaaaattgtggaaatgctgtcggcagctattcacagaccaaaccagcatccatagacatgtggcaacacaacatgctgatgaaatttatcaccagacagcttctattttaaagcaactggctgtgacattgagcacctcaaagagtctttcgtctgcagatgaaaagaaccctttaaaagagtgccttccacatagccatgacgtgtctgcttggctccctgatataagctgctttaaccctgatgagctgataagtggccagggcagtgaagaaggggaggtgctcctttattactgctaccatgacctggaggatccccaatggatctgtgcctggcagacagctctgtgtcagcacctgcacctcacaggcaagattcgaattgctgcagaaggaatcaatgggacagttggtggaagcaaattggctaccagactttatgtggaagtcatgctttccttcccattgtttaaggatgacctgtgtaaagatgattttaagaccagcaaaggaggagctcactgttttccagaattgcgtgttggtgtatttgaagaaatcgtgcccatggggatcagccccaaaaagatctcctacaagaagcctggaatccatttatccccaggtgaatttcataaagaagtagaaaagtttttatctcaggcaaatcaagaacaaagtgatactatccttcttgattgcagaaacttctatgaaagcaaaataggacgattccaaggctgcttagccccagacatcaggaaattcagttacttccctagctacgttgacaaaaatctagaacttttcagagagaagagagtgctgatgtactgtaccgggggcatccgctgtgagcggggttcagcctacctcaaagccaagggagtgtgcaaggaggtgttccagctcaagggtggcatccacaagtacctggaagagtttcctgatggcttttacaaagggaagttgtttgtttttgatgaacgctatgctctgtcctacaacagtgatgtggtgtcagagtgttcatactgtggagcccgctgggaccagtataaactctgctctactccccagtgccgccagctcgttttgacctgccctgcctgtcaaggacaaggattcacagcctgttgtgtcacatgtcaagacaaggggagcaggaaagtttcaggccctatgcaagacagctttaaagaggaatgcgagtgcacagcccgacggccacgcatacctagggaactcttgcagcatgtgcgacagcctgtgagcccagagccagggcctgatgctgatgaggatgggccagtgcttatgtgagcagcacctttggcattttcccaggccctcggtaaaagtaggtttggggtgactatacagagaaagcatggcaagactgcagaaacagagaaatcgggaacttcagttctggccgctgccaccgtggcagccgtctacacttcacagcgggaggggaggagtcacgttgtctaccacttacctgagacattctgatttggatgatgctagagcacagaaaataggtgagctgcatgggatcccaaagctgctgagggatagagcctgagcctggtggccacagcatatgccctttctgttccatgcagctggggctgttagtagtcattgcccttgtcagcagaccttctaccctggtggcaaacacatgaaagctgtggccctgggagtggcctcctaaaacaagccacttaggtcatctgccatctacccttaacctctgtctctcgcctgaggggaatctgcaagctgtgcattgggcttacctcctgcttttgtagaaataaccatcctttggtatacatggaggatagttccagaacgcctgagtatacaaaaacccaatgcatactcaagtcccacagtgggccctacagaacccacgtatgtgataaatcagccctccatgtacgcaggtttcgccccctgccaatactgtattttcaacctgtatggttgaaaaaaatccatatataagtgcagccatgcagttcaaacccatattgttcaagggtcaactgtatagtttattgaacagccacacccattcctttacacatgatctatggcagagttgaatagttgcaacagacactatgtggcctgcaaaatcggaaatttttactgtctggccttttacagaaaagtttgccagcccctgatctagaccagcagctcatctgatagaggcagaggtggccttaaagatgtggccttcttcattttctgttggtttggtttcgtttctatgagagatttcctctgatagctctgctttccccagcacttactctctgagcttttaaatgttctctctgggagcttcatataagctcggtgacatttgagccacagtttttagatcagcacctggaatacatgacacattcttactgaggtcatccagcactgccatggtggctgcccagtcttctggccagtgtgccaggcacatgtccctgtcacacaggttccaagaaacacatacgcagccatgcatagaccaacagatttaatattatattgcagttttcagcgatgcagaatgcagctgcaattgtgttttaaggagaagccaaatggggatggttgtccctgcaacatggtgccactcctgggccatgtgcagcctcagtggacactcttccatagcgctgaggccctggccccgcctccagttaccctgtactgcccactgccttacagttcagtgcgcaggccttcaccttttcatcaccagcctctctgctcagtgctctggagttcttgaccttgtcctttatcatgagatttgctgaaatcactaatgaaaataactcccaaaagcaacaaacaaaaatattagtttaactggcactgtggtatattaaaaggcacaagggcattgtggcttaacacttttgctggatcccaagagacgcacatgatgttaaaaagagatctggcagcagtactaatactacatttcagtgtaatcatcttggggtggtttggccaggatttcccaattccttgatatctggagtttcttcaccattgtccggcatcctgcggaggcttaatatacaggcgtaaggtcagcagcaatttgtctaataagtgatgagatcagtagctgaagtctctaagctgggccattactaaataccatagccatgttgatctggaaatttatccctctagtgtcttacctcacataagccatttgcccactgtgcaatatagaaaggtgttttcaaaagtatttggccgtagattttcacatccatcataaggttggcattcaataaggaaaaagttctaactccagtattaaattgtacataaatcccaaatgttcttaaagaacactcagggacatgtttgttgcctgggattggtaatgaaaggttggtttttgaaacttgaaatttcaccattggtttttttcctatcatttctgcatatccagcaaaaggaatctcatgttgactcctggcagagttcagtggcttcagtctgtctatctgttctgaggggaaaattgtgttctggatccagtaatcaatttggcaactttaatcgaggttttcaaaattccaaggagggttaataaagaatgataatcagttttatttgctaatagctaagacaaatttgtaataaagtgttttataatacttcaaaagcatgtg

SEQ ID NO: 6149 - protein, 516 aa, Homo sapiens; identical to SEQ ID NO: 619

SEQ ID NO: 6150 - DNA, 1123 bp, Homo sapiens
tcccccctggaaaagggaacaatcaaagaggaaaagaccacttaacaagggggttgggaggtagttggccagctttggaatagctggtgagagagagaaactttcattaccatctagttaccacctgttctctagatgggaaaaagaaaaaaaaagtcagtaaatactggaagcagacagttaccagaagtcacccccacaaaaaaataagctgggtggtgggggtggtggttagttgttgttgctagaagacagaagacttactatttggaaaccttccccgggttccacaggatctacgagattctagtcagcaaagggagcaatgcctgtccacgtgtgtgtgaatgtatgtgtttataatgatggcttttccttcctccccagagtgttcatactgtggagcccgctgggaccagtataaactctgctctactccccagtgccgccagctcgttttgacctgccctgcctgtcaaggacaaggattcacagcctgttgtgtcacatgtcaagacaaggggagcaggaaagtttcaggccctatgcaagacagctttaaagaggaatgcgagtgcacagcccgacggccacgcatacctagggaactcttgcagcatgtgcgacagcctgtgagcccagagccagggcctgatgctgatgaggatgggccagtgcttatgtgagcagcacctttggcattttcccaggccctcggtaaaagtaggtttggggtgactatacagagaaagcatggcaagactgcagaaacagagaaatcgggaacttcagttctggccgctgccaccgtggcagccgtctacacttcacagcgggaggggaggagtcacgttgtctaccacttacctgagacattctgatttggatgatgctagagcacagaaaatagcaaaaggaatctcatgttgactcctggcagagttcagtggcttcagtctgtctatctgttctgaggggaaaattgtgttctggatccagtaatcaatttggcaactttaatcgaggttttcaaaattccaaggagggttaataaagaatgataatcagttttatttgctaatagctaagacaaatttgtaataaagtgttttataatacttca

SEQ ID NO: 6151 - protein, 58 aa, Homo sapiens [sequence omitted]

SEQ ID NO: 6152 - DNA, 987 bp, Homo sapiens
ctatgttccccaggcttccccttgtattttaatacttacccatcttctagctttcctgtctttttctctcctttactttctttctcatatgtcgtttctgttgtccacccctcttgcccttttctcttttactcatgcacacacacttagacacattcttcttgctcctttgcattaaaaatgtatctattccaactttattccataactttttgctcacacctgcctgtgggttcttagccttcaacgtgggttcgaccttaatatagaacagtttacaaagcctgtagtcagccacgtacttgcccagctcctccatgtacagtgacaatagagcagtggccatttcctgacctaccagtgaccatacaatggaccagcaaattcacatggcaatttagatcccagttgcctggtttttatcactagggttaggccaagtatgaggatgcaaaattctttgactagttatttctaaactaccaggtctccattgccctcattttaggaggagggagattgaggatacctggaattactggaattactaagttatttcatcatgatcatcaagtagtgttcttttcagacagttgtaattatgaagagaagagatttgggtggaaagaaacaaagcaacacgaatccatttatccccaggtgaatttcataaagaagtagaaaagtttttatctcaggcaaatcaagaacaaagtgatactatccttcttgattgcagaaacttctatgaaagcaaaataggacgattccaaggctgcttagccccagacatcaggaaattcagttacttccctagctacgttgacaaaaatctagaacttttcagagagaagagagtgctgatgtactgtaccgggggcatccgctgtgagcggggttcagcctacctcaaagccaaggaggcaagatctggccagttggtgccttgaccccttggtcagcaattcctcagtgtcccgcagtggg

SEQ ID NO: 6153 - protein, 44 aa, Homo sapiens
MHTHLDTFFLLLCIKNVSIPTLFHNFLLTPACGFLAFNVGSTLI

SEQ ID NO: 6154 - DNA, 1209 bp, Homo sapiens
agcctcggctcccaaccgggagcggcctccgtggccgggccgcaggcactcaccgtcgttctcgtcgctgtgccgccgccgcgacatgctgccctccggtgcgccgcggaaccgagaggccaggcggtaagcgctgcaggaactgtctggccgctggccgacgcaaggacagctgcaaggcgcgcggatgggccggcacgcaggcgcactagctcgccacggccccggaagcgcaggagaggccgccgggtggggctaggcgctgcgacagccggcgtgaggaagctcagtgggctacgaacgtctggcacacatgcaaccgccccctcgggctgcctccgcctgccggctacttctttctcccgccttccgctctatgtccttccggggccacgcagaaagtgccgccgctttggccactcagagcccccgggccgcggtcgtcgtacgcctgaaggcgggtcgtgccggcggccgctctagtctccgcctccgctcaggccggtcctccggggcttctcaatggtttcccggtggcctctcaatggttttcccggcggcccttgcgccgacgccaggagacttccggagcttggtgacgtcacgagcgagcttttctacccaaatacgcggcgggggaataggctcgagggcggtgagcagtgacaattgctaggcggagacagtgcagggaagagagaccttagaaaggatcaggactggcgggaggtatttaactgaaaggaatatctgcttcactgttgcaaccaaaccagatgccttcttccacttcaccagaccaaggagatgacctggagaactgcattttaagattttctgacctggatttaaaagatatgagtcttattaatcccagcagcagtcttaaagcagaattagatggcagtacaaaaaagaaatactcgtttgcaaagaaaaaggcctttgccctttttgtcaaaaccaaagaagttccaacaaaaaggagttttgaatgtaaagaaaaattgtggaaatgctgtcggcagctattcacagaccaaaccagcatccatagacatgtggcaacacaacatgctgatgaaatttatcaccagacagctagattcgaattgctgcagaaggaatcaatgggacagttggtggaagcaaattggctaccagactttatgtggaagtcatgctttccttcccattgtttaaggatga

SEQ ID NO: 6155 - protein, 143 aa, Homo sapiens
MPSSTSPDQGDDLENCILRFSDLDLKDMSLINPSSSLKAELDGSTKKKYSFAKKKAFALFVKTKEVPTKRSFECKEKLWKCCRQLFTDQTSIHRHVATQHADEIYHQTARFELLQKESMGQLVEANWLPDFMWKSCFPSHCLR

SEQ ID NO: 6156 - DNA, 647 bp, Homo sapiens
attgatgataaaaaatactgatagaactcagtgaggctatggataaaatggcacccacatgcttttctggttagagtataaattggtacatttttcctggaagtcactattacagattaaaatttcatgttctttgacccctcaatttttattttagatattctaagtaggtggttaaagatatagaaagatagatgcatggaatgctcattcaacatggcttttaattgcaaatattagaaacaatctaaatgttcatcagttggtaactggttaagagaattttctgtttgattgttttacaataagcataagtaatttttataaaaacagtaatattattttccaagaaggaagatattttggtacgtttcttcctggtctttttcaatgtactttttaatgtggttaagattacattgcataagcaattttatccaatttttttcacttaatattatatcataaaatatttttccatataacttaaaactggctgcttaatattccatggcctttgccctttttgtcaaaaccaaagaagttccaacaaaaaggagttttgaatgtaaagaaaaattgtggaaatgctgtcggcagctattcacagaccaaaccagcatccatagacatgtggcaacacaaca

SEQ ID NO: 6157 - protein, 44 aa, Homo sapiens
MAFALFVKTKEVPTKRSFECKEKLWKCCRQLFTDQTSIHRHVAT

SEQ ID NO: 6158 - DNA, 1314 bp, Homo sapiens
ggcaaaagccggaaagtgggagtagatgagcacatacccgccagtcctgatcctttctaaggtctctcttccctgcactgtctccgcctagcaattgtcactgctcaccgccctcgagcctattcccccgccgcgtatttgggtagaaaagctcgctcgtgacgtcaccaagctccggaagtctcctggcgtcggcgcaagggccgccgggaaaaccattgagaggccaccgggaaaccattgagaagccccggaggaccggcctgagcggaggcggagactagagcggccgccggcacgacccgccttcaggcgtacgacgaccgcggcccgggggctctgagtggccaaagcggcggcactttctgcgtggccccggaaggacatagagcggaaggcgggagaaagaagtagccggcaggcggaggcagcccgagggggcggttgcatgtgtgccagacgttcgtagcccactgagcttcctcacgccggctgtcgcagcgcctagccccacccggcggcctctcctgcgcttccggggccgtggcgagctagtgcgcctgcgtgccggcccatccgcgcgccttgcagctgtccttgcgtcggccagcggccagacagttcctgcagcgcttaccgcctggcctctcggttccgcggcgcaccggagggcagcatgtcgcggcggcggcacagcgacgagaacgacggtgggcagcctcacaaaaggagaaagacctctgatgcaaatgaaactgaagatcatttggaatctttaatatgtaaagtaggagaaaagagtgcctgctctttggagagcaacctagaaggcttggctggtgttttggaagctgatcttcctaactacaagagcaagatcttaaggcttctttgtacagtgtatgtatgcaaaagatttatgaatccaggtgataatgtattatctactcttaaatgctttgggaaatgttcaaaatacatgtttatgttctatatgtccttggctttacttctatggggaaatttgtacaaatgagccaacctttggcgctttggcgaactctttttcttagggataaaactaaaattgaacattttccttgtatgttcttacaaccttagaatcattttagttgactttttatagagatagtagatactgtctcattcagatatatatttttaagcatgtacatttaaatgtatgatacttacatttttaaattagtaccagacaaatttgggaattggtaactcaggtaatagcccttcttggaagactgaagatgctttggaagccactgttaataggca

SEQ ID NO: 6159 - protein, 119 aa, Homo sapiens
MSRRRHSDENDGGQPHKRRKTSDANETEDHLESLICKVGEKSACSLESNLEGLAGVLEADLPNYKSKILRLLCTVYVCKRFMNPGDNVLSTLKCFGKCSKYMFMFYMSLALLLWGNLYK

SEQ ID NO: 6160 - DNA, 3479 bp, Homo sapiens
ggcaaaagccggaaagtgggagtagatgagcacatacccgccagtcctgatcctttctaaggtctctcttccctgcactgtctccgcctagcaattgtcactgctcaccgccctcgagcctattcccccgccgcgtatttgggtagaaaagctcgctcgtgacgtcaccaagctccggaagtctcctggcgtcggcgcaagggccgccgggaaaaccattgagaggccaccgggaaaccattgagaagccccggaggaccggcctgagcggaggcggagactagagcggccgccggcacgacccgccttcaggcgtacgacgaccgcggcccgggggctctgagtggccaaagcggcggcactttctgcgtggccccggaaggacatagagcggaaggcgggagaaagaagtagccggcaggcggaggcagcccgagggggcggttgcatgtgtgccagacgttcgtagcccactgagcttcctcacgccggctgtcgcagcgcctagccccacccggcggcctctcctgcgcttccggggccgtggcgagctagtgcgcctgcgtgccggcccatccgcgcgccttgcagctgtccttgcgtcggccagcggccagacagttcctgcagcgcttaccgcctggcctctcggttccgcggcgcaccggagggcagcatgtcgcggcggcggcacagcgacgagaacgacggtgggcagcctcacaaaaggagaaagacctctgatgcaaatgaaactgaagatcatttggaatctttaatatgtaaagtaggagaaaagagtgcctgctctttggagagcaacctagaaggcttggctggtgttttggaagctgatcttcctaactacaagagcaagatcttaaggcttctttgtacagttgcacgcctattacctgagaagctgacaatttatacaacattagttggactactgaatgccaggaattacaattttggtggagaatttgtagaagccatgattcgtcaacttaaagaatcattgaaagcaaacaattataatgaagccgtgtatttggtccgttttttatctgatcttgtgaattgtcatgtgattgccgccccatcaatggttgctatgtttgaaaattttgtaagcgtaactcaggaagaagatgtacctcaggtgcgacgagattggtatgtgtatgcatttctgtcatctttgccctgggttggaaaggagttgtacgaaaagaaagatgcagagatggaccgcatctttgccaacactgaaagctatcttaaaagacgccaaaagactcatgtacccatgttacaggtatggactgctgataaaccacatccacaagaagagtatttagattgcctgtgggcccagattcagaaattgaaaaaggatcgctggcaggaacggcacatcctaagaccttatcttgcctttgacagcatcctgtgtgaagcactgcagcacaatctgcctccttttacaccacctcctcacactgaagattcagtgtacccaatgccaagggtcatcttcagaatgtttgattacacagatgatcccgagggtcctgtcatgccagggagtcattcagtggaaagatttgtaatagaagagaatcttcactgcatcattaagtcccactggaaggaaaggaagacttgtgctgcacagttagtgagctatccagggaagaacaagatccccttgaactaccacatagttgaggtgatctttgcagagctgtttcaacttccagcaccccctcacattgatgtgatgtacacaacactcctcattgaactgtgcaaacttcaacctggctctctaccccaagttcttgcacaggcaactgaaatgctatacatgcgtttggacacaatgaacactacctgtgtagacaggtttattaattggttttctcatcatctaagtaacttccagttccgttggagctgggaagattggtcagattgtcttagtcaagatcctgaaagtcccaaaccgaagtttgtaagagaagttctagaaaaatgtatgaggttgtcttaccatcagcgtatattagatattgttcctcctaccttctcagctctgtgtcctgcaaacccaacctgcatttacaagtatggagatgaaagtagcaattctcttcctggacattctgttgccctctgtttagctgttgcctttaaaagtaaggcaaccaatgatgaaatcttcagcattctgaaagatgtaccaaatcctaaccaggatgatgacgacgatgaaggattcagttttaacccattgaaaatagaagtctttgtacagactctgctacacttggcagccaaatcattcagccactccttcagtgctcttgcaaagtttcatgaagtcttcaaaaccctagctgaaagtgatgaaggaaagttacatgtgctaagagttatgtttgaggtctggaggaaccatccacagatgattgctgtactagtggataagatgattcgtacacaaatagttgattgtgctgccgtagcaaattggatcttctcttcagaactatctcgtgactttaccagattgtttgtttgggaaattttgcactctacaattcgtaagatgaacaaacatgtcctgaagatccagaaagagctggaagaagctaaagagaaacttgctaggcaacacaaacggcgaagtgatgatgacgacagaagcagtgacaggaaagacggggttcttgaggaacaaatagaacgacttcaggaaaaagtggaatctgctcagagtgaacaaaagaatcttttcctcgttatatttcagcggtttatcatgatcttgaccgagcacctagtacgatgcgaaactgatgggaccagtgtattaacaccatggtataagaactgtatagagaggctgcagcagatcttcctacagcatcaccaaataatccagcagtacatggtgaccctggagaaccttctcttcactgctgaattagaccctcatatcttggccgtgttccagcagttctgtgccctgcaggcctaagggtcattttttcctcatgtcaaggttttttttgatatcttaaaataatttgtcttattttttgatggtttgaatgcttgctttcttgtagtatcctttcacttcttaaaggaaacaaaggggaagaggacagtgaatgaacatggcattacttttaattgccctgaaaagcaaatacttcctaacggcagtaatgtgactatgaccatgatatattatatatgtgacagatacaaattctctgtgatcagtttgttattttttttctccttaaggcacaaaataattggtttgaggtatgtgaaacactagaggtcaaccttacatagtatatagaactgatgggtttacccagctacccagtagcataacttttcacagctcggggatgaattaacatggctgaaataaaactaaaagtatggttttt

SEQ ID NO: 6161 - protein, 790 aa, Homo sapiens; identical to SEQ ID NO: 621

SEQ ID NO: 6162 - DNA, 5564 bp, Homo sapiens
ggcaaaagccggaaagtgggagtagatgagcacatacccgccagtcctgatcctttctaaggtctctcttccctgcactgtctccgcctagcaattgtcactgctcaccgccctcgagcctattcccccgccgcgtatttgggtagaaaagctcgctcgtgacgtcaccaagctccggaagtctcctggcgtcggcgcaagggccgccgggaaaaccattgagaggccaccgggaaaccattgagaagccccggaggaccggcctgagcggaggcggagactagagcggccgccggcacgacccgccttcaggcgtacgacgaccgcggcccgggggctctgagtggccaaagcggcggcactttctgcgtggccccggaaggacatagagcggaaggcgggagaaagaagtagccggcaggcggaggcagcccgagggggcggttgcatgtgtgccagacgttcgtagcccactgagcttcctcacgccggctgtcgcagcgcctagccccacccggcggcctctcctgcgcttccggggccgtggcgagctagtgcgcctgcgtgccggcccatccgcgcgccttgcagctgtccttgcgtcggccagcggccagacagttcctgcagcgcttaccgcctggcctctcggttccgcggcgcaccggagggcagcatgtcgcggcggcggcacagcgacgagaacgacggtgggcagcctcacaaaaggagaaagacctctgatgcaaatgaaactgaagatcatttggaatctttaatatgtaaagtaggagaaaagagtgcctgctctttggagagcaacctagaaggcttggctggtgttttggaagctgatcttcctaactacaagagcaagatcttaaggcttctttgtacagttgcacgcctattacctgagaagctgacaatttatacaacattagttggactactgaatgccaggaattacaattttggtggagaatttgtagaagccatgattcgtcaacttaaagaatcattgaaagcaaacaattataatgaagccgtgtatttggtccgttttttatctgatcttgtgaattgtcatgtgattgccgccccatcaatggttgctatgtttgaaaattttgtaagcgtaactcaggaagaagatgtacctcaggtgcgacgagattggtatgtgtatgcatttctgtcatctttgccctgggttggaaaggagttgtacgaaaagaaagatgcagagatggaccgcatctttgccaacactgaaagctatcttaaaagacgccaaaagactcatgtacccatgttacaggtatggactgctgataaaccacatccacaagaagagtatttagattgcctgtgggcccagattcagaaattgaaaaaggatcgctggcaggaacggcacatcctaagaccttatcttgcctttgacagcatcctgtgtgaagcactgcagcacaatctgcctccttttacaccacctcctcacactgaagattcagtgtacccaatgccaagggtcatcttcagaatgtttgattacacagatgatcccgagggtcctgtcatgccagggagtcattcagtggaaagatttgtaatagaagagaatcttcactgcatcattaagtcccactggaaggaaaggaagacttgtgctgcacagttagtgagctatccagggaagaacaagatccccttgaactaccacatagttgaggtgatctttgcagagctgtttcaacttccagcaccccctcacattgatgtgatgtacacaacactcctcattgaactgtgcaaacttcaacctggctctctaccccaagttcttgcacaggcaactgaaatgctatacatgcgtttggacacaatgaacactacctgtgtagacaggtttattaattggttttctcatcatctaagtaacttccagttccgttggagctgggaagattggtcagattgtcttagtcaagatcctgaaagtcccaaaccgaagtttgtaagagaagttctagaaaaatgtatgaggttgtcttaccatcagcgtatattagatattgttcctcctaccttctcagctctgtgtcctgcaaacccaacctgcatttacaagtatggagatgaaagtagcaattctcttcctggacattctgttgccctctgtttagctgttgcctttaaaagtaaggcaaccaatgatgaaatcttcagcattctgaaagatgtaccaaatcctaaccaggatgatgacgacgatgaaggattcagttttaacccattgaaaatagaagtctttgtacagactctgctacacttggcagccaaatcattcagccactccttcagtgctcttgcaaagtttcatgaagtcttcaaaaccctagctgaaagtgatgaaggaaagttacatgtgctaagagttatgtttgaggtctggaggaaccatccacagatgattgctgtactagtggataagatgattcgtacacaaatagttgattgtgctgccgtagcaaattggatcttctcttcagaactatctcgtgactttaccagattgtttgtttgggaaattttgcactctacaattcgtaagatgaacaaacatgtcctgaagatccagaaagagctggaagaagctaaagagaaacttgctaggcaacacaaacggcgaagtgatgatgacgacagaagcagtgacaggaaagacggggttcttgaggaacaaatagaacgacttcaggaaaaagtggaatctgctcagagtgaacaaaagaatcttttcctcgttatatttcagcggtttatcatgatcttgaccgagcacctagtacgatgcgaaactgatgggaccagtgtattaacaccatggtataagaactgtatagagaggctgcagcagatcttcctacagcatcaccaaataatccagcagtacatggtgaccctggagaaccttctcttcactgctgaattagaccctcatatcttggccgtgttccagcagttctgtgccctgcaggcctaagggtcattttttcctcatgtcaaggttttttttgatatcttaaaataatttgtcttattttttgatggtttgaatgcttgctttcttgtagtatcctttcacttcttaaaggaaacaaaggggaagaggacagtgaatgaacatggcattacttttaattgccctgaaaagcaaatacttcctaacggcagtaatgtgactatgaccatgatatattatatatgtgacagatacaaattctctgtgatcagtttgttattttttttctccttaaggcacaaaataattggtttgaggtatgtgaaacactagaggtcaaccttacatagtatatagaactgatgggtttacccagctacccagtagcataacttttcacagctcggggatgaattaacatggctgaaataaaactaaaagtatggtttttaaactttggcatttcatgatttatcatctcactctactctaaaactggtggtttcttactgaaggtgttctccatttgaaattttatcttcaaagtatttttaagtagtatctttaagacatgacttgttagtaataaaagtgttactagttggaagagtagctctcaaatttgtcttaatgtaaatcacctgggaatctttcaagttattttgaaatttaaaccaccgtctgggggtggaacgcagacatcctcagtaatccttaaagtttccccaggtgattccaggtttggtcaccattatcttagagcatctactcacttcctctagccttggggttatttgtccaaggtcttgtagtgagttacagaatactaaagtggatgtagaagtggtcagattgactgaaactataccctgaattagatgtgagtttagattttgtttatatggaacctgatccaaaaaactacgaagtcctgagcttgtttcctgtatagtactgatgctgaaataagatgacagcagtttgtaaaataatacacaaatatgaggaattgtctgacattccaaatttcgaggatttttagacttttttcattaaaccttagaaaaaaattaccagtaatcctacaactactggtagtgttgttgtgcatttgcacaaaataggtataattttttcttattacatcccaagtttatgatgcattaagcgttttgcatattttgatatatttttgctttggtttaccatacattttagtggctacagaatgtagtctgcttaataaatgggaattcctagaatgtttaaataccatactatttaagacaaaatacaaaatatccagaaaaatccaggttgcgtggctggttagtaaaggactaaaacccaggttcttggctaaatgttttcgtttatactgtttatctttcccattgcttaagcacagcacaaactatgtaattatatataattacagttgacccttgaacaacatgggtttgaactgtgtgagtctccttacacacaggttttcttccacccctgagatggcaagaccagccccttgtcttcctcagcctgctcaacgtgaagatgatgaggatgaagacctttatgatgatccacttctacttattaaatagtaaatatatttttttcttatgattttattttcttttctctagcttcataagaatatagcatatgggctgggcgcagtggctcacgcctgtaatcccagcactttgggaggctgaggcgggcggatcacaaggtcaggagattgagaccatcctggctaacacagtgaaaccctgtctctactaaaaacacaaaaacttagccaggcgtggtggtacatggctgtagtcccagctacttgggaggctgagacaggagaatcgcttgaacctgggaggtggaggtttcagtgagccaagattgtgccactgcactccagcctgggtgatggagcgaggctctgtctcaaaaaagaaaaaaaatatatagcatataacatacaaaatgagtttatcaactgtttgttattggtaagtcagcagtgggctattggtggttaagttttgggggagtcaaaagttacatgcaaattttttactgtgcggggtgtcagcatccctaaccccatgttgttcaagggtcaactgtagtttaaaatgactcctgtctcaaaaaaccaaaggataacctttaagggattggtaactttgactcaaaactgctttgtaatcttttcacaatgtactgaaaagtgtggctagttatgtttgatccacattctagagaaatttgtaggttttaatttcttttctcttggtcctctcttcatgtataatggttgcttttaacagctgttcgctgatgtggtcctgctctgtcccagtctagcagctttagtgtatggaaaaattgaactaggaattgagttttgaagaaataaaggtgtaagagcaaacattcaacagttgctgtccccagtaatgaagttcatacagacaaaagatggcatgtcactgtacatcataccttgcaataaatattctgttaaattgtg

SEQ ID NO: 6163 - protein, 790 aa, Homo sapiens; identical to SEQ ID NO: 621

SEQ ID NO: 6164 - DNA, 5595 bp, Homo sapiens
ggcaaaagccggaaagtgggagtagatgagcacatacccgccagtcctgatcctttctaaggtctctcttccctgcactgtctccgcctagcaattgtcactgctcaccgccctcgagcctattcccccgccgcgtatttgggtagaaaagctcgctcgtgacgtcaccaagctccggaagtctcctggcgtcggcgcaagggccgccgggaaaaccattgagaggccaccgggaaaccattgagaagccccggaggaccggcctgagcggaggcggagactagagcggccgccggcacgacccgccttcaggcgtacgacgaccgcggcccgggggctctgagtggccaaagcggcggcactttctgcgtggccccggaaggacatagagcggaaggcgggagaaagaagtagccggcaggcggaggcagcccgagggggcggttgcatgtgtgccagacgttcgtagcccactgagcttcctcacgccggctgtcgcagcgcctagccccacccggcggcctctcctgcgcttccggggccgtggcgagctagtgcgcctgcgtgccggcccatccgcgcgccttgcagctgtccttgcgtcggccagcggccagacagttcctgcagcgcttaccgcctggcctctcggttccgcggcgcaccggagggcagcatgtcgcggcggcggcacagcgacgagaacgacggtgggcagcctcacaaaaggagaaagacctctgatgcaaatgaaactgaagatcatttggaatctttaatatgtaaagtaggagaaaagagtgcctgctctttggagagcaacctagaaggcttggctggtgttttggaagctgatcttcctaactacaagagcaagatcttaaggcttctttgtacagttgcacgcctattacctgagaagctgacaatttatacaacattagttggactactgaatgccaggaattacaattttggtggagaatttgtagaagccatgattcgtcaacttaaagaatcattgaaagcaaacaattataatgaagccgtgtatttggtccgttttttatctgatcttgtgaattgtcatgtgattgccgccccatcaatggttgctatgtttgaaaattttgtaagcgtaactcaggaagaagatgtacctcaggtgcgacgagattggtatgtgtatgcatttctgtcatctttgccctgggttggaaaggagttgtacgaaaagaaagatgcagagatggaccgcatctttgccaacactgaaagctatcttaaaagacgccaaaagactcatgtacccatgttacaggtatggactgctgataaaccacatccacaagaagagtatttagattgcctgtgggcccagattcagaaattgaaaaaggatcgctggcaggaacggcacatcctaagaccttatcttgcctttgacagcatcctgtgtgaagcactgcagcacaatctgcctccttttacaccacctcctcacactgaagattcagtgtacccaatgccaagggtcatcttcagaatgtttgattacacagatgatcccgagggtcctgtcatgccagggagtcattcagtggaaagatttgtaatagaagagaatcttcactgcatcattaagtcccactggaaggaaaggaagacttgtgctgcacagttagtgagctatccagggaagaacaagatccccttgaactaccacatagttgaggtgatctttgcagagctgtttcaacttccagcaccccctcacattgatgtgatgtacacaacactcctcattgaactgtgcaaacttcaacctggctctctaccccaagttcttgcacaggcaactgaaatgctatacatgcgtttggacacaatgaacactacctgtgtagacaggtttattaattggttttctcatcatctaagtaacttccagttccgttggagctgggaagattggtcagattgtcttagtcaagatcctgaaagtcccaaaccgaagtttgtaagagaagttctagaaaaatgtatgaggttgtcttaccatcagcgtatattagatattgttcctcctaccttctcagctctgtgtcctgcaaacccaacctgcatttacaagtatggagatgaaagtagcaattctcttcctggacattctgttgccctctgtttagctgttgcctttaaaagtaaggcaaccaatgatgaaatcttcagcattctgaaagatgtaccaaatcctaaccaggatgatgacgacgatgaaggattcagttttaacccattgaaaatagaagtctttgtacagactctgctacacttggcagccaaatcattcagccactccttcagtgctcttgcaaagtttcatgaagtcttcaaaaccctagctgaaagtgatgaaggaaagttacatgtgctaagagttatgtttgaggtctggaggaaccatccacagatgattgctgtactagtggataagatgattcgtacacaaatagttgattgtgctgccgtagcaaattggatcttctcttcagaactatctcgtgactttaccagattgtttgtttgggaaattttgcactctacaattcgtaagatgaacaaacatgtcctgaagatccagaaagagctggaagaagctaaagagaaacttgctaggcaacacaaacggcgaagtgatgatgacgacagaagcagtgacaggaaagacggggttcttgaggaacaaatagaacgacttcaggaaaaagtggaatctgctcagagtgaacaaaagaatcttttcctcgttatatttcagcggtttatcatgatcttgaccgagcacctagtacgatgcgaaactgatgggaccagtgtattaacaccatggtataagaactgtatagagaggctgcagcagatcttcctacagcatcaccaaataatccagcagtacatggtgaccctggagaaccttctcttcactgctgaattagaccctcatatcttggccgtgttccagcagttctgtgccctgcaggcctaagggtcattttttcctcatgtcaaggttttttttgatatcttaaaataatttgtcttattttttgatggtttgaatgcttgctttcttgtagtatcctttcacttcttaaaggaaacaaaggggaagaggacagtgaatgaacatggcattacttttaattgccctgaaaagcaaatacttcctaacggcagtaatgtgactatgaccatgatatattatatatgtgacagatacaaattctctgtgatcagtttgttattttttttctccttaaggcacaaaataattggtttgaggtatgtgaaacactagaggtcaaccttacatagtatatagaactgatgggtttacccagctacccagtagcataacttttcacagctcggggatgaattaacatggctgaaataaaactaaaagtatggtttttaaactttggcatttcatgatttatcatctcactctactctaaaactggtggtttcttactgaaggtgttctccatttgaaattttatcttcaaagtatttttaagtagtatctttaagacatgacttgttagtaataaaagtgttactagttggaagagtagctctcaaatttgtcttaatgtaaatcacctgggaatctttcaagttattttgaaatttaaaccaccgtctgggggtggaacgcagacatcctcagtaatccttaaagtttccccaggtgattccaggtttggtcaccattatcttagagcatctactcacttcctctagccttggggttatttgtccaaggtcttgtagtgagttacagaatactaaagtggatgtagaagtggtcagattgactgaaactataccctgaattagatgtgagtttagattttgtttatatggaacctgatccaaaaaactacgaagtcctgagcttgtttcctgtatagtactgatgctgaaataagatgacagcagtttgtaaaataatacacaaatatgaggaattgtctgacattccaaatttcgaggatttttagacttttttcattaaaccttagaaaaaaattaccagtaatcctacaactactggtagtgttgttgtgcatttgcacaaaataggtataattttttcttattacatcccaagtttatgatgcattaagcgttttgcatattttgatatatttttgctttggtttaccatacattttagtggctacagaatgtagtctgcttaataaatgggaattcctagaatgtttaaataccatactatttaagacaaaatacaaaatatccagaaaaatccaggttgcgtggctggttagtaaaggactaaaacccaggttcttggctaaatgttttcgtttatactgtttatctttcccattgcttaagcacagcacaaactatgtaattatatataattacagttgacccttgaacaacatgggtttgaactgtgtgagtctccttacacacaggttttcttccacccctgagatggcaagaccagccccttgtcttcctcagcctgctcaacgtgaagatgatgaggatgaagacctttatgatgatccacttctacttattaaatagtaaatatatttttttcttatgattttattttcttttctctagcttcataagaatatagcatatgggctgggcgcagtggctcacgcctgtaatcccagcactttgggaggctgaggcgggcggatcacaaggtcaggagattgagaccatcctggctaacacagtgaaaccctgtctctactaaaaacacaaaaacttagccaggcgtggtggtacatggctgtagtcccagctacttgggaggctgagacaggagaatcgcttgaacctgggaggtggaggtttcagtgagccaagattgtgccactgcactccagcctgggtgatggagcgaggctctgtctcaaaaaagaaaaaaaatatatagcatataacatacaaaatgagtttatcaactgtttgttattggtaagtcagcagtgggctattggtggttaagttttgggggagtcaaaagttacatgcaaattttttactgtgcggggtgtcagcatccctaaccccatgttgttcaagggtcaactgtagtttaaaatgactcctgtctcaaaaaaccaaaggataacctttaagggattggtaactttgactcaaaactgctttgtaatcttttcacaatgtactgaaaagtgtggctagttatgtttgatccacattctagagaaatttgtaggttttaatttcttttctcttggtcctctcttcatgtataatggttgcttttaacagctgttcgctgatgtggtcctgctctgtcccagtctagcagctttagtgtatggaaaaattgaactaggaattgagttttgaagaaataaaggtgtaagagcaaacattcaacagttgctgtccccagtaatgaagttcatacagacaaaagatggcatgtcactgtacatcataccttgcaataaatattctgttaaattgtgctggtgcaatttaacatgcttttgtcaaagt

SEQ ID NO: 6165 - protein, 790 aa, Homo sapiens; identical to SEQ ID NO: 621

SEQ ID NO: 6166 - DNA, 6689 bp, Homo sapiens
ggcaaaagccggaaagtgggagtagatgagcacatacccgccagtcctgatcctttctaaggtctctcttccctgcactgtctccgcctagcaattgtcactgctcaccgccctcgagcctattcccccgccgcgtatttgggtagaaaagctcgctcgtgacgtcaccaagctccggaagtctcctggcgtcggcgcaagggccgccgggaaaaccattgagaggccaccgggaaaccattgagaagccccggaggaccggcctgagcggaggcggagactagagcggccgccggcacgacccgccttcaggcgtacgacgaccgcggcccgggggctctgagtggccaaagcggcggcactttctgcgtggccccggaaggacatagagcggaaggcgggagaaagaagtagccggcaggcggaggcagcccgagggggcggttgcatgtgtgccagacgttcgtagcccactgagcttcctcacgccggctgtcgcagcgcctagccccacccggcggcctctcctgcgcttccggggccgtggcgagctagtgcgcctgcgtgccggcccatccgcgcgccttgcagctgtccttgcgtcggccagcggccagacagttcctgcagcgcttaccgcctggcctctcggttccgcggcgcaccggagggcagcatgtcgcggcggcggcacagcgacgagaacgacggtgggcagcctcacaaaaggagaaagacctctgatgcaaatgaaactgaagatcatttggaatctttaatatgtaaagtaggagaaaagagtgcctgctctttggagagcaacctagaaggcttggctggtgttttggaagctgatcttcctaactacaagagcaagatcttaaggcttctttgtacagttgcacgcctattacctgagaagctgacaatttatacaacattagttggactactgaatgccaggaattacaattttggtggagaatttgtagaagccatgattcgtcaacttaaagaatcattgaaagcaaacaattataatgaagccgtgtatttggtccgttttttatctgatcttgtgaattgtcatgtgattgccgccccatcaatggttgctatgtttgaaaattttgtaagcgtaactcaggaagaagatgtacctcaggtgcgacgagattggtatgtgtatgcatttctgtcatctttgccctgggttggaaaggagttgtacgaaaagaaagatgcagagatggaccgcatctttgccaacactgaaagctatcttaaaagacgccaaaagactcatgtacccatgttacaggtatggactgctgataaaccacatccacaagaagagtatttagattgcctgtgggcccagattcagaaattgaaaaaggatcgctggcaggaacggcacatcctaagaccttatcttgcctttgacagcatcctgtgtgaagcactgcagcacaatctgcctccttttacaccacctcctcacactgaagattcagtgtacccaatgccaagggtcatcttcagaatgtttgattacacagatgatcccgagggtcctgtcatgccagggagtcattcagtggaaagatttgtaatagaagagaatcttcactgcatcattaagtcccactggaaggaaaggaagacttgtgctgcacagttagtgagctatccagggaagaacaagatccccttgaactaccacatagttgaggtgatctttgcagagctgtttcaacttccagcaccccctcacattgatgtgatgtacacaacactcctcattgaactgtgcaaacttcaacctggctctctaccccaagttcttgcacaggcaactgaaatgctatacatgcgtttggacacaatgaacactacctgtgtagacaggtttattaattggttttctcatcatctaagtaacttccagttccgttggagctgggaagattggtcagattgtcttagtcaagatcctgaaagtcccaaaccgaagtttgtaagagaagttctagaaaaatgtatgaggttgtcttaccatcagcgtatattagatattgttcctcctaccttctcagctctgtgtcctgcaaacccaacctgcatttacaagtatggagatgaaagtagcaattctcttcctggacattctgttgccctctgtttagctgttgcctttaaaagtaaggcaaccaatgatgaaatcttcagcattctgaaagatgtaccaaatcctaaccaggatgatgacgacgatgaaggattcagttttaacccattgaaaatagaagtctttgtacagactctgctacacttggcagccaaatcattcagccactccttcagtgctcttgcaaagtttcatgaagtcttcaaaaccctagctgaaagtgatgaaggaaagttacatgtgctaagagttatgtttgaggtctggaggaaccatccacagatgattgctgtactagtggataagatgattcgtacacaaatagttgattgtgctgccgtagcaaattggatcttctcttcagaactatctcgtgactttaccagattgtttgtttgggaaattttgcactctacaattcgtaagatgaacaaacatgtcctgaagatccagaaagagctggaagaagctaaagagaaacttgctaggcaacacaaacggcgaagtgatgatgacgacagaagcagtgacaggaaagacggggttcttgaggaacaaatagaacgacttcaggaaaaagtggaatctgctcagagtgaacaaaagaatcttttcctcgttatatttcagcggtttatcatgatcttgaccgagcacctagtacgatgcgaaactgatgggaccagtgtattaacaccatggtataagaactgtatagagaggctgcagcagatcttcctacagcatcaccaaataatccagcagtacatggtgaccctggagaaccttctcttcactgctgaattagaccctcatatcttggccgtgttccagcagttctgtgccctgcaggcctaagggtcattttttcctcatgtcaaggttttttttgatatcttaaaataatttgtcttattttttgatggtttgaatgcttgctttcttgtagtatcctttcacttcttaaaggaaacaaaggggaagaggacagtgaatgaacatggcattacttttaattgccctgaaaagcaaatacttcctaacggcagtaatgtgactatgaccatgatatattatatatgtgacagatacaaattctctgtgatcagtttgttattttttttctccttaaggcacaaaataattggtttgaggtatgtgaaacactagaggtcaaccttacatagtatatagaactgatgggtttacccagctacccagtagcataacttttcacagctcggggatgaattaacatggctgaaataaaactaaaagtatggtttttaaactttggcatttcatgatttatcatctcactctactctaaaactggtggtttcttactgaaggtgttctccatttgaaattttatcttcaaagtatttttaagtagtatctttaagacatgacttgttagtaataaaagtgttactagttggaagagtagctctcaaatttgtcttaatgtaaatcacctgggaatctttcaagttattttgaaatttaaaccaccgtctgggggtggaacgcagacatcctcagtaatccttaaagtttccccaggtgattccaggtttggtcaccattatcttagagcatctactcacttcctctagccttggggttatttgtccaaggtcttgtagtgagttacagaatactaaagtggatgtagaagtggtcagattgactgaaactataccctgaattagatgtgagtttagattttgtttatatggaacctgatccaaaaaactacgaagtcctgagcttgtttcctgtatagtactgatgctgaaataagatgacagcagtttgtaaaataatacacaaatatgaggaattgtctgacattccaaatttcgaggatttttagacttttttcattaaaccttagaaaaaaattaccagtaatcctacaactactggtagtgttgttgtgcatttgcacaaaataggtataattttttcttattacatcccaagtttatgatgcattaagcgttttgcatattttgatatatttttgctttggtttaccatacattttagtggctacagaatgtagtctgcttaataaatgggaattcctagaatgtttaaataccatactatttaagacaaaatacaaaatatccagaaaaatccaggttgcgtggctggttagtaaaggactaaaacccaggttcttggctaaatgttttcgtttatactgtttatctttcccattgcttaagcacagcacaaactatgtaattatatataattacagttgacccttgaacaacatgggtttgaactgtgtgagtctccttacacacaggttttcttccacccctgagatggcaagaccagccccttgtcttcctcagcctgctcaacgtgaagatgatgaggatgaagacctttatgatgatccacttctacttattaaatagtaaatatatttttttcttatgattttattttcttttctctagcttcataagaatatagcatatgggctgggcgcagtggctcacgcctgtaatcccagcactttgggaggctgaggcgggcggatcacaaggtcaggagattgagaccatcctggctaacacagtgaaaccctgtctctactaaaaacacaaaaacttagccaggcgtggtggtacatggctgtagtcccagctacttgggaggctgagacaggagaatcgcttgaacctgggaggtggaggtttcagtgagccaagattgtgccactgcactccagcctgggtgatggagcgaggctctgtctcaaaaaagaaaaaaaatatatagcatataacatacaaaatgagtttatcaactgtttgttattggtaagtcagcagtgggctattggtggttaagttttgggggagtcaaaagttacatgcaaattttttactgtgcggggtgtcagcatccctaaccccatgttgttcaagggtcaactgtagtttaaaatgactcctgtctcaaaaaaccaaaggataacctttaagggattggtaactttgactcaaaactgctttgtaatcttttcacaatgtactgaaaagtgtggctagttatgtttgatccacattctagagaaatttgtaggttttaatttcttttctcttggtcctctcttcatgtataatggttgcttttaacagctgttcgctgatgtggtcctgctctgtcccagtctagcagctttagtgtatggaaaaattgaactaggaattgagttttgaagaaataaaggtgtaagagcaaacattcaacagttgctgtccccagtaatgaagttcatacagacaaaagatggcatgtcactgtacatcataccttgcaataaatattctgttaaattgtgctggtgcaatttaacatgcttttgtcaaagtaaacatactgttttcctaatttataactgtacttgaaaatgaaagatgaggaagggaccttgccaacctatgtagagcaggtttagctgttagtgatttctggataccaggattgtcttaaactggtaagggtgtagagggtgaatagaagcatcccttaactagacaaatctattttctgtaacatagtggccttggtaatacatgctcattaactagtggttattatgtgccaggtgctataggttcaccctattaactacttcaaacagtcctttgagatgattatgccctctttacagataaaaacaggttttggagtaatttacccacggtccacagctagtaagtggaatttgaacctagatccagttggcccaagagctccttccccgcccccataatgctcttacaacaacctgaacccctagttattctgttgtcatcatctgttgtcatcaagctgaaagcttttttccccagagacatcttgctgcccattcagaatcaatttttactaagctgtaatatttagcatagcacgtattagtcattgagtgtgaaggtgtttaaaaaaaaatcaaacttgaaaaatacacaaacatttctgtgtagtctgaattatttggacatgacttgttttgacttagcctttctccaagcataatctccattaaagaaaaaaaaatggaaatgtttaaacttcctattctatttgtacagtaggataaaatgtcatgtcaaacaatttgaaaatatcaggttattttaactaactggaatttgtttttgtcaaaaaataatgcatagacccaataattcttttgacaagctacaggaaaatttcactaaagttgatgcagatgcctgcggtgatgtgagacttcaccttcctttccttagaagtctgaaagcagcatggaagcaagcctgggactaaatgaacatactcctaaggcacttaggtgcatgcctggcacctggttggtaaatgctcagtaaatgttagcactacttaaaataaacatcagtgccttctttgatcaacaatcagatagtcaaccatgaaaacagctcttttccattttaatcca

SEQ ID NO: 6167 - protein, 790 aa, Homo sapiens; identical to SEQ ID NO: 621

SEQ ID NO: 6168 - DNA, 285 bp, Homo sapiens
ttactctgaggttctcgcggcaagacccaaatggacagtgatttggctgccagctggtgttaaaaacaagccaactccaagaaagttatggattacctctaagtgagaaaaaggaagcattagaacaacaaagaaaagaacaaaagactcaagttctccagcccccaaaattattccatctttatgaaggcaacactgatctccacgagcacaatcatccaaacggagatgggaacccctgttctaactctctcagaggcctgaagttagttttctagcactctc

SEQ ID NO: 6169 - protein, 78 aa, Homo sapiens
FGCQLVLKTSQLQESYGLPLSEKKEALEQQRKEQKTQVLQPPKLFHLYEGNTDLHEHNHPNGDGNPCSNSLRGLKLVF

SEQ ID NO: 6170 - DNA, 536 bp, Homo sapiens
ttaacctattagaaaaagctttcacatacggtatttatatgtgattaaatattgaccttgggataaagagcatcctattttgaaaggaagaatttaaaaaaaatttttctcagttatttaactgttcattagaatagtcttgaaacctgatctgtcattccccttacccccaattctgtgtttagattctcttcctggacattctgttgccctctgtttagctgttgcctttaaaagtaaggcaaccaatgatgaaatcttcagcattctgaaagatgtaccaaatcctaaccaggatgatgacgacgatgaaggattcagttttaacccattgaaaatagaagtctttgtacagactctgctacacttggcagccaaatcattcagccactccttcagtgctcttgcaaagtatgtatgagtacagagccttgcttgagagtttggaattttgcttggtgaacaccagtggtatggtaatttttacctaagattgttgaatatgaagatcttaatagtgtataattggacacagt

SEQ ID NO: 6171 - protein, 99 aa, Homo sapiens
LFIRIVLKPDLSFPLPPILCLDSLPGHSVALCLAVAFKSKATNDEIFSILKDVPNPNQDDDDDEGFSFNPLKIEVFVQTLLHLAAKSFSHSFSALAKYV

SEQ ID NO: 6172 - DNA, 864 bp, Homo sapiens
ctccttttcctactgtggcattctgttatctgaagtcaaacgtacctgaatgtgtcctattgtgttactcaactcacttctgaatatggttctgttttgcataccaccaacccacataaccatttctgaatctcttgtttcacactgctccagtgacaacttgattcacaggccgaactagtgagaattgcggcgagcagtaagaagcagcgtgtggaaaagggagacgattgttcatcaacatgagtatggaccagaagaaaacctagaagatgacatgtaccgtaagacttgtactatgtgtggccatgaactgacatatgaaaaaatgtgattttttagttcagtgacctgttttatagaattttatatttaaataaaggaaatttagattggtccttttcaaaattcaaaaaaaaaagcaacatcttcatagatgaatgaaacccttgtataagtaatacttcagtaataattatgtatgttatggcttaaaagcaagtttcagtgaaggtcacctggcctggttgtgtgcacaatgtcatgtctgtgattgccttcttacaacagagatgggagctgagtgctagagtaggtgcagaagtggtaggtcagctacaaatttgaggacaagataccaaggcaaaccctagattggggtagagggaaaagggttcaacaaaggctgaactggattcttaaccaagaaacaaataatagcaatggtggtgcaccactgtaccccaggttctagtcatgtgttttttaggacgatttctgtctccacgatggtggaaacagtggggaactactgctggaaaaagccctaatagcagaaataaacattgagttgtacgagtctga

SEQ ID NO: 6173 - protein, 43 aa, Homo sapiens
MCPIVLLNSLLNMVLFCIPPTHITISESLVSHCSSDNLIHRPN

SEQ ID NO: 6174 - DNA, 746 bp, Homo sapiens
ggaggcttcattttagaagaggaagaagaagaagaacagaaaattggaaaagttgttcatcaaccagaattgcggcgagcagtaagaagcagcgtgtggaaaagggagacgattgttcatcaacatgagtatggaccagaagaaaacctagaagatgacatgtaccgtaagacttgtactatgtgtggccatgaactgacatatgaaaaaatgtgattttttagttcagtgacctgttttatagaattttatatttaaataaaggaaatttagattggtccttttcaaaattcaaaaaaaaaagcaacatcttcatagatgaatgaaacccttgtataagtaatacttcagtaataattatgtatgttatggcttaaaagcaagtttcagtgaaggtcacctggcctggttgtgtgcacaatgtcatgtctgtgattgccttcttacaacagagatgggagctgagtgctagagtaggtgcagaagtggtaggtcagctacaaatttgaggacaagataccaaggcaaaccctagattggggtagagggaaaagggttcaacaaaggctgaactggattcttaaccaagaaacaaataatagcaatggtggtgcaccactgtaccccaggttctagtcatgtgttttttaggacgatttctgtctccacgatggtggaaacagtggggaactactgctggaaaaagccctaatagcagaaataaacattgagttgtacgagtctga

SEQ ID NO: 6175 - protein, 35 aa, Homo sapiens
MVVHHCTPGSSHVFFRTISVSTMVETVGNYCWKKP

SEQ ID NO: 6176 - DNA, 1700 bp, Homo sapiens
cactcagaaaggccgctgggtgcggggagcgcagaggcggtgcagggcggctggctcgcctcggcgtgcagtgcgcgtgcgtggagctgggagctaggtcctcggagtgggccagagatggcggcggccgacggggctttgccggaggcggcggctttagagcaacccgcggagctgcctgcctcggtgcgggcgagtatcgagcggaagcggcagcgggcactgatgctgcgccaggcccggctggctgcccggccctactcggcgacggcggctgcggctactggaggcatggctaatgtaaaagcagccccaaagataattgacacaggaggaggcttcattttagaagaggaagaagaagaagaacagaaaattggaaaagttgttcatcaaccaggacctgttatggaatttgattatgtaatatgcgaagaatgtgggaaagaatttatggattcttatcttatgaaccactttgatttgccaacttgtgataactgcagagatgctgatgataaacacaagcttataaccaaaacagaggcaaaacaagaatatcttctgaaagactgtgatttagaaaaaagagagccacctcttaaatttattgtgaagaagaatccacatcattcacaatggggtgatatgaaactctacttaaagttacagattgtgaagaggtctcttgaagtttggggtagtcaagaagcattagaagaagcaaaggaagtccgacaggaaaaccgagaaaaaatgaaacagaagaaatttgataaaaaagtaaaagaggttgttcccgccttcctgaataggccacaaagggctgagactggagtagacactgtagagattagacacaaggagcttactgtgcagttttctcagaaggctcagaacagagaggaataaaagcaagtctaaaagtattttagttgaaaagaaattggaacctggttcctcttggtcttctgattttgatccacaaagaagctgacacagtttacttctttatgggaagaattgcggcgagcagtaagaagcagcgtgtggaaaagggagacgattgttcatcaacatgagtatggaccagaagaaaacctagaagatgacatgtaccgtaagacttgtactatgtgtggccatgaactgacatatgaaaaaatgtgattttttagttcagtgacctgttttatagaattttatatttaaataaaggaaatttagattggtccttttcaaaattcaaaaaaaaaagcaacatcttcatagatgaatgaaacccttgtataagtaatacttcagtaataattatgtatgttatggcttaaaagcaagtttcagtgaaggtcacctggcctggttgtgtgcacaatgtcatgtctgtgattgccttcttacaacagagatgggagctgagtgctagagtaggtgcagaagtggtaggtcagctacaaatttgaggacaagataccaaggcaaaccctagattggggtagagggaaaagggttcaacaaaggctgaactggattcttaaccaagaaacaaataatagcaatggtggtgcaccactgtaccccaggttctagtcatgtgttttttaggacgatttctgtctccacgatggtggaaacagtggggaactactgctggaaaaagccctaatagcagaaataaacattgagttgtacgagtctga

SEQ ID NO: 6177 - protein, 264 aa, Homo sapiens
MAAADGALPEAAALEQPAELPASVRASIERKRQRALMLRQARLAARPYSATAAAATGGMANVKAAPKIIDTGGGFILEEEEEEEQKIGKVVHQPGPVMEFDYVICEECGKEFMDSYLMNHFDLPTCDNCRDADDKHKLITKTEAKQEYLLKDCDLEKREPPLKFIVKKNPHHSQWGDMKLYLKLQIVKRSLEVWGSQEALEEAKEVRQENREKMKQKKFDKKVKEVVPAFLNRPQRAETGVDTVEIRHKELTVQFSQKAQNREE

SEQ ID NO: 6178 - DNA, 1469 bp, Homo sapiens
cactcagaaaggccgctgggtgcggggagcgcagaggcggtgcagggcggctggctcgcctcggcgtgcagtgcgcgtgcgtggagctgggagctaggtcctcggagtgggccagagatggcggcggccgacggggctttgccggaggcggcggctttagagcaacccgcggagctgcctgcctcggtgcgggcgagtatcgagcggaagcggcagcgggcactgatgctgcgccaggcccggctggctgcccggccctactcggcgacggcggctgcggctactggaggcatggctaatgtaaaagcagccccaaagataattgacacaggaggaggcttcattttagaagaggaagaagaagaagaacagaaaattggaaaagttgttcatcaaccaggacctgttatggaatttgattatgtaatatgcgaagaatgtgggaaagaatttatggattcttatcttatgaaccactttgatttgccaacttgtgataactgcagagatgctgatgataaacacaagcttataaccaaaacagaggcaaaacaagaatatcttctgaaagactgtgatttagaaaaaagagagccacctcttaaatttattgtgaagaagaatccacatcattcacaatggggtgatatgaaactctacttaaagttacagattgtgaagaggtctcttgaagtttggggtagtcaagaagcattagaagaagcaaaggaagtccgacaggaaaaccgagaaaaaatgaaacagaagaaatttgataaaaaagtaaaagaattgcggcgagcagtaagaagcagcgtgtggaaaagggagacgattgttcatcaacatgagtatggaccagaagaaaacctagaagatgacatgtaccgtaagacttgtactatgtgtggccatgaactgacatatgaaaaaatgtgattttttagttcagtgacctgttttatagaattttatatttaaataaaggaaatttagattggtccttttcaaaattcaaaaaaaaaagcaacatcttcatagatgaatgaaacccttgtataagtaatacttcagtaataattatgtatgttatggcttaaaagcaagtttcagtgaaggtcacctggcctggttgtgtgcacaatgtcatgtctgtgattgccttcttacaacagagatgggagctgagtgctagagtaggtgcagaagtggtaggtcagctacaaatttgaggacaagataccaaggcaaaccctagattggggtagagggaaaagggttcaacaaaggctgaactggattcttaaccaagaaacaaataatagcaatggtggtgcaccactgtaccccaggttctagtcatgtgttttttaggacgatttctgtctccacgatggtggaaacagtggggaactactgctggaaaaagccctaatagcagaaataaacattgagttgtacgagtctga

SEQ ID NO: 6179 - protein, 273 aa, Homo sapiens; identical to SEQ ID NO: 623

SEQ ID NO: 6180 - DNA, 1016 bp, Homo sapiens
cactcagaaaggccgctgggtgcggggagcgcagaggcggtgcagggcggctggctcgcctcggcgtgcagtgcgcgtgcgtggagctgggagctaggtcctcggagtgggccagagatggcggcggccgacggggctttgccggaggcggcggctttagagcaacccgcggagctgcctgcctcggtgcgggcgagtatcgagcggaagcggcagcgggcactgatgctgcgccaggcccggctggctgcccggccctactcggcgacggcggctgcggctactggaggcatggctaatgtaaaagcagccccaaagataattgacacaggaggaggcttcattttagaagaggaagaagaagaagaacagaaaattggaaaagttgttcatcaaccaggacctgttatggaatttgattatgtaatatgcgaagaatgtgggaaagaatttatggattcttatcttatgaaccactttgatttgccaacttgtgataactgcagagatgctgatgataaacacaagcttataaccaaaacagaggcaaaacaagaatatcttctgaaagactgtgatttagaaaaaagagagccacctcttaaatttattgtgaagaagaatccacatcattcacaatggggtgatatgaaactctacttaaagttacagattgtgaagaggtctcttgaagtttggggtagtcaagaagcattagaagaagcaaaggaagtccgacaggaaaaccgagaaaaaatgaaacagaagaaatttgataaaaaagtaaaagaattgcggcgagcagtaagaagcagcgtgtggaaaagggagacgattgttcatcaacatgagtatggaccagaagaaaacctagaagatgacatgtaccgtaagacttgtactatgtgtggccatgaactgacatatgaaaaaatgtgattttttagttcagtgacctgttttatagaattttatatttaaataaaggaaatttagattggtccttttcaaaattc

SEQ ID NO: 6181 - protein, 273 aa, Homo sapiens; identical to SEQ ID NO: 623

SEQ ID NO: 6182 - DNA, 932 bp, Homo sapiens
tggctcgcctcggcgtgcagtgcgcgtgcgtggagctgggagctaggtcctcggagtgggccagagatggcggcggccgacggggctttgccggaggcggcggctttagagcaacccgcggagctgcctgcctcggtgcgggcgagtatcgagcggaagcggcagcgggcactgatgctgcgccaggcccggctggctgcccggccctactcggcgacggcggctgcggctactggaggcatggctaatgtaaaagcagccccaaagataattgacacaggaggaggcttcattttagaagaggaagaagaagaagaacagaaaattggaaaagttgttcatcaaccaggtaaagtgagtttttcaaaaataagtatctagattggttattttgagtaacatgcataattctatgcaaagtgatgctaaataatgccataactactttaatcagtgagtacattatctttataaaagtgataaagtttggcagttttgctagtagattaaaaaaacaatcaaagaaacagccatgcatatggaaatgattatttaacttgtggctgatgtacttaggggttgctgctctctgttgttttataataggcagggttagccagtatattgattggtagaataaatactcaaaattatcttgataggctgaaatgaggcaccagaatccaagagataacatttaggacattcttttatttatctgtggagaaagaaagcagcttacaaagtataagatagaccagcataaaaagaaggatgtaactatgatctaaggttagtgctttggtaaatcacttatatgtacacatatcttcacagtgagggtactttcacactctttgggaaaaagatagaaacactttatttgttcataagtttggcagccaacagtgcaatataacagctttttatta

SEQ ID NO: 6183 - protein, 104 aa, Homo sapiens
MAAADGALPEAAALEQPAELPASVRASIERKRQRALMLRQARLAARPYSATAAAATGGMANVKAAPKIIDTGGGFILEEEEEEEQKIGKVVHQPGKVSFSKISI

SEQ ID NO: 6184 - DNA, 370 bp, Homo sapiens
tcttccatctccacacagccaaagatagctgaacttttgtttgacattttacacggtgtcttatacctgcctgaaagaaggggtgcaggtcttcacagaatgaggaaaggccagagatttggactccaaagaccacagcttggattctaagctgtcacttaccagccaaaagggaatcttggcccagtcactgaagccccctgagtctcaactacctcatctgtaaagggtctcatcaggcccacattagattatctactcgaccatcagttcaagctctaaggtaaagatgtagagcaactggaactttcatacactgctgcaaccactttggagactatcagcattttccactaaagctgaacattat

SEQ ID NO: 6185 - protein, 30 aa, Homo sapiens
SPLSLNYLICKGSHQAHIRLSTRPSVQALR

SEQ ID NO: 6186 - DNA, 8674 bp, Homo sapiens
ggagagggagggagggagagagagagagagggagagagacggatatctcaggtcatctgcagctgcagcgagtctgaggagccgaggaaggcagggaagatggcgatcctccattgctgagacccggcagaagcacatgagactcccaaacaacttccacaacaataacccgagcaggaagaggagaaagagaaagaggataaggaggcggtggggctggagaacccgaagcacctcccggcgccgggacgcttcttctgttcctaatgtgagaggctagacccagatcatggaggtgcttcagtgtgatggctgtgatttccgagccccgtcttatgaagatctcaaggcacacattcaggatgtccacacggcatttctgcagccaactgatgttgctgaggacaatgtgaatgagctacgatgtgggtccgtgaatgccagtaatcagacagaggtggagttttcttctataaaggatgaatttgccattgcagaagatttatcaggtcaaaatgcaacttcattggggaccggaggttactatggccacagtccaggatattatggtcagcatattgccgctaatcccaaaccaacaaacaagttttttcaatgcaagttctgtgtacgctacttcaggtcaaaaaacctcctcatagaacacactagaaaggtccatggagctcaagctgaagggagttcatcaggaccccctgtcccgggatccttaaattataatatcatgatgcacgagggatttggaaaggtcttctcttgccagttttgcacatacaagtcaccaagaagggcaagaataattaagcatcagaagatgtatcacaaaaacaatttgaaggagaccactgctcccccacctgctcctgctccaatgccagaccctgtggttccgcccgtatcactgcaggacccctgcaaggaactgccagcagaggttgtggagcgcagcatcttagagtctatggtcaagcctttgaccaaatctcgaggcaacttttgttgtgagtggtgcagctaccagaccccccgccgagaacgctggtgtgaccacatgatgaagaaacaccgcagtatggtcaagatcctttccagtctcagacagcaacaagaaggaactaatctacctgatgtgccgaacaagagtgcccccagccccacttccaactccacctatctgaccatgaatgctgcaagccgggagatacccaatactaccgtctccaacttcaggggctccatgggcaactccatcatgagacccaattcttcagcttccaagttttcgcccatgtcttaccctcagatgaagccgaagtcacctcacaattctggtctagttaacttgacagagagatcccgttatggaatgactgacatgaccaattcttctgctgacctggaaactaacagcatgctaaatgactctagttctgatgaagagttaaatgaaatagacagtgagaatggtttaagtgctatggatcaccagacatcaggcctgtctgcagagcagctgatgggctcagatggcaacaaattattggagaccaaggggattccatttagaagattcatgaataggttccagtgccccttttgtcctttcctcaccatgcatcgacgtagcatctctcgtcacatagaaaacatccacttatctggaaagacagctgtctacaaatgtgacgaatgtccgtttacttgcaagagctcgttgaaacttggggctcacaaacagtgtcacacgggtacaacgtcagattgggatgctgtgaattcccagagtgaaagcatttcttcctcactgaatgaaggtgtggtgtcttatgagagctcaagcatcaatggtagaaagtcaggagtcatgttggatcccttgcagcagcaacagccaccgcagccaccaccaccgccgccgccaccaccaccatcacagccacagccactgcagcagccacagccaccacagctgcagccaccacatcaggtgccaccccagccacaaacacagccaccaccaacgcagcagccacagccacccacacaagccgcacctctgcacccatacaaatgcaccatgtgtaattactccaccacaactctgaaagggctaagagtccatcagcagcataaacattcattctgtgacaacttgccaaaattcgaggggcagccctcaagcctaccattggaaaatgagacagacagccacccctcttccagcaacactgtgaagaaaagtcagacctcaattcttgggttgtcctccaagaacaattttgtagctaaagcctctaggaagctcgccaatgactttcctctagatttgtcacccgtgaagaagagaaccaggattgacgagatagcaagcaaccttcagagcaaaattaaccaaaccaaacagcaggaagatgcagtgatcaatgttgaggatgatgaagaggaagaggaagacaacgaagtcgagatagaggttgagttggacagggaggaagaaccgacagaacccatcatagaggttcccacttccttttctgcccaacagatatgggtaagagataccagtgagccccagaaagagcccaacttcagaaacatcacccacgattacaatgccaccaatggggctgagattgagctcaccctttctgaagatgaagaggattattatggctcctcaacaaacttgaaagatcaccaagtttccaatactgctctgctgaatacccaaactcccatctatgggactgagcacaatagtgaaaacacagactttggtgactctggaaggctttactattgtaaacactgtgactttaacaacaaatctgcccggagtgttagcacccactaccaacgaatgcacccatacattaaattcagctttaggtacatcttggaccccaatgatcacagtgcagtgtacaggtgcctggaatgctacatcgattacaccaacttcgaagatctccagcagcattatggcgagcaccacccagaagccatgaatgtactcaactttgatcactcggacctgatctaccggtgtcggttttgttcatacacgagcccgaatgttagaagcctgatgccacattaccaaagaatgcatcccacggtgaagatcaacaacgcgatgatattttcaagctatgtcgtggagcagcaggaagggctgaatacagaatcccagaccctgagggagattctgaattcggctcccaagaacatggcgacttccacacctgtggctcgtggtggtggtttgccagctacgttcaacaaaaacactcctaagacctttactcctgaatgtgaaaatcagaaggaccctttggtcaacactgttgttgtttatgattgtgatgtttgttcgtttgcaagccccaacatgcattctgtcttggttcattatcagaagaaacaccccgaagaaaaggcttcctactttaggatccagaaaactatgcgaatggtgtctgtggacaggggctctgccctttctcaattatcatttgaggtgggtgctccaatgtctcccaaaatgtccaacatgggttccccaccccccccacaacccccgccaccagacctcagtactgagctttactactgcaaacactgttcctacagcaatcggtcagttgtgggagtgcttgtccactaccagaaaagacacccagaaataaaggttactgccaaatatatcagacaggctcctcccacagctgcaatgatgagaggggtcgaagggccccaaggctccccccggccacccgcccccatacaacagctgaaccgaagcagctctgagagagatggccctcctgtggagaatgagatgttcttttgccagcactgtgattatgggaaccggacggtcaaaggggtactcattcattatcagaagaagcaccgagacttcaaggccaatgcagatgtgatccggcagcatacggccaccattcgaagcctctgcgaccgaaatcagaagaagcctgccagctgcgtgcttgtctccccctctaatctggagcgggacaaaacgaaactccgagcactcaaatgtaggcagtgctcatatacctccccctacttctatgcactgaggaagcatatcaagaaagaccaccccgccctgaaagccacagtcacgtccatcatgcgatgggcatttctagatggcttgatagaagctggctaccactgcgagtggtgcatctactcccatacggagcccaacggtttgctcctgcattaccaacggaggcatccagaacactatgttgattacacctacatggctactaaactgtgggctgggccagacccatcccctccctctctcacaatgccagccgaagccaaaacctacagatgcagggactgtgttttcgaagctgtttccatctgggacatcactaatcactaccaagcattccacccctgggccatgaatggtgatgagtcagtgctactggacatcatcaaggagaaagatgctgtggagaagcccattctttcatccgaagagttggcaggccctgtgaattgtgaaaacagtatacccacccctttcccggagcaggaagctgaatgtccagaggatgcaagactgtcccctgagaaaagcctgcagctagcttcagccaaccccgccatatcctccaccccataccagtgcacggtatgccaatctgagtataacaacttgcacggccttctcactcattatgggaagaagcaccctggcatgaaagtgaaggctgctgactttgcccaggacattgacatcaacccaggtgccgtctacaaatgcaggcattgcccatacatcaacacccgcatccacggcgtactgacccactaccagaagcgacacccgtccatcaaggtgaccgctgaggactttgtgcacgacgtagagcagtctgctgacatatcccagaatgacgtggaggagacgagcaggatcttcaagcaagggtatggcgcctaccggtgcaaactgtgtccgtacacacacggcactttggagaaactaaaaatccactacgagaagtatcacaatcagcctgaatttgatgtcttttcccagtcgcccccgaagctgccagtccccctcgagcccgagatgaccactgaagtgagcccttcccaagtctccatcactgaggaggaggtgggagaggagcccgtgtccacttctcacttctctacctcccacctggtctcccacactgtgttccggtgccagctctgcaagtacttctgctccacgaggaaggggatcgccaggcactaccgcatcaagcacaataatgtccgagcccagccagaaggcaagaacaacctcttcaagtgtgccctgtgtgcctacaccaaccccatccgcaaaggtctggcagcccactaccagaagcgccacgacattgatgcgtattacactcactgcttggcagcctccaggaccatcagcgacaagcccaacaaagtgatcatcccatccccgcccaaggacgactcccctcagctgagcgaggaactccggcgggcagtggagaagaaaaagtgctccttgtgctctttccagtcgttcagcaagaagggcatcgtgtcccattacatgaaacgccacccaggggtgttcccaaagaagcagcacgccagcaagttggggggctacttcacggccgtctatgcagatgagcatgagaagcccacactgatggaagaagaggagagaggcaactttgagaaagccgaggtggagggtgaagctcaggaaatcgagtggctcccattccgctgcatcaaatgcttcaagctgtcctttagcactgcagagctgctgtgcatgcattacactgaccaccacagtcgggacctaaagagggacttcatcattctgggcaacggcccccgcttgcagaactccacctaccagtgtaagcactgtgatagcaaactgcaaagcacagccgagctgacctcacacttgaacattcacaatgaggaattccagaagcgtgccaaacgtcaggagaggaggaaacagcttttgagcaagcagaaatatgcagatggtgcttttgcagatttcaaacaagagaggccttttggtcacttagaagaggtgccaaagatcaaggagaggaaagtggtgggctacaaatgtaaattctgtgtggaagtgcacccaacgctccgagccatctgcaatcacctccgaaagcacgtccagtatggcaatgtcccagctgtgtcagctgctgtgaaggggctgcgttctcatgagaggagccacctggccctggccatgtttacccgcgaggacaagtacagctgccagtattgctcgtttgtttctgctttcaggcacaatttggatcgccatatgcaaacccaccacggacaccataaaccattccgatgcaaactctgctccttcaagtcctcctataacagccggctgaaaacacatatactcaaagctcatgctggtgagcatgcctacaagtgttcttggtgctcattctccaccatgacaatcagccagctgaaggaacactccctcaaggtccacggaaaagccctgaccctccccaggccacggatcgtcagtctcctctcctcacactcccaccactcctcccaaaaagctaccccggctgaagaagtggaagactccaatgactcatcatattcagagcccccagatgttcagcagcagttgaaccactatcagtcagctgccctggcaaggaacaacagccgtgttagccctgtgcctctttctggggctgctgctggcactgagcagaaaactgaagccgtgcttcactgcgaattctgtgaattctcctccggctacatccagagcatcaggcgtcattaccgggacaagcatggtgggaagaagcttttcaagtgcaaagactgctccttttacacaggctttaaatctgcttttactatgcacgtggaagctgggcactcagcagttcccgaggagggccccaaagatcttcgctgtcctctctgcctctatcacaccaaatacaagcgcaacatgattgaccacatcgtgctgcaccgagaagagcgtgttgtccccattgaagtttgccggtccaaactgtccaaatacttgcagggagtagttttccgctgtgataagtgtaccttcacctgctccagtgatgagagcctccagcaacatatagaaaagcacaatgaactgaaaccttacaaatgccagctctgctactatgagaccaagcacacggaggaactggacagccaccttcgggatgagcataaggtaagccgtaactttgagctggttggacgggttaacttggatcagctggaacagatgaaggagaaaatggagagctccagcagcgatgatgaggacaaggaagaagaaatgaacagcaaggctgaagacagagagctgatgagattttctgaccacggggctgctcttaacactgagaagcgttttccatgtgaattttgtggacgggcgttttcacagggctctgagtgggaaagacatgtgctgagacacggcatggcattgaatgacaccaagcaggtgagcagagaagaaatccacccaaaagagatcatggagaacagtgttaaaatgccctccatagaggaaaaggaagatgacgaggccattgggatagacttttccctaaagaatgaaacagtagccatctgtgtagtaactgccgacaaatctctcctggagaatgcagaggccaaaaaagaatgagcgtttggtgaaattcttaatcaaaccttacttgaacagtgatgaaaaagtgggagggctggcttgggctgagaagggagggacagaaaagagaagacagaacaaagctgctttttaggactgaacaatctattttcaaagcactggtacctgtgtgagtgagtatgtaaattaaagttatttaaatggttggaatatgtggctccttttccatcactacatcttttcttccggatcttcatcatggaagtttcatttgttgcggaatatggaagcacctcccaatggtacggtgcaccctgtggtggtcttggacagtatgtggaaacagaagctccatgacggtagaagacttctcattggggagcaactttttgacgcacaacttttggtgcgtttttctagttttaataccttaagctttttcaagacctaactgcagccgctttgggaaaaaaaaacaaaaaacaaaaaacagaaaacaaaaaaaaaaaaactgctttgcataaaacagtcacctgtttcctagtacctcaaacttaaccaagggaactctctgcatttgtcagtactacctgtcgtcgttgtggttaaatgtagagagaactgctgggcaagatggtgaatggagaaaaaaaaagagttttaaagaaaggaacacaaattgtgcttaaaatccccatgtgggttttatttcttaaaatactgtgatttttttaattattttagtaaaaaacaaaacaaaaaaaagaaacagactttaattattagataactgtttgtgaattgtcatcctttattccaggtaagctgtttattagtgttcaactataatttagaatttggtagattcatgtgagctaa

SEQ ID NO: 6187 - protein, 2506 aa, Homo sapiens; identical to SEQ ID NO: 626

SEQ ID NO: 6188 - DNA, 5226 bp, Homo sapiens
tactactgcaaacactgttcctacagcaatcggtcagttgtgggagtgcttgtccactaccagaaaagacacccagaaataaaggttactgccaaatatatcagacaggctcctcccacagctgcaatgatgagaggggtcgaagggccccaaggctccccccggccacccgcccccatacaacagctgaaccgaagcagctctgagagagatggccctcctgtggagaatgagatgttcttttgccagcactgtgattatgggaaccggacggtcaaaggggtactcattcattatcagaagaagcaccgagacttcaaggccaatgcagatgtgatccggcagcatacggccaccattcgaagcctctgcgaccgaaatcagaagaagcctgccagctgcgtgcttgtctccccctctaatctggagcgggacaaaacgaaactccgagcactcaaatgtaggcagtgctcatatacctccccctacttctatgcactgaggaagcatatcaagaaagaccaccccgccctgaaagccacagtcacgtccatcatgcgatgggcatttctagatggcttgatagaagctggctaccactgcgagtggtgcatctactcccatacggagcccaacggtttgctcctgcattaccaacggaggcatccagaacactatgttgattacacctacatggctactaaactgtgggctgggccagacccatcccctccctctctcacaatgccagccgaagccaaaacctacagatgcagggactgtgttttcgaagctgtttccatctgggacatcactaatcactaccaagcattccacccctgggccatgaatggtgatgagtcagtgctactggacatcatcaaggagaaagatgctgtggagaagcccattctttcatccgaagagttggcaggccctgtgaattgtgaaaacagtatacccacccctttcccggagcaggaagctgaatgtccagaggatgcaagactgtcccctgagaaaagcctgcagctagcttcagccaaccccgccatatcctccaccccataccagtgcacggtatgccaatctgagtataacaacttgcacggccttctcactcattatgggaagaagcaccctggcatgaaagtgaaggctgctgactttgcccaggacattgacatcaacccaggtgccgtctacaaatgcaggcattgcccatacatcaacacccgcatccacggcgtactgacccactaccagaagcgacacccgtccatcaaggtgaccgctgaggactttgtgcacgacgtagagcagtctgctgacatatcccagaatgacgtggaggagacgagcaggatcttcaagcaagggtatggcgcctaccggtgcaaactgtgtccgtacacacacggcactttggagaaactaaaaatccactacgagaagtatcacaatcagcctgaatttgatgtcttttcccagtcgcccccgaagctgccagtccccctcgagcccgagatgaccactgaagtgagcccttcccaagtctccatcactgaggaggaggtgggagaggagcccgtgtccacttctcacttctctacctcccacctggtctcccacactgtgttccggtgccagctctgcaagtacttctgctccacgaggaaggggatcgccaggcactaccgcatcaagcacaataatgtccgagcccagccagaaggcaagaacaacctcttcaagtgtgccctgtgtgcctacaccaaccccatccgcaaaggtctggcagcccactaccagaagcgccacgacattgatgcgtattacactcactgcttggcagcctccaggaccatcagcgacaagcccaacaaagtgatcatcccatccccgcccaaggacgactcccctcagctgagcgaggaactccggcgggcagtggagaagaaaaagtgctccttgtgctctttccagtcgttcagcaagaagggcatcgtgtcccattacatgaaacgccacccaggggtgttcccaaagaagcagcacgccagcaagttggggggctacttcacggccgtctatgcagatgagcatgagaagcccacactgatggaagaagaggagagaggcaactttgagaaagccgaggtggagggtgaagctcaggaaatcgagtggctcccattccgctgcatcaaatgcttcaagctgtcctttagcactgcagagctgctgtgcatgcattacactgaccaccacagtcgggacctaaagagggacttcatcattctgggcaacggcccccgcttgcagaactccacctaccagtgtaagcactgtgatagcaaactgcaaagcacagccgagctgacctcacacttgaacattcacaatgaggaattccagaagcgtgccaaacgtcaggagaggaggaaacagcttttgagcaagcagaaatatgcagatggtgcttttgcagatttcaaacaagagaggccttttggtcacttagaagaggtgccaaagatcaaggagaggaaagtggtgggctacaaatgtaaattctgtgtggaagtgcacccaacgctccgagccatctgcaatcacctccgaaagcacgtccagtatggcaatgtcccagctgtgtcagctgctgtgaaggaggcggatgaccctgcccacttgttcctggatggattggaagcagccaaagacgccagtggcgccctggtgggccgggtggatggtgaacactgcttgcttgatggaatgttggaggatgaaacccggccggggggataccattgcagtcaatgtgacagagtcctgatgtccatgcaggggctgcgttctcatgagaggagccacctggccctggccatgtttacccgcgaggacaagtacagctgccagtattgctcgtttgtttctgctttcaggcacaatttggatcgccatatgcaaacccaccacggacaccataaaccattccgatgcaaactctgctccttcaagtcctcctataacagccggctgaaaacacatatactcaaagctcatgctggtgagcatgcctacaagtgttcttggtgctcattctccaccatgacaatcagccagctgaaggaacactccctcaaggtccacggaaaagccctgaccctccccaggccacggatcgtcagtctcctctcctcacactcccaccactcctcccaaaaagctaccccggctgaagaagtggaagactccaatgactcatcatattcagagcccccagatgttcagcagcagttgaaccactatcagtcagctgccctggcaaggaacaacagccgtgttagccctgtgcctctttctggggctgctgctggcactgagcagaaaactgaagccgtgcttcactgcgaattctgtgaattctcctccggctacatccagagcatcaggcgtcattaccgggacaagcatggtgggaagaagcttttcaagtgcaaagactgctccttttacacaggctttaaatctgcttttactatgcacgtggaagctgggcactcagcagttcccgaggagggccccaaagatcttcgctgtcctctctgcctctatcacaccaaatacaagcgcaacatgattgaccacatcgtgctgcaccgagaagagcgtgttgtccccattgaagtttgccggtccaaactgtccaaatacttgcagggagtagttttccgctgtgataagtgtaccttcacctgctccagtgatgagagcctccagcaacatatagaaaagcacaatgaactgaaaccttacaaatgccagctctgctactatgagaccaagcacacggaggaactggacagccaccttcgggatgagcataaggtaagccgtaactttgagctggttggacgggttaacttggatcagctggaacagatgaaggagaaaatggagagctccagcagcgatgatgaggacaaggaagaagaaatgaacagcaaggctgaagacagagagctgatgagattttctgaccacggggctgctcttaacactgagaagcgttttccatgtgaattttgtggacgggcgttttcacagggctctgagtgggaaagacatgtgctgagacacggcatggcattgaatgacaccaagcaggtgagcagagaagaaatccacccaaaagagatcatggagaacagtgttaaaatgccctccatagaggaaaaggaagatgacgaggccattgggatagacttttccctaaagaatgaaacagtagccatctgtgtagtaactgccgacaaatctctcctggagaatgcagaggccaaaaaagaatgagcgtttggtgaaattcttaatcaaaccttacttgaacagtgatgaaaaagtgggagggctggcttgggctgagaagggagggacagaaaagagaagacagaacaaagctgctttttaggactgaacaatctattttcaaagcactggtacctgtgtgagtgagtatgtaaattaaagttatttaaatggttggaatatgtggctccttttccatcactacatcttttcttccggatcttcatcatggaagtttcatttgttgcggaatatggaagcacctcccaatggtacggtgcaccctgtggtggtcttggacagtatgtggaaacagaagctccatgacggtagaagacttctcattggggagcaactttttgacgcacaacttttggtgcgtttttctagttttaataccttaagctttttcaagacctaactgcagccgctttgggaaaaaaaaacaaaaaacaaaaaacagaaaacaaaaaaaaaaaaactgctttgcataaaacagtcacctgtttcctagtacctcaaacttaaccaagggaactctctgcatttgtcagtactacctgtcgtcgttgtggttaaatgtagagagaactgctgggcaagatggtgaatggagaaaaaaaaagagttttaaagaaaggaacacaaattgtgcttaaaatccccatgtgggttttatttcttaaaatactgtgatttttttaattattttagtaaaaaacaaaacaaaaaaaagaaacagactttaattattagataactgtttgtgaattgtcatcctttattccaggtaagctgtttattagtgttcaactataatttagaatttggtagattcatgtgagctaa

SEQ ID NO: 6189 - protein, 1411 aa, Homo sapiens
MMRGVEGPQGSPRPPAPIQQLNRSSSERDGPPVENEMFFCQHCDYGNRTVKGVLIHYQKKHRDFKANADVIRQHTATIRSLCDRNQKKPASCVLVSPSNLERDKTKLRALKCRQCSYTSPYFYALRKHIKKDHPALKATVTSIMRWAFLDGLIEAGYHCEWCIYSHTEPNGLLLHYQRRHPEHYVDYTYMATKLWAGPDPSPPSLTMPAEAKTYRCRDCVFEAVSIWDITNHYQAFHPWAMNGDESVLLDIIKEKDAVEKPILSSEELAGPVNCENSIPTPFPEQEAECPEDARLSPEKSLQLASANPAISSTPYQCTVCQSEYNNLHGLLTHYGKKHPGMKVKAADFAQDIDINPGAVYKCRHCPYINTRIHGVLTHYQKRHPSIKVTAEDFVHDVEQSADISQNDVEETSRIFKQGYGAYRCKLCPYTHGTLEKLKIHYEKYHNQPEFDVFSQSPPKLPVPLEPEMTTEVSPSQVSITEEEVGEEPVSTSHFSTSHLVSHTVFRCQLCKYFCSTRKGIARHYRIKHNNVRAQPEGKNNLFKCALCAYTNPIRKGLAAHYQKRHDIDAYYTHCLAASRTISDKPNKVIIPSPPKDDSPQLSEELRRAVEKKKCSLCSFQSFSKKGIVSHYMKRHPGVFPKKQHASKLGGYFTAVYADEHEKPTLMEEEERGNFEKAEVEGEAQEIEWLPFRCIKCFKLSFSTAELLCMHYTDHHSRDLKRDFIILGNGPRLQNSTYQCKHCDSKLQSTAELTSHLNIHNEEFQKRAKRQERRKQLLSKQKYADGAFADFKQERPFGHLEEVPKIKERKVVGYKCKFCVEVHPTLRAICNHLRKHVQYGNVPAVSAAVKEADDPAHLFLDGLEAAKDASGALVGRVDGEHCLLDGMLEDETRPGGYHCSQCDRVLMSMQGLRSHERSHLALAMFTREDKYSCQYCSFVSAFRHNLDRHMQTHHGHHKPFRCKLCSFKSSYNSRLKTHILKAHAGEHAYKCSWCSFSTMTISQLKEHSLKVHGKALTLPRPRIVSLLSSHSHHSSQKATPAEEVEDSNDSSYSEPPDVQQQLNHYQSAALARNNSRVSPVPLSGAAAGTEQKTEAVLHCEFCEFSSGYIQSIRRHYRDKHGGKKLFKCKDCSFYTGFKSAFTMHVEAGHSAVPEEGPKDLRCPLCLYHTKYKRNMIDHIVLHREERVVPIEVCRSKLSKYLQGVVFRCDKCTFTCSSDESLQQHIEKHNELKPYKCQLCYYETKHTEELDSHLRDEHKVSRNFELVGRVNLDQLEQMKEKMESSSSDDEDKEEEMNSKAEDRELMRFSDHGAALNTEKRFPCEFCGRAFSQGSEWERHVLRHGMALNDTKQVSREEIHPKEIMENSVKMPSIEEKEDDEAIGIDFSLKNETVAICVVTADKSLLENAEAKKE

SEQ ID NO: 6190 - DNA, 1444 bp, Homo sapiens
tgatgcgtattacactcactgcttggcagcctccaggaccatcagcgacaagcccaacaaagtgatcatcccatccccgcccaaggacgactcccctcagctgagcgaggaactccggcgggcagtggagaagaaaaagtgctccttgtgctctttccagtcgttcagcaagaagggcatcgtgtcccattacatgaaacgccacccaggggtgttcccaaagaagcagcacgccagcaagttggggggctacttcacggccgtctatgcagatgagcatgagaagcccacactgatggaagaagaggagagaggcaactttgagaaagccgaggtggagggtgaagctcaggaaatcgagtggctcccattccgctgcatcaaatgcttcaagctgtcctttagcactgcagagctgctgtgcatgcattacactgaccaccacagtcgggacctaaagagggacttcatcattctgggcaacggcccccgcttgcagaactccacctaccagtgtaagcactgtgatagcaaactgcaaagcacagccgagctgacctcacacttgaacattcacaatgaggaattccagaagcgtgccaaacgtcaggagaggaggaaacagcttttgagcaagcagaaatatgcagatggtgcttttgcagatttcaaacaagagaggccttttggtcacttagaagaggtgccaaagatcaaggagaggaaagtggtgggctacaaatgtaaattctgtgtggaagtgcacccaacgctccgagccatctgcaatcacctccgaaagcacgtccagtatggcaatgtcccagctgtgtcagctgctgtgaaggttggaccttcctcatctttctgttcagggaaaggtcgagtttcgatctggtttccttccacgcggatagtttggtggcagcagaaggtccaggattctcggtctaggaggcttcgggtcgtccttctattctgcgtttagtgccattagctcttcgttcttccaagttgcccgagctcttgagaggaatcaagaggcggatgaccctgcccacttgttcctggatggattggaagcagccaaagacgccagtggcgccctggtgggccgggtggatggtgaacactgcttgcttgatggaatgttggaggatgaaacccggccggggggataccattgcagtcaatgtgacagagtcctgatgtccatgcaggggctgcgttctcatgagaggagccacctggccctggccatgtttacccgcgaggacaagtacagctgccagtattgctcgtttgtttctgctttcaggcacaatttggatcgccatatgcaaacccaccacggacaccataaaccattccgatgcaaactctgctccttcaagtcctcctataacagccggctgaaaacacatatactcaaagctcatgctgg

SEQ ID NO: 6191 - protein, 264 aa, Homo sapiens
MKRHPGVFPKKQHASKLGGYFTAVYADEHEKPTLMEEEERGNFEKAEVEGEAQEIEWLPFRCIKCFKLSFSTAELLCMHYTDHHSRDLKRDFIILGNGPRLQNSTYQCKHCDSKLQSTAELTSHLNIHNEEFQKRAKRQERRKQLLSKQKYADGAFADFKQERPFGHLEEVPKIKERKVVGYKCKFCVEVHPTLRAICNHLRKHVQYGNVPAVSAAVKVGPSSSFCSGKGRVSIWFPSTRIVWWQQKVQDSRSRRLRVVLLFCV

SEQ ID NO: 6192 - DNA, 2277 bp, Homo sapiens
acagatggacctcacagtctcgcaactaacatgggaaccagtaatctcatgccagaggaagcactcctgaggcagaggagatttcaggagagaacaggttgaacattaataaggaggagctttggcactggtccaagaaacaggataagctaaatctctgcatctattctggacaccagaatggcgcggggaccatttagaggtgagatgggcagatgaggagctgaagtttcagagaggttaagcaatttgcctaggttcacacagcaaagatgatgaaacttacaaccacaagcaatccccagaagcagccctttcacagagaggaagctgaggcttagagggtgtcaatggatgatccagtgctgcagagccagaagggccaccataacaatgaaatggaggcagcatacattggtaatggaaagagcatgggagtttggaagtcaaaagagatggatgttttctgaccttgataaggactctgaaaatgatccttacaagtaaacagaagagaccacaaataaccagtgacaggtaatgtgatgagacatgggatcaaaggactgcgattgactgcttaccagttgggtgactttgagtgagtgattccagctctcatgtgccctgcaaaacttactattgtatttatgatgggcacaatatgcactacgtcacacactgtgcccttcaggaaaacctgctagacaaattcctctaggtttcagtgtctaggattcctgaaaatttcctgaatgacagttcaaaaaagtctaacaagcagttgaaatctggttgcttctgtgggtttcttttctaccatggtaggcaaggaatctcagggcgaaatctgcagcccactgtgaacaagggcatggcacctcatggtatccactgggtatccaaactctcagctagctttttcatacttagaggtgaactttccactagtttcttcttattttgcatttaccccaatttccttatttgtttttaaacctatagttcggcacacacgtctttaagatatcttaaaacctttgtgaaatgaagtagatggcaaataagtacattaaattattttaaaaatagtttgtctcactctcaagtttcacaggcatacaacgggaatagagtaatagtatccttcacaatgttgctggaagatgaagtgactgtgcgtgtaagcggcactttgttgagggtagaatgctatgggagtatttgtggtcgtagtgtttaatctctctttgcttccccctttcttgtgttctcagctcagggagggaaagtcattgagcttgttaggcatcaaagctctgttcctgccaggcagcaatatgggaaaagaagggaaccaaccacagaaagtgaagactcgccatgtctgctcggcagcagccctgctgatggccccttaccaagctgtgatagggcacagagccaccgcaacacatgggctgggggaccggaagccaggtgactgaggcggaacaccaggcgggaccactcgggccaagaattcctgcctaaatgttcctatgatacttctcccagcttgcaggtggacatcctagccagcaacgatctcatgtctcattagagtgcaagggggaggagggaaatctgtgcatgttaaatgtccagccttccattgagtttgcatgaacatgggtgagtatgtcacaaatgtattggccaaaggcaatggctcaggggcaatgtgaggtgtgttgccaatggcccccaaatactcagcatttcagagtgagtgacatcccagcaagacaacagatgacactcattgcttttgaggcatatgtgacaaatattggaaggctttctaaggtcagaggcgaaggaatgaagataggagggaagaggatgaaaagaagggatggagagaaagaatgaagtagatggaaagatcagtagaaacaccaatcaagactggcaatgagtactccagtaatctttttctatccacctgtagcttgaatcttttcaggacgaaacagattctacatatttttccttccaatgcagaggaaggctgttgtttaacagtgttttaattggccaagggtaaatgcaactcaaagaaagaccgaagtggacttaaaagaagtatcactgtttatcagcaggaaccaacatttattgagcagtcattatgcatccattatgaaaaaccactggacactttacccattatctcataggtacaatcatctcttttaatggatggagaggttaaacacagtgggctctaaaacc

SEQ ID NO: 6193 - protein, 50 aa, Homo sapiens
MIQCCRARRATITMKWRQHTLVMERAWEFGSQKRWMFSDLDKDSENDPYK

SEQ ID NO: 6194 - DNA, 1552 bp, Homo sapiens
ctgatataaatcatcacacaagggagagaataaatcggaaaaaataatgctcagattcctttggaatctcgggcaagcggctcttcagtcaagaaagacccagattttgtgatagaagcattggggaggtgaggcgaaatgaggtcttggggcccaagaaccagaaacagttctcgaatgctattcaaggaatgccctaagggggaaacctaagaaaaagtgaggaatctggaaattgctttcaccacatggctttatcagtgaaggtaggagagagggtatcctaatgaatgctgacttacctattctgctgattcccacagcacacaggtaacacttctgctttctctttgcagagctgatgagattttctgaccacggggctgctcttaacactgagaagcgttttccatgtgaattttgtggacgggcgttttcacagggctctgagtgggaaagacatgtgctgagacacggcatggcattgaatgacaccaagcaggtgagcagagaagaaatccacccaaaagagatcatggagaacagtgttaaaatgccctccatagaggaaaaggaagatgacgaggccattgggatagacttttccctaaagaatgaaacagtagccatctgtgtagtaactgccgacaaatctctcctggagaatgcagaggccaaaaaagaatgagcgtttggtgaaattcttaatcaaaccttacttgaacagtgatgaaaaagtgggagggctggcttgggctgagaagggagggacagaaaagagaagacagaacaaagctgctttttaggactgaacaatctattttcaaagcactggtacctgtgtgagtgagtatgtaaattaaagttatttaaatggttggaatatgtggctccttttccatcactacatcttttcttccggatcttcatcatggaagtttcatttgttgcggaatatggaagcacctcccaatggtacggtgcaccctgtggtggtcttggacagtatgtggaaacagaagctccatgacggtagaagacttctcattggggagcaactttttgacgcacaacttttggtgcgtttttctagttttaataccttaagctttttcaagacctaactgcagccgctttgggaaaaaaaaacaaaaaacaaaaaacagaaaacaaaaaaaaaaaaactgctttgcataaaacagtcacctgtttcctagtacctcaaacttaaccaagggaactctctgcatttgtcagtactacctgtcgtcgttgtggttaaatgtagagagaactgctgggcaagatggtgaatggagaaaaaaaaagagttttaaagaaaggaacacaaattgtgcttaaaatccccatgtgggttttatttcttaaaatactgtgatttttttaattattttagtaaaaaacaaaacaaaaaaaagaaacagactttaattattagataactgtttgtgaattgtcatcctttattccaggtaagctgtttattagtgttcaactataatttagaatttggtagattcatgtgagctaa

SEQ ID NO: 6195 - protein, 108 aa, Homo sapiens [sequence omitted]

SEQ ID NO: 6196 - DNA, 2485 bp, Homo sapiens
acgcggtctgtgggagaccggagcgggagacagcggtgacaggagcagcggccgggagcccttagggaggcagacagagcctgcagccaatgccccaggagccctcggttccaaccaactgatgcccctgtgcccactggcccacgccatgcagccccagtccgttctgcacagcggctacttccacccactacttcgggcctggctctccgagctgtggaccgggatgtacgggaaggagctgacatgctcatggtgaagccgggaatgccctacctggacatcgtgcgggaggtaaaggacaagcaccctgacctccctctcgccgtgtaccacgtctctggagagtttgccatgctgtggcatggagcccaggccggggcatttgatctcaaggctgccgtactggaggccatgactgccttccgcagagcaggtgctgacatcatcatcacctactacacaccgcagctgctgcagtggctgaaggaggaatgatggagacagtgccaggcccaagaactagaactttaaaacgttcccggggcctcagacaagtgaaaaccaaagtaaatgctgcttttagaactgtgccctcatgccctcttcctgctcacatgctagcggggcccagcagccctgggtggttttgccagcatgctaactcttgtaactcgcagctgcatcctatgagctctcccaagcttccccgcccctcccctgggtcagccgtgaggcccacctttgccaccctcagctctttcctctggtgtggcttcagcttgaaagcaacctggagtcgggggcacagcctttggggcctggctgggagagggtcttggagcattaggggaagaagagagcagtgggatcttggggcctgagaagccttggaacgcttctggcagcagagctgggtgtgggaatgaggcctagatcgatatccctgggttagagttgaaatttgccgcaattccactggaaggcatttcccacgaggccagaggttgccaggctgcctgaggtctcctattctactctgaaccataaacccagagaagaattactcattaaccagcataaatactgcctgaggatcaaaactcagaggcaaagagggagttcctgactgctagaggtgccaccaccacaaacactttttattcaggagatactttttgagaatctctgctctgttcctaggttcagtgctgggtcctgggaatacagcaggacagacctcagcttatctcttcatagaaattatacaaagagaattggggagacagctaagaagaaaacaaagaaataaagcagttacaaattgtgataagtgctttgaaggaaagaaggggtctgagacaacaacagggaaggggcctctcttgaaacagtagttgggaaggaggcagacatgcaccagtgatgtggtgacaggtgctctgaaggaggtcaccaggacctgacctctttgaaggatcagaaaatacttccctgaaggactgacatttgagcctagacctgaagggtgagccatcaagctaagacaattggggaagagcattccagggagagggaggagttgtgcaaaggccctggggctccttctagctggaggaatgcaaggctagcttgtctggagcactgagaggatggcctgaactgagtggagagagacagaccaggaccaaaccatgcagaggtcaagggccacattcaccttttcagagtgactcaatcaaatttgtagtttgtaaaagtattttaacagctctgcggcaaagtgcaaatgaaaagtcttgatggcatggactggagcggggacagtggggatggagaaaggggaatggattgtggatgtgtttagaaggtagattcgatgtgaaggatgaatctggcttgaccttctgggtggctgatgggccatttactgagatggggcagcctggaagaggaacagaagcagggtcggggtggagggagaatactaaacttagcttgagacattttgcaataaggaagctatatctagagtgcttatgtgactcacctaaggccactcaacaagtttgtggcagaactggattagaactgcacagaaaacagccaagctgggatttgaacccatgtagtccaactccaaggcctctgcccctaaccactgtgccataccacctcccaataatcaacagcaaaattataggtctaacaatgttttatagacacccctccatttatgtgatgggtttgcatcctgataaacccatcataagttgaaaatatgatcataagttgaaaatatgatcataagtcaaaaatgtatttaatatacctaacctaccaaacatcatagcttagcctagcctgccttaaacatgctcagaacacttacattagcctacagtgggcaaaactatccaacacaaaatctatattgtaataaagttgtaaagaattttgaataaaaattcaatatttgaagtac

SEQ ID NO: 6197 - protein, 83 aa, Homo sapiens [sequence omitted]

SEQ ID NO: 6198 - DNA, 2379 bp, Homo sapiens
tacgcggtctgtgggagaccggagcgggagacagcggtgacaggagcacttttggggaccgccgctgctaccagctgccccctggagcacgaggcctggctctccgagctgtggaccgggatgtacgggaaggagctgacatgctcatggtgaagccgggaatgccctacctggacatcgtgcgggaggtaaaggacaagcaccctgacctccctctcgccgtgtaccacgtctctggagagtttgccatgctgtggcatggagcccaggccggggcatttgatctcaaggctgccgtactggaggccatgactgccttccgcagagcaggtgctgacatcatcatcacctactacacaccgcagctgctgcagtggctgaaggaggaatgatggagacagtgccaggcccaagaactagaactttaaaacgttcccggggcctcagacaagtgaaaaccaaagtaaatgctgcttttagaactgtgccctcatgccctcttcctgctcacatgctagcggggcccagcagccctgggtggttttgccagcatgctaactcttgtaactcgcagctgcatcctatgagctctcccaagcttccccgcccctcccctgggtcagccgtgaggcccacctttgccaccctcagctctttcctctggtgtggcttcagcttgaaagcaacctggagtcgggggcacagcctttggggcctggctgggagagggtcttggagcattaggggaagaagagagcagtgggatcttggggcctgagaagccttggaacgcttctggcagcagagctgggtgtgggaatgaggcctagatcgatatccctgggttagagttgaaatttgccgcaattccactggaaggcatttcccacgaggccagaggttgccaggctgcctgaggtctcctattctactctgaaccataaacccagagaagaattactcattaaccagcataaatactgcctgaggatcaaaactcagaggcaaagagggagttcctgactgctagaggtgccaccaccacaaacactttttattcaggagatactttttgagaatctctgctctgttcctaggttcagtgctgggtcctgggaatacagcaggacagacctcagcttatctcttcatagaaattatacaaagagaattggggagacagctaagaagaaaacaaagaaataaagcagttacaaattgtgataagtgctttgaaggaaagaaggggtctgagacaacaacagggaaggggcctctcttgaaacagtagttgggaaggaggcagacatgcaccagtgatgtggtgacaggtgctctgaaggaggtcaccaggacctgacctctttgaaggatcagaaaatacttccctgaaggactgacatttgagcctagacctgaagggtgagccatcaagctaagacaattggggaagagcattccagggagagggaggagttgtgcaaaggccctggggctccttctagctggaggaatgcaaggctagcttgtctggagcactgagaggatggcctgaactgagtggagagagacagaccaggaccaaaccatgcagaggtcaagggccacattcaccttttcagagtgactcaatcaaatttgtagtttgtaaaagtattttaacagctctgcggcaaagtgcaaatgaaaagtcttgatggcatggactggagcggggacagtggggatggagaaaggggaatggattgtggatgtgtttagaaggtagattcgatgtgaaggatgaatctggcttgaccttctgggtggctgatgggccatttactgagatggggcagcctggaagaggaacagaagcagggtcggggtggagggagaatactaaacttagcttgagacattttgcaataaggaagctatatctagagtgcttatgtgactcacctaaggccactcaacaagtttgtggcagaactggattagaactgcacagaaaacagccaagctgggatttgaacccatgtagtccaactccaaggcctctgcccctaaccactgtgccataccacctcccaataatcaacagcaaaattataggtctaacaatgttttatagacacccctccatttatgtgatgggtttgcatcctgataaacccatcataagttgaaaatatgatcataagttgaaaatatgatcataagtcaaaaatgtatttaatatacctaacctaccaaacatcatagcttagcctagcctgccttaaacatgctcagaacacttacattagcctacagtgggcaaaactatccaacacaaaatctatattgtaataaagttgtaaagaattttgaataaaaattcaatatttgaagtac

SEQ ID NO: 6199 - protein, 83 aa, Homo sapiens [sequence omitted]

SEQ ID NO: 6200 - DNA, 3348 bp, Homo sapiens
gtggagggggcggaccgtggggaagctgcttccgggtgagccccccccgctcttacgcggtctgtgggagaccggagcgggagacagcggtgacaggagcagcggccgggagcccttagggaggcagacagagcctgcagccaatgccccaggagccctcggttccaaccaactgatgcccctgtgcccactggcccacgccatgcagccccagtccgttctgcacagcggctacttccacccactacttcgggcctggcagacagccaccaccaccctcaatgcctccaacctcatctaccccatctttgtcacgccctgggcttggccaggcagggaagccagacactggatcccatcctcctcccaccatctccacttccatatttctttcctgcttcccaaccatccctctcagtcgcccccgcaccactggcccttcccacagctaccaatccatatcccacccccgctcttgcagggatgttcctgatgacatacagcctatcaccagcctcccaggagtggccaggtatggtgtgaagcggctggaagagatgctgaggcccttggtggaagagggcctacgctgtgtcttgatctttggcgtccccagcagagttcccaaggacgagcggggttccgcagctgactccgaggagtccccagctattgaggcaatccatctgttgaggaagaccttccccaacctcctggtggcctgtgatgtctgcctgtgtccctacacctcccatggtcactgcgggctcctgagtgaaaacggagcattccgggctgaggagagccgccagcggctggctgaggtggcattggcgtatgccaaggcaggatgtcaggtggtagccccgtcggacatgatggatggacgcgtggaagccatcaaagaggccctgatggcacatggacttggcaacagggtatcggtgatgagctacagtgccaaatttgcttcctgtttctatggccctttccgggatgcagctaagtcaagcccagcttttggggaccgccgctgctaccagctgccccctggagcacgaggcctggctctccgagctgtggaccgggatgtacgggaaggagctgacatgctcatggtgaagccgggaatgccctacctggacatcgtgcgggaggtaaaggacaagcaccctgacctccctctcgccgtgtaccacgtctctggagagtttgccatgctgtggcatggagcccaggccggggcatttgatctcaaggctgccgtactggaggccatgactgccttccgcagagcaggtgctgacatcatcatcacctactacacaccgcagctgctgcagtggctgaaggaggaatgatggagacagtgccaggcccaagaactagaactttaaaacgttcccggggcctcagacaagtgaaaaccaaagtaaatgctgcttttagaactgtgccctcatgccctcttcctgctcacatgctagcggggcccagcagccctgggtggttttgccagcatgctaactcttgtaactcgcagctgcatcctatgagctctcccaagcttccccgcccctcccctgggtcagccgtgaggcccacctttgccaccctcagctctttcctctggtgtggcttcagcttgaaagcaacctggagtcgggggcacagcctttggggcctggctgggagagggtcttggagcattaggggaagaagagagcagtgggatcttggggcctgagaagccttggaacgcttctggcagcagagctgggtgtgggaatgaggcctagatcgatatccctgggttagagttgaaatttgccgcaattccactggaaggcatttcccacgaggccagaggttgccaggctgcctgaggtctcctattctactctgaaccataaacccagagaagaattactcattaaccagcataaatactgcctgaggatcaaaactcagaggcaaagagggagttcctgactgctagaggtgccaccaccacaaacactttttattcaggagatactttttgagaatctctgctctgttcctaggttcagtgctgggtcctgggaatacagcaggacagacctcagcttatctcttcatagaaattatacaaagagaattggggagacagctaagaagaaaacaaagaaataaagcagttacaaattgtgataagtgctttgaaggaaagaaggggtctgagacaacaacagggaaggggcctctcttgaaacagtagttgggaaggaggcagacatgcaccagtgatgtggtgacaggtgctctgaaggaggtcaccaggacctgacctctttgaaggatcagaaaatacttccctgaaggactgacatttgagcctagacctgaagggtgagccatcaagctaagacaattggggaagagcattccagggagagggaggagttgtgcaaaggccctggggctccttctagctggaggaatgcaaggctagcttgtctggagcactgagaggatggcctgaactgagtggagagagacagaccaggaccaaaccatgcagaggtcaagggccacattcaccttttcagagtgactcaatcaaatttgtagtttgtaaaagtattttaacagctctgcggcaaagtgcaaatgaaaagtcttgatggcatggactggagcggggacagtggggatggagaaaggggaatggattgtggatgtgtttagaaggtagattcgatgtgaaggatgaatctggcttgaccttctgggtggctgatgggccatttactgagatggggcagcctggaagaggaacagaagcagggtcggggtggagggagaatactaaacttagcttgagacattttgcaataaggaagctatatctagagtgcttatgtgactcacctaaggccactcaacaagtttgtggcagaactggattagaactgcacagaaaacagccaagctgggatttgaacccatgtagtccaactccaaggcctctgcccctaaccactgtgccataccacctcccaataatcaacagcaaaattataggtctaacaatgttttatagacacccctccatttatgtgatgggtttgcatcctgataaacccatcataagttgaaaatatgatcataagttgaaaatatgatcataagtcaaaaatgtatttaatatacctaacctaccaaacatcatagcttagcctagcctgccttaaacatgctcagaacacttacattagcctacagtgggcaaaactatccaacacaaaatctatattgtaataaagttgtaaagaattttgaataaaaattcaatatttgaagtac

SEQ ID NO: 6201 - protein, 359 aa, Homo sapiens; identical to SEQ ID NO: 630

SEQ ID NO: 6202 - DNA, 3185 bp, Homo sapiens
actgtggagggggcggaccgtggggaagctgcttccgggtgagccccccccgctcttacgcggtctgtgggagaccggagcgggagacagcggtgacaggagcagcggccgggagcccttagggaggcagacagagcctgcagccaatgccccaggagccctcggttccaaccaactgatgcccctgtgcccactggcccacgccatgcagccccagtccgttctgcacagcggctacttccacccactacttcgggcctggcagacagccaccaccaccctcaatgcctccaacctcatctaccccatctttgtcacggatgttcctgatgacatacagcctatcaccagcctcccaggagtggccaggtatggtgtgaagcggctggaagagatgctgaggcccttggtggaagagggcctacgctgtgtcttgatctttggcgtccccagcagagttcccaaggacgagcggggttccgcagctgactccgaggagtccccagctattgaggcaatccatctgttgaggaagaccttccccaacctcctggtggcctgtgatgtctgcctgtgtccctacacctcccatggtcactgcgggctcctgagtgaaaacggagcattccgggctgaggagagccgccagcggctggctgaggtggcattggcgtatgccaaggcaggatgtcaggtggtagccccgtcggacatgatggatggacgcgtggaagccatcaaagaggccctgatggcacatggacttggcaacagggtatcggtgatgagctacagtgccaaatttgcttcctgtttctatggccctttccgggatgcagctaagtcaagcccagcttttggggaccgccgctgctaccagctgccccctggagcacgaggcctggctctccgagctgtggaccgggatgtacgggaaggagctgacatgctcatggtgaagccgggaatgccctacctggacatcgtgcgggaggtaaaggacaagcaccctgacctccctctcgccgtgtaccacgtctctggagagtttgccatgctgtggcatggagcccaggccggggcatttgatctcaaggctgccgtactggaggccatgactgccttccgcagagcaggtgctgacatcatcatcacctactacacaccgcagctgctgcagtggctgaaggaggaatgatggagacagtgccaggcccaagaactagaactttaaaacgttcccggggcctcagacaagtgaaaaccaaagtaaatgctgcttttagaactgtgccctcatgccctcttcctgctcacatgctagcggggcccagcagccctgggtggttttgccagcatgctaactcttgtaactcgcagctgcatcctatgagctctcccaagcttccccgcccctcccctgggtcagccgtgaggcccacctttgccaccctcagctctttcctctggtgtggcttcagcttgaaagcaacctggagtcgggggcacagcctttggggcctggctgggagagggtcttggagcattaggggaagaagagagcagtgggatcttggggcctgagaagccttggaacgcttctggcagcagagctgggtgtgggaatgaggcctagatcgatatccctgggttagagttgaaatttgccgcaattccactggaaggcatttcccacgaggccagaggttgccaggctgcctgaggtctcctattctactctgaaccataaacccagagaagaattactcattaaccagcataaatactgcctgaggatcaaaactcagaggcaaagagggagttcctgactgctagaggtgccaccaccacaaacactttttattcaggagatactttttgagaatctctgctctgttcctaggttcagtgctgggtcctgggaatacagcaggacagacctcagcttatctcttcatagaaattatacaaagagaattggggagacagctaagaagaaaacaaagaaataaagcagttacaaattgtgataagtgctttgaaggaaagaaggggtctgagacaacaacagggaaggggcctctcttgaaacagtagttgggaaggaggcagacatgcaccagtgatgtggtgacaggtgctctgaaggaggtcaccaggacctgacctctttgaaggatcagaaaatacttccctgaaggactgacatttgagcctagacctgaagggtgagccatcaagctaagacaattggggaagagcattccagggagagggaggagttgtgcaaaggccctggggctccttctagctggaggaatgcaaggctagcttgtctggagcactgagaggatggcctgaactgagtggagagagacagaccaggaccaaaccatgcagaggtcaagggccacattcaccttttcagagtgactcaatcaaatttgtagtttgtaaaagtattttaacagctctgcggcaaagtgcaaatgaaaagtcttgatggcatggactggagcggggacagtggggatggagaaaggggaatggattgtggatgtgtttagaaggtagattcgatgtgaaggatgaatctggcttgaccttctgggtggctgatgggccatttactgagatggggcagcctggaagaggaacagaagcagggtcggggtggagggagaatactaaacttagcttgagacattttgcaataaggaagctatatctagagtgcttatgtgactcacctaaggccactcaacaagtttgtggcagaactggattagaactgcacagaaaacagccaagctgggatttgaacccatgtagtccaactccaaggcctctgcccctaaccactgtgccataccacctcccaataatcaacagcaaaattataggtctaacaatgttttatagacacccctccatttatgtgatgggtttgcatcctgataaacccatcataagttgaaaatatgatcataagttgaaaatatgatcataagtcaaaaatgtatttaatatacctaacctaccaaacatcatagcttagcctagcctgccttaaacatgctcagaacacttacattagcctacagtgggcaaaactatccaacacaaaatctatattgtaataaagttgtaaagaattttgaataaaaattcaatatttgaagtac

SEQ ID NO: 6203 - protein, 339 aa, Homo sapiens; identical to SEQ ID NO: 628

SEQ ID NO: 6204 - DNA, 593 bp, Homo sapiens
acgcggtctgtgggagaccggagcgggagacagcggtgacaggagcagcggccgggagcccttagggaggcagacagagcctgcagccaatgccccaggagccctcggttccaaccaactgatgcccctgtgcccactggcccacgccatgcagccccagtccgttctgcacagcggctacttccacccactacttcgggcctggctctccgagctgtggaccgggatgtacgggaaggagctgacatgctcatggtgaagccgggaatgccctacctggacatcgtgcgggaggtaaaggacaagcaccctgacctccctctcgccgtgtaccacgtctctggagagtttgccatgctgtggcatggagcccaggccggggcatttgatctcaaggctgccgtactggaggccatgactgccttccgcagagcaggtgctgacatcatcatcacctactacacaccgcagctgctgcagtggctgaaggaggaatgatggagacagtgccaggcccaagaactagaactttaaaacgttcccggggcctcagacaagtgaaaaccaaagtaaatgctgcttttagaactgtg

SEQ ID NO: 6205 - protein, 83 aa, Homo sapiens [sequence omitted]

SEQ ID NO: 6206 - DNA, 567 bp, Homo sapiens
acgcggtctgtgggagaccggagcgggagacagcggtgacaggagcagcggccgggagcccttagggaggcagacagagcctgcagccaatgccccaggagccctcggttccaaccaactgatgcccctgtgcccactggcccacgccatgcagccccagtccgttctgcacagcggctacttccacccactacttcgggcctggcagacagccaccaccaccctcaatgcctccaacctcatctaccccatctttgtcacgacgagcggggttccgcagctgactccgaggagtccccagctattgaggcaatccatctgttgaggaagaccttccccaacctcctggtggcctgtgatgtctgcctgtgtccctacacctcccatggtcactgcggtgagttccctccctcccaccagccctgctgccacccacactcctactgcccacttctcaacagggtggggacaggccagggcccaaggtgctccccaaaacccagtcatctgtcctgaagggctcctgagtgaaaacggagcattccgggctgaggagagccgccagcg

SEQ ID NO: 6207 - protein, 67 aa, Homo sapiens
MPLCPLAHAMQPQSVLHSGYFHPLLRAWQTATTTLNASNLIYPIFVTTSGVPQLTPRSPQLLRQSIC

SEQ ID NO: 6208 - DNA, 604 bp, Homo sapiens
cttacgcggtctgtgggagaccggagcgggagacagcggtgacaggagcagcggccgggagcccttagggaggcagacagagcctgcagccaatgccccaggagccctcggttccaaccaactgatgcccctgtgcccactggcccacgccatgcagccccagtccgttctgcacagcggctacttccacccactacttcgggcctggcagacagccaccaccaccctcaatgcctccaacctcatctaccccatctttgtcacggatgttcctgatgacatacagcctatcaccagcctcccaggagtggccaggtatggtgtgaagcggctggaagagatgctgaggcccttggtggaagagggcctacgctgtgtcttgatctttggcgtccccagcagagttcccaaggacgagcggggttccgcagctgactccgaggagtccccagctattgaggcaatccatctgttgaggaagaccttccccaacctcctggtggcctgtgatgtctgcctgtgtccctacacctcccatggtcactgcggtgagttccctccctcccaccagccctgctgccacccacactcctactgcccactt

SEQ ID NO: 6209 - protein, 159 aa, Homo sapiens
MPLCPLAHAMQPQSVLHSGYFHPLLRAWQTATTTLNASNLIYPIFVTDVPDDIQPITSLPGVARYGVKRLEEMLRPLVEEGLRCVLIFGVPSRVPKDERGSAADSEESPAIEAIHLLRKTFPNLLVACDVCLCPYTSHGHCGEFPPSHQPCCHPHSYCP

SEQ ID NO: 6210 - DNA, 547 bp, Homo sapiens
acgcggtctgtgggagaccggagcgggagacagcggtgacaggagcagcggccgggagcccttagggaggcagacagagcctgcagccaatgccccaggagccctcggttccaaccaactgatgcccctgtgcccactggcccacgccatgcagccccagtccgttctgcacagcggctacttccacccactacttcgggcctggcagacagccaccaccaccctcaatgcctccaacctcatctaccccatctttgtcacgtgagtctccaagaatgggccaggcctctgctctgctggttggggttggggttggggagggagtgttgactggagcgggcatcagtatggctgggggtggcaaagtgagctgtcagcttgaaattcaaggcactggaagcaggctacttggattaaggacaggaatcttaggaacaaaacaaactttgaaagaactcattcatcccatttggaaaattagaagaataacccttgcctgccatcctgagctcttgcagtaagacagaagctgagaaggtgctctgta

SEQ ID NO: 6211 - protein, 97 aa, Homo sapiens
MPPTSSTPSLSRESPRMGQASALLVGVGVGEGVLTGAGISMAGGGKVSCQLEIQGTGSRLLGLRTGILGTKQTLKELIHPIWKIRRITLACHPELLQ

SEQ ID NO: 6212 - DNA, 944 bp, Homo sapiens
aaggatctcccagttcacctgggagttaacacaccagggttctagtccttttgctcgctgtgtggctttgggtaagtccttgcccctctctggaccttgaggtcccattcatacaaaaagcagttggactcaggcctgccagcccccatttttgtggctcttccccgcccctccccatcctttggctatgggatagtctcccaggcacctccaaaaggaagtgtctaaaacagagctctccacctcctctccaagcccagctccccactgccctcttcctgccctgtccctgtctccgctgccctttagatcaggcaggcaggcaggcctagagcatccgccctgagacactgcctgttggctgccttaagacgccccttccttctctgcccgcagcctccccagcctctgcattcctctgcttcctgtctgctctgctcagcctgcaggattgatcttcccaaagccaggtgtcaaccaggccactaaccctacccactgctcagaaatcttcccacagcctcagcctggccccctcttatccatcccctccatacacacttgcctcagctcctcaaaacagtccacagccatcctccttccccacctttgcccctttcttcccttcctaaggaaatattggcccccttctctccaccaggctgaacccactcatcctgcaaaaccaagttcaacgccctgtcattttcttttttttttttttttttgagatggagtctcacactgtcgcccaggctagagtgcaatgggtgcactctcggctcactgcaacctctgcctcctaggttcaatcgattcttctgcctcagcctccagaggaactctgactacagacagagcctgcagccaatgccccaggagccctcggttccaaccaactgatgcccctgtgcccactggcccacgccatgcagccccagtcc

SEQ ID NO: 6213 - protein, 58 aa, Homo sapiens
MGALSAHCNLCLLGSIDSSASASRGTLTTDRACSQCPRSPRFQPTDAPVPTGPRHAAP

SEQ ID NO: 6214 - DNA, 1435 bp, Homo sapiens
aaaaaaacagactcggaagagcaagacaagagcagggatgaggacaatgatgaagacgaagaaaggctggaagaagaagaacagaatgaagaggaagaagtagacaactgaaaagggcgggagactgtggcaccttggaaggtaccacttgaaatgagacgtgctacgtgtttctgtgaagcttttccatgctgggcagagtagtctcaggcaaaagtgcctgaaaagatcagaataaaaactgactagaaataccgtcaaaaccagcacttaccaaactcagagcatctgagtagcagaatcctgttttgcttcatcaatctgaaggttatggccttttgacaagagggattctgaacgactaaattagtcagtttgctcgcttttgtttacttaaatgtatggttagatggtttttgatctgcagtcttccctagtcccccaaataagtaataataacttccatgctgcctgctgtgttccagatcacagaggcagccaaggctcaggaaaaactggggctttgcttatggtcagcctatgtttgattgcacagtctttgacaatagtagcttactaagactgctcagaatgagtaagctttaggaaactactaaaatgctgtgggagaataacaaaatccgttctctctcttcacttgacagaagcattaactgaattttgtttttcatagacccacttggcccaaaacctttctatattgcctgtagatgatcggcctgctggtgtggtagtaatctgatcacagatattcttaaatcagcagtgtggaatggtattagtcaaacatggtgccagtgtcttttacaaaaacagatggcatagtgtcagatgtaccttactctctgctactgtacagctttaggatttgtcatcacctcccggaaggtgtaaaaccccaggcttcctcttcttgtagtccatctcccagacttgtgactatggcttttcattcttcaattcatgacgatgcagtggcatgatcatagctcattgcatccttgaaatcctgggctcaggtgatcctcccgcctgagcctcctgagtatctgggactacagatgcgtgccaccaagcctggctaattttgtctcatgtcttctaaaaattattttgtgaagccccttcacaaaaaaccttaagggaaatctgatggtgctcaggaatctaactctccctaaaccatcctctttaactgcttctaaaatatctctgttggcctttcttagcctttttctgtttccattcagtgctccaagcgctttttgtttctaagttgagtgcttggggtttgacaggtagtgacgtgtagtttgacactgttaacttgttaaatacagtgaaaagtttgtgagtgaagaatgctgagaagattgtaatgctttgtacaaataaaagtcttgttaaaaaatga

SEQ ID NO: 6215 - protein, 64 aa, Homo sapiens
MVPVSFTKTDGIVSDVPYSLLLYSFRICHHLPEGVKPQASSSCSPSPRLVTMAFHSSIHDDAVA

SEQ ID NO: 6216 - DNA, 2399 bp, Homo sapiens
gtagctccctgaagcggaggcgaaggggagtttaagccccagcggcggcaatggcggagaggcccgaggacctaaacctgcccaatgccgtgatcaccaggatcatcaaggaggcgctcccggacggtgtcaacatctccaaggaggcccggagcgccatctcccgcgccgccagcgtcttcgtgctgtacgccacatcctggtgagcgggacagaggcataagggaggcgcggggatacctggctgggagttgctggctgggagcctacaaaccccaacgattgtgttctccctcggtggggacatgttcacagtcctctgccagtttttacaagttctgaagcaaaataacacaacaaaatcactttgctttagcttttttgtgcagagaagggaaggacttatccctgtcacaccaaaatccatacatgtaagaggcaggctttcccgttccacctctgggtgctccttttcccactcacgccttacaaacaagagggagtctgacagcctttctcttctctcagtgctaacaactttgcaatgaaaggaaagcggaagacgctgaatgccagtgatgtgctctcagccatggaagagatggagttccagcggttcgttaccccattgaaagaagctctggaagcatataggcgggagcagaaaggcaagaaggaggcctcagagcaaaagaagaaggacaaagacaaaaaaacagactcggaagagcaagacaagagcagggatgaggacaatgatgaagacgaagaaaggctggaagaagaagaacagaatgaagaggaagaagtagacaactgaaaagggcgggagactgtggcaccttggaaggtaccacttgaaatgagacgtgctacgtgtttctgtgaagcttttccatgctgggcagagtagtctcaggcaaaagtgcctgaaaagatcagaataaaaactgactagaaataccgtcaaaaccagcacttaccaaactcagagcatctgagtagcagaatcctgttttgcttcatcaatctgaaggttatggccttttgacaagagggattctgaacgactaaattagtcagtttgctcgcttttgtttacttaaatgtatggttagatggtttttgatctgcagtcttccctagtcccccaaataagtaataataacttccatgctgcctgctgtgttccagatcacagaggcagccaaggctcaggaaaaactggggctttgcttatggtcagcctatgtttgattgcacagtctttgacaatagtagcttactaagactgctcagaatgagtaagctttaggaaactactaaaatgctgtgggagaataacaaaatccgttctctctcttcacttgacagaagcattaactgaattttgtttttcatagacccacttggcccaaaacctttctatattgcctgtagatgatcggcctgctggtgtggtagtaatctgatcacagatattcttaaatcagcagtgtggaatggtattagtcaaacatggtgccagtgtcttttacaaaaacagatggcatagtgtcagatgtaccttactctctgctactgtacagctttaggatttgtcatcacctcccggaaggtgtaaaaccccaggcttcctcttcttgtagtccatctcccagacttgtgactatggcttttcattcttcaattcatgacgagtgccaaacttgattttctctaggcacagctttctccctctgtgcctcctgcttcctttctctctcctgcctctcctctgctccccatcccactttctcatctgcctccttttctcacttctgtcagtctgtaagctttgataacctgcttaatactccaaagtgtgagttcctctgatctcttgattccttagttctaatctcacgttttgtttttaagagatggagtctctcactctgtggcccaggctggagtgcagtggcatgatcatagctcattgcatccttgaaatcctgggctcaggtgatcctcccgcctgagcctcctgagtatctgggactacagatgcgtgccaccaagcctggctaattttgtctcatgtcttctaaaaattattttgtgaagccccttcacaaaaaaccttaagggaaatctgatggtgctcaggaatctaactctccctaaaccatcctctttaactgcttctaaaatatctctgttggcctttcttagcctttttctgtttccattcagtgctccaagcgctttttgtttctaagttgagtgcttggggtttgacaggtagtgacgtgtagtttgacactgttaacttgttaaatacagtgaaaagtttgtgagtgaagaatgctgagaagattgtaatgctttgtacaaataaaagtcttgttaaaaaatga

SEQ ID NO: 6217 - protein, 91 aa, Homo sapiens
MKGKRKTLNASDVLSAMEEMEFQRFVTPLKEALEAYRREQKGKKEASEQKKKDKDKKTDSEEQDKSRDEDNDEDEERLEEEEQNEEEEVDN

SEQ ID NO: 6218 - DNA, 2018 bp, Homo sapiens
agaccgtagcgacgcgggaagtccggacgcagtagctccctgaagcggaggcgaaggggagtttaagccccagcggcggcaatggcggagaggcccgaggacctaaacctgcccaatgccgtgatcaccaggatcatcaaggaggcgtgctaacaactttgcaatgaaaggaaagcggaagacgctgaatgccagtgatgtgctctcagccatggaagagatggagttccagcggttcgttaccccattgaaagaagctctggaagcatataggcgggagcagaaaggcaagaaggaggcctcagagcaaaagaagaaggacaaagacaaaaaaacagactcggaagagcaagacaagagcagggatgaggacaatgatgaagacgaagaaaggctggaagaagaagaacagaatgaagaggaagaagtagacaactgaaaagggcgggagactgtggcaccttggaaggtaccacttgaaatgagacgtgctacgtgtttctgtgaagcttttccatgctgggcagagtagtctcaggcaaaagtgcctgaaaagatcagaataaaaactgactagaaataccgtcaaaaccagcacttaccaaactcagagcatctgagtagcagaatcctgttttgcttcatcaatctgaaggttatggccttttgacaagagggattctgaacgactaaattagtcagtttgctcgcttttgtttacttaaatgtatggttagatggtttttgatctgcagtcttccctagtcccccaaataagtaataataacttccatgctgcctgctgtgttccagatcacagaggcagccaaggctcaggaaaaactggggctttgcttatggtcagcctatgtttgattgcacagtctttgacaatagtagcttactaagactgctcagaatgagtaagctttaggaaactactaaaatgctgtgggagaataacaaaatccgttctctctcttcacttgacagaagcattaactgaattttgtttttcatagacccacttggcccaaaacctttctatattgcctgtagatgatcggcctgctggtgtggtagtaatctgatcacagatattcttaaatcagcagtgtggaatggtattagtcaaacatggtgccagtgtcttttacaaaaacagatggcatagtgtcagatgtaccttactctctgctactgtacagctttaggatttgtcatcacctcccggaaggtgtaaaaccccaggcttcctcttcttgtagtccatctcccagacttgtgactatggcttttcattcttcaattcatgacgagtgccaaacttgattttctctaggcacagctttctccctctgtgcctcctgcttcctttctctctcctgcctctcctctgctccccatcccactttctcatctgcctccttttctcacttctgtcagtctgtaagctttgataacctgcttaatactccaaagtgtgagttcctctgatctcttgattccttagttctaatctcacgttttgtttttaagagatggagtctctcactctgtggcccaggctggagtgcagtggcatgatcatagctcattgcatccttgaaatcctgggctcaggtgatcctcccgcctgagcctcctgagtatctgggactacagatgcgtgccaccaagcctggctaattttgtctcatgtcttctaaaaattattttgtgaagccccttcacaaaaaaccttaagggaaatctgatggtgctcaggaatctaactctccctaaaccatcctctttaactgcttctaaaatatctctgttggcctttcttagcctttttctgtttccattcagtgctccaagcgctttttgtttctaagttgagtgcttggggtttgacaggtagtgacgtgtagtttgacactgttaacttgttaaatacagtgaaaagtttgtgagtgaagaatgctgagaagattgtaatgctttgtacaaataaaagtcttgttaaaaaatga

SEQ ID NO: 6219 - protein, 91 aa, Homo sapiens; identical to SEQ ID NO: 6217

SEQ ID NO: 6220 - DNA, 2316 bp, Homo sapiens
aaaatccggatgcgccggtatttgaggcggaggcggggctgtggggggaggagggaggctatggcgctcagagcactgtgggacactgtaggccacgtggggcggaacggaaacctcgcagggtcagaccgtagcgacgcgggaagtccggacgcagtagctccctgaagcggaggcgaaggggagtttaagccccagcggcggcaatggcggagaggcccgaggacctaaacctgcccaatgccgtgatcaccaggatcatcaaggaggcggtgagcagctcggggggggcggacgaacgggcaggagggaagcaggtgctggaacggcagctttgctcacccccggtctcctcgcagctcccggacggtgtcaacatctccaaggaggcccggagcgccatctcccgcgccgccagcgtcttcgtgctgtacgccacatcctgtgctaacaactttgcaatgaaaggaaagcggaagacgctgaatgccagtgatgtgctctcagccatggaagagatggagttccagcggttcgttaccccattgaaagaagctctggaagcatataggcgggagcagaaaggcaagaaggaggcctcagagcaaaagaagaaggacaaagacaaaaaaacagactcggaagagcaagacaagagcagggatgaggacaatgatgaagacgaagaaaggctggaagaagaagaacagaatgaagaggaagaagtagacaactgaaaagggcgggagactgtggcaccttggaaggtaccacttgaaatgagacgtgctacgtgtttctgtgaagcttttccatgctgggcagagtagtctcaggcaaaagtgcctgaaaagatcagaataaaaactgactagaaataccgtcaaaaccagcacttaccaaactcagagcatctgagtagcagaatcctgttttgcttcatcaatctgaaggttatggccttttgacaagagggattctgaacgactaaattagtcagtttgctcgcttttgtttacttaaatgtatggttagatggtttttgatctgcagtcttccctagtcccccaaataagtaataataacttccatgctgcctgctgtgttccagatcacagaggcagccaaggctcaggaaaaactggggctttgcttatggtcagcctatgtttgattgcacagtctttgacaatagtagcttactaagactgctcagaatgagtaagctttaggaaactactaaaatgctgtgggagaataacaaaatccgttctctctcttcacttgacagaagcattaactgaattttgtttttcatagacccacttggcccaaaacctttctatattgcctgtagatgatcggcctgctggtgtggtagtaatctgatcacagatattcttaaatcagcagtgtggaatggtattagtcaaacatggtgccagtgtcttttacaaaaacagatggcatagtgtcagatgtaccttactctctgctactgtacagctttaggatttgtcatcacctcccggaaggtgtaaaaccccaggcttcctcttcttgtagtccatctcccagacttgtgactatggcttttcattcttcaattcatgacgagtgccaaacttgattttctctaggcacagctttctccctctgtgcctcctgcttcctttctctctcctgcctctcctctgctccccatcccactttctcatctgcctccttttctcacttctgtcagtctgtaagctttgataacctgcttaatactccaaagtgtgagttcctctgatctcttgattccttagttctaatctcacgttttgtttttaagagatggagtctctcactctgtggcccaggctggagtgcagtggcatgatcatagctcattgcatccttgaaatcctgggctcaggtgatcctcccgcctgagcctcctgagtatctgggactacagatgcgtgccaccaagcctggctaattttgtctcatgtcttctaaaaattattttgtgaagccccttcacaaaaaaccttaagggaaatctgatggtgctcaggaatctaactctccctaaaccatcctctttaactgcttctaaaatatctctgttggcctttcttagcctttttctgtttccattcagtgctccaagcgctttttgtttctaagttgagtgcttggggtttgacaggtagtgacgtgtagtttgacactgttaacttgttaaatacagtgaaaagtttgtgagtgaagaatgctgagaagattgtaatgctttgtacaaataaaagtcttgttaaaaaatga

SEQ ID NO: 6221 - protein, 176 aa, Homo sapiens
MAERPEDLNLPNAVITRIIKEAVSSSGGADERAGGKQVLERQLCSPPVSSQLPDGVNISKEARSAISRAASVFVLYATSCANNFAMKGKRKTLNASDVLSAMEEMEFQRFVTPLKEALEAYRREQKGKKEASEQKKKDKDKKTDSEEQDKSRDEDNDEDEERLEEEEQNEEEEVDN

SEQ ID NO: 6222 - DNA, 2245 bp, Homo sapiens
aaataagttggtgagaaggttcccgacgcggcgatggcgagaagcagagaaatggacctggggaggggcggaggctatggcgctcagagcactgtgggacactgtaggccacgtggggcggaacggaaacctcgcagggtcagaccgtagcgacgcgggaagtccggacgcagtagctccctgaagcggaggcgaaggggagtttaagccccagcggcggcaatggcggagaggcccgaggacctaaacctgcccaatgccgtgatcaccaggatcatcaaggaggcgctcccggacggtgtcaacatctccaaggaggcccggagcgccatctcccgcgccgccagcgtcttcgtgctgtacgccacatcctgtgctaacaactttgcaatgaaaggaaagcggaagacgctgaatgccagtgatgtgctctcagccatggaagagatggagttccagcggttcgttaccccattgaaagaagctctggaagcatataggcgggagcagaaaggcaagaaggaggcctcagagcaaaagaagaaggacaaagacaaaaaaacagactcggaagagcaagacaagagcagggatgaggacaatgatgaagacgaagaaaggctggaagaagaagaacagaatgaagaggaagaagtagacaactgaaaagggcgggagactgtggcaccttggaaggtaccacttgaaatgagacgtgctacgtgtttctgtgaagcttttccatgctgggcagagtagtctcaggcaaaagtgcctgaaaagatcagaataaaaactgactagaaataccgtcaaaaccagcacttaccaaactcagagcatctgagtagcagaatcctgttttgcttcatcaatctgaaggttatggccttttgacaagagggattctgaacgactaaattagtcagtttgctcgcttttgtttacttaaatgtatggttagatggtttttgatctgcagtcttccctagtcccccaaataagtaataataacttccatgctgcctgctgtgttccagatcacagaggcagccaaggctcaggaaaaactggggctttgcttatggtcagcctatgtttgattgcacagtctttgacaatagtagcttactaagactgctcagaatgagtaagctttaggaaactactaaaatgctgtgggagaataacaaaatccgttctctctcttcacttgacagaagcattaactgaattttgtttttcatagacccacttggcccaaaacctttctatattgcctgtagatgatcggcctgctggtgtggtagtaatctgatcacagatattcttaaatcagcagtgtggaatggtattagtcaaacatggtgccagtgtcttttacaaaaacagatggcatagtgtcagatgtaccttactctctgctactgtacagctttaggatttgtcatcacctcccggaaggtgtaaaaccccaggcttcctcttcttgtagtccatctcccagacttgtgactatggcttttcattcttcaattcatgacgagtgccaaacttgattttctctaggcacagctttctccctctgtgcctcctgcttcctttctctctcctgcctctcctctgctccccatcccactttctcatctgcctccttttctcacttctgtcagtctgtaagctttgataacctgcttaatactccaaagtgtgagttcctctgatctcttgattccttagttctaatctcacgttttgtttttaagagatggagtctctcactctgtggcccaggctggagtgcagtggcatgatcatagctcattgcatccttgaaatcctgggctcaggtgatcctcccgcctgagcctcctgagtatctgggactacagatgcgtgccaccaagcctggctaattttgtctcatgtcttctaaaaattattttgtgaagccccttcacaaaaaaccttaagggaaatctgatggtgctcaggaatctaactctccctaaaccatcctctttaactgcttctaaaatatctctgttggcctttcttagcctttttctgtttccattcagtgctccaagcgctttttgtttctaagttgagtgcttggggtttgacaggtagtgacgtgtagtttgacactgttaacttgttaaatacagtgaaaagtttgtgagtgaagaatgctgagaagattgtaatgctttgtacaaataaaagtcttgttaaaaaatga

SEQ ID NO: 6223 - protein, 147 aa, Homo sapiens
MAERPEDLNLPNAVITRIIKEALPDGVNISKEARSAISRAASVFVLYATSCANNFAMKGKRKTLNASDVLSAMEEMEFQRFVTPLKEALEAYRREQKGKKEASEQKKKDKDKKTDSEEQDKSRDEDNDEDEERLEEEEQNEEEEVDN

SEQ ID NO: 6224 - DNA, 2381 bp, Homo sapiens
aaacggacggaagctccattgagccaaataagttggtgagaaggttcccgacgcggcgatggcgagaagcagagaaatggacctggggaggggcgtgcggggtgcggtagggttggatggaagccttggcgggccaaaaccactgcggcttcaaaatccggatgcgccggtatttgaggcggaggcggggctgtggggggaggagggaggctatggcgctcagagcactgtgggacactgtaggccacgtggggcggaacggaaacctcgcagggtcagaccgtagcgacgcgggaagtccggacgcagtagctccctgaagcggaggcgaaggggagtttaagccccagcggcggcaatggcggagaggcccgaggacctaaacctgcccaatgccgtgatcaccaggatcatcaaggaggcgctcccggacggtgtcaacatctccaaggaggcccggagcgccatctcccgcgccgccagcgtcttcgtgctgtacgccacatcctgtgctaacaactttgcaatgaaaggaaagcggaagacgctgaatgccagtgatgtgctctcagccatggaagagatggagttccagcggttcgttaccccattgaaagaagctctggaagcatataggcgggagcagaaaggcaagaaggaggcctcagagcaaaagaagaaggacaaagacaaaaaaacagactcggaagagcaagacaagagcagggatgaggacaatgatgaagacgaagaaaggctggaagaagaagaacagaatgaagaggaagaagtagacaactgaaaagggcgggagactgtggcaccttggaaggtaccacttgaaatgagacgtgctacgtgtttctgtgaagcttttccatgctgggcagagtagtctcaggcaaaagtgcctgaaaagatcagaataaaaactgactagaaataccgtcaaaaccagcacttaccaaactcagagcatctgagtagcagaatcctgttttgcttcatcaatctgaaggttatggccttttgacaagagggattctgaacgactaaattagtcagtttgctcgcttttgtttacttaaatgtatggttagatggtttttgatctgcagtcttccctagtcccccaaataagtaataataacttccatgctgcctgctgtgttccagatcacagaggcagccaaggctcaggaaaaactggggctttgcttatggtcagcctatgtttgattgcacagtctttgacaatagtagcttactaagactgctcagaatgagtaagctttaggaaactactaaaatgctgtgggagaataacaaaatccgttctctctcttcacttgacagaagcattaactgaattttgtttttcatagacccacttggcccaaaacctttctatattgcctgtagatgatcggcctgctggtgtggtagtaatctgatcacagatattcttaaatcagcagtgtggaatggtattagtcaaacatggtgccagtgtcttttacaaaaacagatggcatagtgtcagatgtaccttactctctgctactgtacagctttaggatttgtcatcacctcccggaaggtgtaaaaccccaggcttcctcttcttgtagtccatctcccagacttgtgactatggcttttcattcttcaattcatgacgagtgccaaacttgattttctctaggcacagctttctccctctgtgcctcctgcttcctttctctctcctgcctctcctctgctccccatcccactttctcatctgcctccttttctcacttctgtcagtctgtaagctttgataacctgcttaatactccaaagtgtgagttcctctgatctcttgattccttagttctaatctcacgttttgtttttaagagatggagtctctcactctgtggcccaggctggagtgcagtggcatgatcatagctcattgcatccttgaaatcctgggctcaggtgatcctcccgcctgagcctcctgagtatctgggactacagatgcgtgccaccaagcctggctaattttgtctcatgtcttctaaaaattattttgtgaagccccttcacaaaaaaccttaagggaaatctgatggtgctcaggaatctaactctccctaaaccatcctctttaactgcttctaaaatatctctgttggcctttcttagcctttttctgtttccattcagtgctccaagcgctttttgtttctaagttgagtgcttggggtttgacaggtagtgacgtgtagtttgacactgttaacttgttaaatacagtgaaaagtttgtgagtgaagaatgctgagaagattgtaatgctttgtacaaataaaagtcttgttaaaaaatga

SEQ ID NO: 6225 - protein, 147 aa, Homo sapiens; identical to SEQ ID NO: 6223

SEQ ID NO: 6226 - DNA, 2197 bp, Homo sapiens
agcagcggcgcagggcaccatgggaaacggacggaagctccattgagccaaataagttggccacgtggggcggaacggaaacctcgcagggtcagaccgtagcgacgcgggaagtccggacgcagtagctccctgaagcggaggcgaaggggagtttaagccccagcggcggcaatggcggagaggcccgaggacctaaacctgcccaatgccgtgatcaccaggatcatcaaggaggcgctcccggacggtgtcaacatctccaaggaggcccggagcgccatctcccgcgccgccagcgtcttcgtgctgtacgccacatcctgtgctaacaactttgcaatgaaaggaaagcggaagacgctgaatgccagtgatgtgctctcagccatggaagagatggagttccagcggttcgttaccccattgaaagaagctctggaagcatataggcgggagcagaaaggcaagaaggaggcctcagagcaaaagaagaaggacaaagacaaaaaaacagactcggaagagcaagacaagagcagggatgaggacaatgatgaagacgaagaaaggctggaagaagaagaacagaatgaagaggaagaagtagacaactgaaaagggcgggagactgtggcaccttggaaggtaccacttgaaatgagacgtgctacgtgtttctgtgaagcttttccatgctgggcagagtagtctcaggcaaaagtgcctgaaaagatcagaataaaaactgactagaaataccgtcaaaaccagcacttaccaaactcagagcatctgagtagcagaatcctgttttgcttcatcaatctgaaggttatggccttttgacaagagggattctgaacgactaaattagtcagtttgctcgcttttgtttacttaaatgtatggttagatggtttttgatctgcagtcttccctagtcccccaaataagtaataataacttccatgctgcctgctgtgttccagatcacagaggcagccaaggctcaggaaaaactggggctttgcttatggtcagcctatgtttgattgcacagtctttgacaatagtagcttactaagactgctcagaatgagtaagctttaggaaactactaaaatgctgtgggagaataacaaaatccgttctctctcttcacttgacagaagcattaactgaattttgtttttcatagacccacttggcccaaaacctttctatattgcctgtagatgatcggcctgctggtgtggtagtaatctgatcacagatattcttaaatcagcagtgtggaatggtattagtcaaacatggtgccagtgtcttttacaaaaacagatggcatagtgtcagatgtaccttactctctgctactgtacagctttaggatttgtcatcacctcccggaaggtgtaaaaccccaggcttcctcttcttgtagtccatctcccagacttgtgactatggcttttcattcttcaattcatgacgagtgccaaacttgattttctctaggcacagctttctccctctgtgcctcctgcttcctttctctctcctgcctctcctctgctccccatcccactttctcatctgcctccttttctcacttctgtcagtctgtaagctttgataacctgcttaatactccaaagtgtgagttcctctgatctcttgattccttagttctaatctcacgttttgtttttaagagatggagtctctcactctgtggcccaggctggagtgcagtggcatgatcatagctcattgcatccttgaaatcctgggctcaggtgatcctcccgcctgagcctcctgagtatctgggactacagatgcgtgccaccaagcctggctaattttgtctcatgtcttctaaaaattattttgtgaagccccttcacaaaaaaccttaagggaaatctgatggtgctcaggaatctaactctccctaaaccatcctctttaactgcttctaaaatatctctgttggcctttcttagcctttttctgtttccattcagtgctccaagcgctttttgtttctaagttgagtgcttggggtttgacaggtagtgacgtgtagtttgacactgttaacttgttaaatacagtgaaaagtttgtgagtgaagaatgctgagaagattgtaatgctttgtacaaataaaagtcttgttaaaaaatga

SEQ ID NO: 6227 - protein, 147 aa, Homo sapiens; identical to SEQ ID NO: 6223

SEQ ID NO: 6228 - DNA, 1232 bp, Homo sapiens
agcatataggcgggagcagaaaggcaagaaggaggcctcagagcaaaagaagaaggacaaagacaaaaaaacagactcggaagagcaagacaagagcagggatgaggacaatgatgaagacgaagaaaggctggaagaagaagaacagaatgaagaggaagaagtagacaactgaaaagggcgggagactgtggcaccttggaaggtaccacttgaaatgagacgtgctacgtgtttctgtgaagcttttccatgctgggcagagtagtctcaggcaaaagtgcctgaaaagatcagaataaaaactgactagaaataccgtcaaaaccagcacttaccaaactcagagcatctgagtagcagaatcctgttttgcttcatcaatctgaaggttatggccttttgacaagagggattctgaacgactaaattagtcagtttgctcgcttttgtttacttaaatgtatggttagatggtttttgatctgcagtcttccctagtcccccaaataagtaataataacttccatgctgcctgctgtgttccagatcacagaggcagccaaggctcaggaaaaactggggctttgcttatggtcagcctatgtttgattgcacagtctttgacaatagtagcttactaagactgctcagaatgagtaagctttaggaaactactaaaatgctgtgggagaataacaaaatccgttctctctcttcacttgacagaagcattaactgaattttgtttttcatagacccacttggcccaaaacctttctatattgcctgtagatgatcggcctgctggtgtggtagtaatctgatcacagatattcttaaatcagcagtgtggaatggtattagtcaaacatggtgccagtgtcttttacaaaaacagatggcatagtgtcagatgtaccttactctctgctactgtacagctttaggatttgtcatcacctcccggaaggtgtaaaaccccaggcttcctcttcttgtagtccatctcccagacttgtgactatggcttttcattctttcttagcctttttctgtttccattcagtgctccaagcgctttttgtttctaagttgagtgcttggggtttgacaggtagtgacgtgtagtttgacactgttaacttgttaaatacagtgaaaagtttgtgagtgaagaatgctgagaagattgtaatgctttgtacaaataaaagtcttgttaaaaaatg

SEQ ID NO: 6229 - protein, 85 aa, Homo sapiens
MVPVSFTKTDGIVSDVPYSLLLYSFRICHHLPEGVKPQASSSCSPSPRLVTMAFHSFLAFFCFHSVLQALFVSKLSAWGLTGSDV

SEQ ID NO: 6230 - DNA, 1890 bp, Homo sapiens
cacgtggggcggaacggaaacctcgcagggtcagaccgtagcgacgcgggaagtccggacgcagtagctccctgaagcggaggcgaaggggagtttaagccccagcggcggcaatggcggagaggcccgaggacctaaacctgcccaatgccgtgatcaccaggatcatcaaggaggcgctcccggacggtgtcaacatctccaaggaggcccggagcgccatctcccgcgccgccagcgtcttcgtgctgtacgccacatcctgtgctaacaactttgcaatgaaaggaaagcggaagacgctgaatgccagtgatgtgctctcagccatggaagagatggagttccagcggttcgttaccccattgaaagaaaagaaggacaaagacaaaaaaacagactcggaagagcaagacaagagcagggatgaggacaatgatgaagacgaagaaaggctggaagaagaagaacagaatgaagaggaagaagtagacaactgaaaagggcgggagactgtggcaccttggaaggtaccacttgaaatgagacgtgctacgtgtttctgtgaagcttttccatgctgggcagagtagtctcaggcaaaagtgcctgaaaagatcagaataaaaactgactagaaataccgtcaaaaccagcacttaccaaactcagagcatctgagtagcagaatcctgttttgcttcatcaatctgaaggttatggccttttgacaagagggattctgaacgactaaattagtcagtttgctcgcttttgtttacttaaatgtatggttagatggtttttgatctgcagtcttccctagtcccccaaataagtaataataacttccatgctgcctgctgtgttccagatcacagaggcagccaaggctcaggaaaaactggggctttgcttatggtcagcctatgtttgattgcacagtctttgacaatagtagcttactaagactgctcagaatgagtaagctttaggaaactactaaaatgctgtgggagaataacaaaatccgttctctctcttcacttgacagaagcattaactgaattttgtttttcatagacccacttggcccaaaacctttctatattgcctgtagatgatcggcctgctggtgtggtagtaatctgatcacagatattcttaaatcagcagtgtggaatggtattagtcaaacatggtgccagtgtcttttacaaaaacagatggcatagtgtcagatgtaccttactctctgctactgtacagctttaggatttgtcatcacctcccggaaggtgtaaaaccccaggcttcctcttcttgtagtccatctcccagacttgtgactatggcttttcattcttcaattcatgacgagtgccaaacttgattttctctaggcacagctttctccctctgtgcctcctgcttcctttctctctcctgcctctcctctgctccccatcccactttctcatctgcctccttttctcacttctgtcagtctgtaagctttgataacctgcttaatactccaaagtgtgagttcctctgatctcttgattccttagtcttctaaaaattattttgtgaagccccttcacaaaaaaccttaagggaaatctgatggtgctcaggaatctaactctccctaaaccatcctctttaactgcttctaaaatatctctgttggcctttcttagcctttttctgtttccattcagtgctccaagcgctttttgtttctaagttgagtgcttggggtttgacaggtagtgacgtgtagtttgacactgttaacttgttaaatacagtgaaaagtttgtgagtgaagaatgctgagaagattgtaatgctttgtacaaataaaagtcttgttaaaaaatg

SEQ ID NO: 6231 - protein, 128 aa, Homo sapiens
MAERPEDLNLPNAVITRIIKEALPDGVNISKEARSAISRAASVFVLYATSCANNFAMKGKRKTLNASDVLSAMEEMEFQRFVTPLKEKKDKDKKTDSEEQDKSRDEDNDEDEERLEEEEQNEEEEVDN

SEQ ID NO: 6232 - DNA, 1125 bp, Homo sapiens
agcatataggcgggagcagaaaggcaagaaggaggcctcagagcaaaagaagaaggacaaagacaaaaaaacagactcggaagagcaagacaagagcagggatgaggacaatgatgaagacgaagaaaggctggaagaagaagaacagaatgaagaggaagaagtagacaactgaaaagggcgggagactgtggcaccttggaaggtaccacttgaaatgagacgtgctacgtgtttctgtgaagcttttccatgctgggcagagtagtctcaggcaaaagtgcctgaaaagatcagaataaaaactgactagaaataccgtcaaaaccagcacttaccaaactcagagcatctgagtagcagaatcctgttttgcttcatcaatctgaaggttatggccttttgacaagagggattctgaacgactaaattagtcagtttgctcgcttttgtttacttaaatgtatggttagatggtttttgatctgcagtcttccctagtcccccaaataagtaataataacttccatgctgcctgctgtgttccagatcacagaggcagccaaggctcaggaaaaactggggctttgcttatggtcagcctatgtttgattgcacagtctttgacaatagtagcttactaagactgctcagaatgagtaagctttaggaaactactaaaatgctgtgggagaataacaaaatccgttctctctcttcacttgacagaagcattaactgaattttgtttttcatagacccacttggcccaaaacctttctatattgcctgtagatgatcggcctgctggtgtggtagtaatctgatcacagatattcttaaatcagcagtgtggaatggtattagtcaaacatggtgccagtgtcttttacaaaaacagatggcatagtgtcagatgtaccttactctctgctactgtacagctttaggatttgtcatcacctcccggaaggtgtaaaaccccaggcttctaagttgagtgcttggggtttgacaggtagtgacgtgtagtttgacactgttaacttgttaaatacagtgaaaagtttgtgagtgaagaatgctgagaagattgtaatgctttgtacaaataaaagtcttgtt

SEQ ID NO: 6233 - protein, 52 aa, Homo sapiens
MVPVSFTKTDGIVSDVPYSLLLYSFRICHHLPEGVKPQASKLSAWGLTGSDV

SEQ ID NO: 6234 - DNA, 646 bp, Homo sapiens
agcagcggcgcagggcaccatgggaaacggacggaagctccattgagccaaataagttggtgagaaggttcccgacgcggcgatggcgagaagcagagaaatggacctggggaggggcgtgcggggtgcggtagggttggatggaagccttggcgggccaaaaccactgcggcttcaaaatccggatgcgccggtatttgaggcggaggcggggctgtggggggaggagggaggctatggcgctcagagcactgtgggacactgtaggccacgtggggcggaacggaaacctcgcagggtcagaccgtagcgacgcgggaagtccggacgcagtagctccctgaagcggaggcgaaggggagtttaagccccagcggcggcaatggcggagaggcccgaggacctaaacctgcccaatgccgtgatcaccaggatcatcaaggaggcgctcccggacggtgtcaacatctccaaggaggcccggagcgccatctcccgcgccgccagcgtcttcgtgctgtacgccacatcctgtgctaacaactttgcaatgaaaggaaagcggaagacgctgaatgccagtgatgtgctctcagccatggaagagatggagttccagcggttcgttaccccattgaaagaagct

SEQ ID NO: 6235 - protein, 87 aa, Homo sapiens
MAERPEDLNLPNAVITRIIKEALPDGVNISKEARSAISRAASVFVLYATSCANNFAMKGKRKTLNASDVLSAMEEMEFQRFVTPLKE

SEQ ID NO: 6236 - DNA, 1007 bp, Homo sapiens
gcagtggttttggcccgccaaggcttccatccaaccctaccgcaccccgcacgcccctccccaggtccatttctctgcttctcgccatcgccgcgtcgggaaccttctcaccaacttatttggctcaatggagcttccgtccgtttcccatggtgccctgcgccgctgctgggtgacggcgcggccgggcgcagcgcgtgggagacgaaggcgtggctgactcggcggggcggatccctttaggacccgaggcaggctctgggcccgccgggtccgttaatctcaccgcgccgcaaggggccacgttttaccacttgatttagcaaccctaagcggtttggaatctgctttgctctcacaggacctcagcccgtcgtgatcagattctcccactttcttttttctttcctggaatggagtgggcagtctttttccatctctaccgaagttgatgttcatttttaatcttttcgcccctcacgcttttgtaataatgagcactagaatgctgcagggttggcctttggcctaaaccatttctagctatggacttgccagatgagagccagtgggacgaaaccacctgtggcttggctgtttgtcagcacccacaatgctgggcaactatccgccgcattgagaggggccatcctcgaatcctcggctcatcctgcaaaactcccctggatgctgaagtttccagtgttgaatttgaatgagacgcaacttccctgccctgaagatgttagaaatatggttgtattgtggatcccagaagaaacagagatacatgtgagccagcatgggaagaagaaaagaaagaactcggcagtgaaaagcaagtcatttctgggtctctctggaaatcagtccgcaggaacacgagtaggaacaccagggatgatcgtgcctcccccaaccccagtgcaattgtctgaacaattcagttcagatttcctacctctctgggctcaatccgaagcgttacctcaggatctactgaagga

SEQ ID NO: 6237 - protein, 148 aa, Homo sapiens
MRASGTKPPVAWLFVSTHNAGQLSAALRGAILESSAHPAKLPWMLKFPVLNLNETQLPCPEDVRNMVVLWIPEETEIHVSQHGKKKRKNSAVKSKSFLGLSGNQSAGTRVGTPGMIVPPPTPVQLSEQFSSDFLPLWAQSEALPQDLL

SEQ ID NO: 6238 - DNA, 2142 bp, Homo sapiens
gcagtggttttggcccgccaaggcttccatccaaccctaccgcaccccgcacgcccctccccaggtccatttctctgcttctcgccatcgccgcgtcgggaaccttctcaccaacttatttggctcaatggagcttccgtccgtttcccatggtgccctgcgccgctgctgggtgacggcgcggccgggcgcagcgcgtgggagacgaaggcgtggctgactcggcggggcggatccctttaggacccgaggcaggctctgggcccgccgggtccgttaatctcaccgcgccgcaaggggccacgttttaccacttgatttagcaaccctaagcggtttggaatctgctttgctctcacaggacctcagcccgtcgtgatcagattctcccactttcttttttctttcctggaatggagtgggcagtctttttccatctctaccgaagttgatgttcatttttaatcttttcgcccctcacgcttttgtaataatgagcactagaatgctgcagggttggcctttggcctaaaccatttctagctatggacttgccagatgagagccagtgggacgaaaccacctgtggcttggctgtttgtcagcacccacaatgctgggcaactatccgccgcattgagaggggccatcctcgaatcctcggctcatcctgcaaaactcccctggatgctgaagataaactcccagtgctcaccgtggtagacatcttagattccggctttgcagctcatcatttaccagaatgtacctttactaaggcccattctttattgtctcagagttcaaagttttactccaaatttcatggcaggcctccgaagggtttacctgacaaaagtttgatcaactgtactaacagacttcccaaatttccagtgttgaatttgaatgagacgcaacttccctgccctgaagatgttagaaatatggttgtattgtggatcccagaagaaacagagatacatgtgagccagcatgggaagaagaaaagaaagaactcggcagtgaaaagcaagtcatttctgggtctctctggaaatcagtccgcaggaacacgagtaggaacaccagggatgatcgtgcctcccccaaccccagtgcaattgtctgaacaattcagttcagatttcctacctctctgggctcaatccgaagcgttacctcaggatctactgaaggaacttttgccaggtggaaagcaaaccatgctctgtccagagatgaagataaaattggccatgatgaaaaagaatcttcccttggaaaagaaccgacctgacagtgtgatttcttctaagatgtttctatctatacaccgcctcaccctggaaagaccagcactgcgatatcctgaacgtttgaagaaattacataacctgaagacagaaggttacaggaaacagcagcagcggcagcagcagcagcagcagcaacagaagaaggtgaaaacacctattaagaaacaggaggctaaaaagaaagccaagagtgatccagggatccagagcacttcacataaacatccagttaccaccgttcatgaccgtctctatggttacagaactctgccaggtcagaacagtgacatgaagcagcagcagcagatggaaaaaggaaccacttcgaaacaggattccacggagagaccaaagatgaactactatgaccatgcggatttccaccacagtgtaaaaagtcctgaattgtatgaaacagaacccactaacaaggacattagtgctccagtggacgctgtgccagaagcccaggctgccaggcaaaagaagatctcctttaacttttcagaaattatggctagcacaggctggaactctgagctcaaactacttaggattcttcaggacactgatgatgaggatgaggaggaccagtcctctggggcagagtgagaagcctctggaggaatagactgaaggcatcccctggggcagccgtgttccaaagcgggatggctggtatcctgagggcagcaacgtttcacataagggcaagaggagaggggcttctgctctctggagcctttaccagggcctgagctctgagcttagggattccattttctttgttcacctctacttgcctctaaaataaatgtaggag

SEQ ID NO: 6239 - protein, 461 aa, Homo sapiens; identical to SEQ ID NO: 634

SEQ ID NO: 6240 - DNA, 2077 bp, Homo sapiens
agacgaaggcgtggctgactcggcggggcggatccctttaggacccgaggcaggctctgggcccgccgggtccgttaatctcaccgcgccgcaaggggccacgttttaccacttgatttagcaaccctaagcggtttggaatctgctttgctctcacaggacctcagcccgtcgtgatcagattctcccactttcttttttctttcctggaatggagtgggcagtctttttccatctctaccgaagttgatgttcatttttaatcttttcgcccctcacgcttttgtaataatggtactaagactgagtgttatttagattttattgttgttgtttgtgtttaacgcgaactatttaggcagcccagggataatgctggccatatagagatgcgcctgattaggtctcaggagtcaattcggactgggcagagcactagaatgctgcagggttggcctttggcctaaaccatttctagctatggacttgccagatgagagccagtgggacgaaaccacctgtggcttggctgtttgtcagcacccacaatgctgggcaactatccgccgcattgagaggggccatcctcgaatcctcggctcatcctgcaaaactcccctggatgctgaagataaactcccagtgctcaccgtggtagacatcttagattccggctttgcagctcatcatttaccagaatgtacctttactaaggcccattctttattgtctcagagttcaaagttttactccaaatttcatggcaggcctccgaagggtttacctgacaaaagtttgatcaactgtactaacagacttcccaaatttccagtgttgaatttgaatgagacgcaacttccctgccctgaagatgttagaaatatggttgtattgtggatcccagaagaaacagagatacatgtgagccagcatgggaagaagaaaagaaagaactcggcagtgaaaagcaagtcatttctgggtctctctggaaatcagtccgcaggaacacgagtaggaacaccagggatgatcgtgcctcccccaaccccagtgcaattgtctgaacaattcagttcagatttcctacctctctgggctcaatccgaagcgttacctcaggatctactgaaggaacttttgccaggtggaaagcaaaccatgctctgtccagagatgaagataaaattggccatgatgaaaaagaatcttcccttggaaaagaaccgacctgacagtgtgatttcttctaagatgtttctatctatacaccgcctcaccctggaaagaccagcactgcgatatcctgaacgtttgaagaaattacataacctgaagacagaaggttacaggaaacagcagcagcggcagcagcagcagcagcagcaacagaagaaggtgaaaacacctattaagaaacaggaggctaaaaagaaagccaagagtgatccagggatccagagcacttcacataaacatccagttaccaccgttcatgaccgtctctatggttacagaactctgccaggtcagaacagtgacatgaagcagcagcagcagatggaaaaaggaaccacttcgaaacaggattccacggagagaccaaagatgaactactatgaccatgcggatttccaccacagtgtaaaaagtcctgaattgtatgaaacagaacccactaacaaggacattagtgctccagtggacgctgtgccagaagcccaggctgccaggcaaaagaagatctcctttaacttttcagaaattatggctagcacaggctggaactctgagctcaaactacttaggattcttcaggacactgatgatgaggatgaggaggaccagtcctctggggcagagtgagaagcctctggaggaatagactgaaggcatcccctggggcagccgtgttccaaagcgggatggctggtatcctgagggcagcaacgtttcacataagggcaagaggagaggggcttctgctctctggagcctttaccagggcctgagctctgagcttagggattccattttctttgttcacctctacttgcctctaaaataaatgtaggag

SEQ ID NO: 6241 - protein, 461 aa, Homo sapiens; identical to SEQ ID NO: 634

SEQ ID NO: 6242 - DNA, 547 bp, Homo sapiens
attaactaatttttataatgaccctgtgaaataagcttatcctcattttacagtggaggcaacaggctcagactggttaagtcccaggtcactcagctattaaatagccaattaggagacctgaagtcctgctctcaaactcttgccattctactttatgctgagctattttcatacttgcttgttatccaatctttaattattttgtggccatcatttacctatataggttcaatagaaatattttatactgtgagttcaaattaacatctggactgtatggctaatgtataatactccctaattatgtagctgttgattttccagagcactagaatgctgcagggttggcctttggcctaaaccatttctagctatggacttgccagatgagagccagtgggacgaaaccacctgtggcttggctgtttgtcagcacccacaatgctgggcaactatccgccgcattgagaggggccatcctcgaatcctcggctcatcctgcaaaactcccctggatgctgaagataaactcccagtgctcacc

SEQ ID NO: 6243 - protein, 56 aa, Homo sapiens
MDLPDESQWDETTCGLAVCQHPQCWATIRRIERGHPRILGSSCKTPLDAEDKLPVL

SEQ ID NO: 6244 - DNA, 594 bp, Homo sapiens
attgtgcctagaacatagagcaggaatggaagagtggtcagagatgaggctggggagctgcagtagaaacaggaagcaggagtctgtgtcatgtaggacttcataaagcaggctgagtgttagctggagagaagagtaggctatgaattctgtttgatggaacaaatagttgtgaagtatttgcagtgtgcaatgtctgttaaggagctgttccgggaaaaacaaacaaaacttaaggatatggtgagatcctacattcatttgtcttttgtatttctgttttatgtgtggaactcattttttaggcctccgaagggtttacctgacaaaagtttgatcaactgtactaacagacttcccaaatttccagtgttgaatttgaatgagacgcaacttccctgccctgaagatgttagaaatatggttgtattgtggatcccagaagaaacagagatacatgtgagccagcatgggaagaagaaaagaaagaactcggcagtgaaaagcaagtcatttctgggtctctctggaaatcagtccgcaggaacacgagtaggaacaccagggatgatcgtgcctcccccaaccccagtg

SEQ ID NO: 6245 - protein, 145 aa, Homo sapiens
MEQIVVKYLQCAMSVKELFREKQTKLKDMVRSYIHLSFVFLFYVWNSFFRPPKGLPDKSLINCTNRLPKFPVLNLNETQLPCPEDVRNMVVLWIPEETEIHVSQHGKKKRKNSAVKSKSFLGLSGNQSAGTRVGTPGMIVPPPTP

SEQ ID NO: 6246 - DNA, 589 bp, Homo sapiens
ggttacagaactctgccaggtcagaacagtgacatgaagcagcagcagcagatggaaaaaggaaccacttcgaaacaggtcctgaattgtatgaaacagaacccactaacaaggacattagtgctccagtggacgctgtgccagaagcccaggctgccaggcaaaagaagatctcctttaacttttcagaaattatggctagcacaggctggaactctgagctcaaactacttaggattcttcaggacactgatgatgaggatgaggaggaccagtcctctggggcagagtgagaagcctctggaggaatagactgaaggcatcccctggggcagccgtgttccaaagcgggatggctggtatcctgagggcagcaacgtttcacataagggcaagaggagaggggcttctgctctctggagcctttaccagggcctgagctctgagcttagggattccattttctttgttcacctctacttgcctctaaaataaatgtaggagaaaaatccccagcctttttaaatttagattatttcctttccattagggtcagaataattttggtgattaaacacaactgcttttc

SEQ ID NO: 6247 - protein, 92 aa, Homo sapiens
MKQQQQMEKGTTSKQVLNCMKQNPLTRTLVLQWTLCQKPRLPGKRRSPLTFQKLWLAQAGTLSSNYLGFFRTLMMRMRRTSPLGQSEKPLEE

SEQ ID NO: 6248 - DNA, 4444 bp, Homo sapiens
agaactttggctcagcctgtcttcatccactgtatcctgacacctctcctactccttctctttaatgtacagctgagactgggatacccttagactgaaaggaaggacacggctatgtagaaaagaattgactgaaggggaggagtactcgtgaaccccttgcttcagcctcccaatgttctgagagaggaggagccaggcgcagtggctcatgcctgtaatcccagcactttgggaggttgagatgggcagatcgcaaggtcaggagatcgagaccatcctggctaacaggtctgccacgtctctgtgctcagtgtcctctctacatcctgtggcttgagcctgagcttgcccatattccctggctggatggagtggctaagccctgatatcgctctgcccagaagagatgagtggactcaaacttctccagccaggaagaggatcacgcatgccaaagtccagggtgcaggtcagctgaggctgtccattgatgcccaggaccgggttctgctgcttcacattatagaaggtaaaggcctgatcagcaaacagcctggcacctgtgatccgtatgtgaagatttctttgatccctgaagatagtagactacgccaccagaagacgcagaccgttccagactgcagagacccggctttccacgagcacttcttctttcctgtccaagaggaggatgatcagaagcgtctcttggttactgtgtggaacagggccagccagtccagacagagtggactcattggctgcatgagctttggggtgaagtctctcctgactccagacaaggagatcagtggttggtactacctcctaggggagcacctgggccggaccaagcacttgaaggtggccaggcggcgactgcggccgctgagagacccgctgctgagaatgccaggaggtggggacactgagaatgggaagaaactaaagatcaccatcccgaggggaaaggacggctttggcttcaccatctgctgcgactctccagttcgagtccaggccgtggattccgggggtccggcggaacgggcagggctgcagcagctggacacggtgctgcagctgaatgagaggcctgtggagcactggaaatgtgtggagctggcccacgagatccggagctgccccagtgagatcatcctactcgtgtggcgcatggtcccccaggtcaagccaggaccagatggcggggtcctgcggcgggcctcctgcaagtcgacacatgacctccagtcaccccccaacaaacgggagaagaactgcacccatggggtccaggcacggcctgagcagcgccacagctgccacctggtatgtgacagctctgatgggctgctgctcggcggctgggagcgctacaccgaggtggccaagcgcgggggccagcacaccctgcctgcactgtcccgtgccactgcccccaccgaccccaactacatcatcctggccccgctgaatcctgggagccagctgctccggcctgtgtaccaggaggataccatccccgaagaatcagggagtcccagtaaagggaagtcctacacaggcctggggaagaagtcccggctgatgaagacagtgcagaccatgaagggccacgggaactaccaaaactgcccggttgtgaggccgcatgccacgcactcaagctatggcacctacgtcaccctggcccccaaagtcctggtgttccctgtctttgttcagcctctagatctctgtaatcctgcccggaccctcctgctgtcagaggagctgctgctgtatgaagggaggaacaaggctgccgaggtgacactgtttgcctattcggacctgctgctcttcaccaaggaggacgagcctggccgctgcgacgtcctgaggaaccccctctacctccagagtgtgaagctgcaggaaggttcttcagaagacctgaaattctgcgtgctctatctagcagagaaggcagagtgcttattcactttggaagcgcactcgcaggagcagaagaagagagtgtgctggtgcctgtcggagaacatcgccaagcagcaacagctggcagcatcacccccggacagcaagatgtttgagacggaggcagatgagaagagggagatggccttggaggaagggaaggggcctggtgccgaggattccccacccagcaaggagccctctcctggccaggagcttcctccaggacaagaccttccacccaacaaggactccccttctgggcaggaacccgctcccagccaagaaccactgtccagcaaagactcagctacctctgaaggatcccctccaggcccagatgctccgcccagcaaggatgtgccaccatgccaggaaccccctccagcccaagacctctcaccctgccaggacctacctgctggtcaagaacccctgcctcaccaggaccctctactcaccaaagacctccctgccatccaggaatcccccacccgggaccttccaccctgtcaagatctgcctcctagccaggtctccctgccagccaaggcccttactgaggacaccatgagctccggggacctactagcagctactggggacccacctgcggcccccaggccagccttcgtgatccctgaggtccggctggatagcacctacagccagaaggcaggggcagagcagggctgctcgggagatgaggaggatgcagaagaggccgaggaggtggaggagggggaggaaggggaggaggacgaggatgaggacaccagcgatgacaactacggagagcgcagtgaggccaagcgcagcagcatgatcgagacgggccagggggctgagggtggcctctcactgcgtgtgcagaactcgctgcggcgccggacgcacagcgagggcagcctgctgcaggagccccgagggccctgctttgcctccgacaccaccttgcactgctcagacggtgagggcgccgcctccacctggggcatgccttcgcccagcaccctcaagaaagagctgggccgcaatggtggctccatgcaccacctttccctcttcttcacaggacacaggaagatgagcggggctgacaccgttggggatgatgacgaagcctcccggaagagaaagagcaaaaacctagccaaggacatgaagaacaagctggggatcttcagacggcggaatgagtcccctggagcccctcccgcgggcaaggcagacaaaatgatgaagtcattcaagcccacctcagaggaagccctcaagtggggcgagtccttggagaagctgctggttcacaaatacgggttagcagtgttccaagccttccttcgcactgagttcagtgaggagaatctggagttctggttggcttgtgaggacttcaagaaggtcaagtcacagtccaagatggcatccaaggccaagaagatctttgctgaatacatcgcgatccaggcatgcaaggaggtcaacctggactcctacacgcgggagcacaccaaggacaacctgcagagcgtcacgcggggctgcttcgacctggcacagaagcgcatcttcgggctcatggaaaaggactcgtaccctcgctttctccgttctgacctctacctggaccttattaaccagaagaagatgagtcccccgctttaggggccactggagtcgagctcagcgttcacaccaggcgggctgggtcccctgcccacctgcctccctgccccctgtgacggagggggcaagcaagcccccagaggctgtgtctctggacagacggatagacatacggaagcgaggcctggaccaagagaggcccaggctactggaggagtagaaggatgggccccgtggggtccccactgccccggtacgagggggcccaagaccctggcaggtcaggggccctggccaagccagatctggagctgctgctccctgctgcggagaccgcggaggcttcgcgttgaccaagttccttaaagaactggctgatggggcaggaggtccaggcctgggctctcgggccctcctagagggccattggagcttgcagctcagacccccactttgagttttatttatttaaatagtagttggatgcttggcacgtcgtcctgtaataggaaacccttgcctcatcagttttcctgatttacaagtgcaatattttagccaatgccttgggagaagctgccatgcaaaggtggacaccattctccagcttcaggggatatgctcgtcccgggcaccggtggcaggcagctggccttctggactaaggcagcctggggggacactgcagtctggctacacacagagatctggcaccccctgggtggagtgtccctcgggggctttgggaaagcatggcaccctcagaccacacagtagccaagttctggagcaaataaaaggcctgtgttatttcttgttcttgaccctt

SEQ ID NO: 6249 - protein, 1094 aa, Homo sapiens
MEWLSPDIALPRRDEWTQTSPARKRITHAKVQGAGQLRLSIDAQDRVLLLHIIEGKGLISKQPGTCDPYVKISLIPEDSRLRHQKTQTVPDCRDPAFHEHFFFPVQEEDDQKRLLVTVWNRASQSRQSGLIGCMSFGVKSLLTPDKEISGWYYLLGEHLGRTKHLKVARRRLRPLRDPLLRMPGGGDTENGKKLKITIPRGKDGFGFTICCDSPVRVQAVDSGGPAERAGLQQLDTVLQLNERPVEHWKCVELAHEIRSCPSEIILLVWRMVPQVKPGPDGGVLRRASCKSTHDLQSPPNKREKNCTHGVQARPEQRHSCHLVCDSSDGLLLGGWERYTEVAKRGGQHTLPALSRATAPTDPNYIILAPLNPGSQLLRPVYQEDTIPEESGSPSKGKSYTGLGKKSRLMKTVQTMKGHGNYQNCPVVRPHATHSSYGTYVTLAPKVLVFPVFVQPLDLCNPARTLLLSEELLLYEGRNKAAEVTLFAYSDLLLFTKEDEPGRCDVLRNPLYLQSVKLQEGSSEDLKFCVLYLAEKAECLFTLEAHSQEQKKRVCWCLSENIAKQQQLAASPPDSKMFETEADEKREMALEEGKGPGAEDSPPSKEPSPGQELPPGQDLPPNKDSPSGQEPAPSQEPLSSKDSATSEGSPPGPDAPPSKDVPPCQEPPPAQDLSPCQDLPAGQEPLPHQDPLLTKDLPAIQESPTRDLPPCQDLPPSQVSLPAKALTEDTMSSGDLLAATGDPPAAPRPAFVIPEVRLDSTYSQKAGAEQGCSGDEEDAEEAEEVEEGEEGEEDEDEDTSDDNYGERSEAKRSSMIETGQGAEGGLSLRVQNSLRRRTHSEGSLLQEPRGPCFASDTTLHCSDGEGAASTWGMPSPSTLKKELGRNGGSMHHLSLFFTGHRKMSGADTVGDDDEASRKRKSKNLAKDMKNKLGIFRRRNESPGAPPAGKADKMMKSFKPTSEEALKWGESLEKLLVHKYGLAVFQAFLRTEFSEENLEFWLACEDFKKVKSQSKMASKAKKIFAEYIAIQACKEVNLDSYTREHTKDNLQSVTRGCFDLAQKRIFGLMEKDSYPRFLRSDLYLDLINQKKMSPPL

SEQ ID NO: 6250 - DNA, 4596 bp, Homo sapiens
aactttggctcagcctgtcttcatccactgtatcctgacacctctcctactccttctctttaatgtacagctgagactgggatacccttagactgaaaggaaggacacggctatgtagaaaagaattgactgaaggggaggagtactcgtgaaccccttgcttcagcctcccaatgttctgagagaggaggagccaggcgcagtggctcatgcctgtaatcccagcactttgggaggttgagatgggcagatcgcaaggtcaggagatcgagaccatcctggctaacaggtcacattcagacagcacacctttgcccaattttctttctggatctcaccgtcctgagtgttgtacctgcaggttgctcacagcctctggagcccaagatagtctcccctttgggaggaggctctacagtggtccctggcgaagttgtgaagaggtctgccacgtctctgtgctcagtgtcctctctacatcctgtggcttgagcctgagcttgcccatattccctggctggatggagtggctaagccctgatatcgctctgcccagaagagatgagtggactcaaacttctccagccaggaagaggatcacgcatgccaaagtccagggtgcaggtcagctgaggctgtccattgatgcccaggaccgggttctgctgcttcacattatagaaggtaaaggcctgatcagcaaacagcctggcacctgtgatccgtatgtgaagatttctttgatccctgaagatagtagactacgccaccagaagacgcagaccgttccagactgcagagacccggctttccacgagcacttcttctttcctgtccaagaggaggatgatcagaagcgtctcttggttactgtgtggaacagggccagccagtccagacagagtggactcattggctgcatgagctttggggtgaagtctctcctgactccagacaaggagatcagtggttggtactacctcctaggggagcacctgggccggaccaagcacttgaaggtggccaggcggcgactgcggccgctgagagacccgctgctgagaatgccaggaggtggggacactgagaatgggaagaaactaaagatcaccatcccgaggggaaaggacggctttggcttcaccatctgctgcgactctccagttcgagtccaggccgtggattccgggggtccggcggaacgggcagggctgcagcagctggacacggtgctgcagctgaatgagaggcctgtggagcactggaaatgtgtggagctggcccacgagatccggagctgccccagtgagatcatcctactcgtgtggcgcatggtcccccaggtcaagccaggaccagatggcggggtcctgcggcgggcctcctgcaagtcgacacatgacctccagtcaccccccaacaaacgggagaagaactgcacccatggggtccaggcacggcctgagcagcgccacagctgccacctggtatgtgacagctctgatgggctgctgctcggcggctgggagcgctacaccgaggtggccaagcgcgggggccagcacaccctgcctgcactgtcccgtgccactgcccccaccgaccccaactacatcatcctggccccgctgaatcctgggagccagctgctccggcctgtgtaccaggaggataccatccccgaagaatcagggagtcccagtaaagggaagtcctacacaggcctggggaagaagtcccggctgatgaagacagtgcagaccatgaagggccacgggaactaccaaaactgcccggttgtgaggccgcatgccacgcactcaagctatggcacctacgtcaccctggcccccaaagtcctggtgttccctgtctttgttcagcctctagatctctgtaatcctgcccggaccctcctgctgtcagaggagctgctgctgtatgaagggaggaacaaggctgccgaggtgacactgtttgcctattcggacctgctgctcttcaccaaggaggacgagcctggccgctgcgacgtcctgaggaaccccctctacctccagagtgtgaagctgcaggaaggttcttcagaagacctgaaattctgcgtgctctatctagcagagaaggcagagtgcttattcactttggaagcgcactcgcaggagcagaagaagagagtgtgctggtgcctgtcggagaacatcgccaagcagcaacagctggcagcatcacccccggacagcaagatgtttgagacggaggcagatgagaagagggagatggccttggaggaagggaaggggcctggtgccgaggattccccacccagcaaggagccctctcctggccaggagcttcctccaggacaagaccttccacccaacaaggactccccttctgggcaggaacccgctcccagccaagaaccactgtccagcaaagactcagctacctctgaaggatcccctccaggcccagatgctccgcccagcaaggatgtgccaccatgccaggaaccccctccagcccaagacctctcaccctgccaggacctacctgctggtcaagaacccctgcctcaccaggaccctctactcaccaaagacctccctgccatccaggaatcccccacccgggaccttccaccctgtcaagatctgcctcctagccaggtctccctgccagccaaggcccttactgaggacaccatgagctccggggacctactagcagctactggggacccacctgcggcccccaggccagccttcgtgatccctgaggtccggctggatagcacctacagccagaaggcaggggcagagcagggctgctcgggagatgaggaggatgcagaagaggccgaggaggtggaggagggggaggaaggggaggaggacgaggatgaggacaccagcgatgacaactacggagagcgcagtgaggccaagcgcagcagcatgatcgagacgggccagggggctgagggtggcctctcactgcgtgtgcagaactcgctgcggcgccggacgcacagcgagggcagcctgctgcaggagccccgagggccctgctttgcctccgacaccaccttgcactgctcagacggtgagggcgccgcctccacctggggcatgccttcgcccagcaccctcaagaaagagctgggccgcaatggtggctccatgcaccacctttccctcttcttcacaggacacaggaagatgagcggggctgacaccgttggggatgatgacgaagcctcccggaagagaaagagcaaaaacctagccaaggacatgaagaacaagctggggatcttcagacggcggaatgagtcccctggagcccctcccgcgggcaaggcagacaaaatgatgaagtcattcaagcccacctcagaggaagccctcaagtggggcgagtccttggagaagctgctggttcacaaatacgggttagcagtgttccaagccttccttcgcactgagttcagtgaggagaatctggagttctggttggcttgtgaggacttcaagaaggtcaagtcacagtccaagatggcatccaaggccaagaagatctttgctgaatacatcgcgatccaggcatgcaaggaggtcaacctggactcctacacgcgggagcacaccaaggacaacctgcagagcgtcacgcggggctgcttcgacctggcacagaagcgcatcttcgggctcatggaaaaggactcgtaccctcgctttctccgttctgacctctacctggaccttattaaccagaagaagatgagtcccccgctttaggggccactggagtcgagctcagcgttcacaccaggcgggctgggtcccctgcccacctgcctccctgccccctgtgacggagggggcaagcaagcccccagaggctgtgtctctggacagacggatagacatacggaagcgaggcctggaccaagagaggcccaggctactggaggagtagaaggatgggccccgtggggtccccactgccccggtacgagggggcccaagaccctggcaggtcaggggccctggccaagccagatctggagctgctgctccctgctgcggagaccgcggaggcttcgcgttgaccaagttccttaaagaactggctgatggggcaggaggtccaggcctgggctctcgggccctcctagagggccattggagcttgcagctcagacccccactttgagttttatttatttaaatagtagttggatgcttggcacgtcgtcctgtaataggaaacccttgcctcatcagttttcctgatttacaagtgcaatattttagccaatgccttgggagaagctgccatgcaaaggtggacaccattctccagcttcaggggatatgctcgtcccgggcaccggtggcaggcagctggccttctggactaaggcagcctggggggacactgcagtctggctacacacagagatctggcaccccctgggtggagtgtccctcgggggctttgggaaagcatggcaccctcagaccacacagtagccaagttctggagcaaataaaaggcctgtgttatttcttgttcttgaccctt

SEQ ID NO: 6251 - protein, 1198 aa, Homo sapiens; identical to SEQ ID NO: 644

SEQ ID NO: 6252 - DNA, 4427 bp, Homo sapiens
cccaccatctgggcctaaggaagcagaagcgcagtggctcatgcctgtaatcccagcactttgggaggttgagatgggcagatcgcaaggtcaggagatcgagaccatcctggctaacaggtcacattcagacagcacacctttgcccaattttctttctggatctcaccgtcctgagtgttgtacctgcaggttgctcacagcctctggagcccaagatagtctcccctttgggaggaggctctacagtggtccctggcgaagttgtgaagaggtctgccacgtctctgtgctcagtgtcctctctacatcctgtggcttgagcctgagcttgcccatattccctggctggatggagtggctaagccctgatatcgctctgcccagaagagatgagtggactcaaacttctccagccaggaagaggatcacgcatgccaaagtccagggtgcaggtcagctgaggctgtccattgatgcccaggaccgggttctgctgcttcacattatagaaggtaaaggcctgatcagcaaacagcctggcacctgtgatccgtatgtgaagatttctttgatccctgaagatagtagactacgccaccagaagacgcagaccgttccagactgcagagacccggctttccacgagcacttcttctttcctgtccaagaggaggatgatcagaagcgtctcttggttactgtgtggaacagggccagccagtccagacagagtggactcattggctgcatgagctttggggtgaagtctctcctgactccagacaaggagatcagtggttggtactacctcctaggggagcacctgggccggaccaagcacttgaaggtggccaggcggcgactgcggccgctgagagacccgctgctgagaatgccaggaggtggggacactgagaatgggaagaaactaaagatcaccatcccgaggggaaaggacggctttggcttcaccatctgctgcgactctccagttcgagtccaggccgtggattccgggggtccggcggaacgggcagggctgcagcagctggacacggtgctgcagctgaatgagaggcctgtggagcactggaaatgtgtggagctggcccacgagatccggagctgccccagtgagatcatcctactcgtgtggcgcatggtcccccaggtcaagccaggaccagatggcggggtcctgcggcgggcctcctgcaagtcgacacatgacctccagtcaccccccaacaaacgggagaagaactgcacccatggggtccaggcacggcctgagcagcgccacagctgccacctggtatgtgacagctctgatgggctgctgctcggcggctgggagcgctacaccgaggtggccaagcgcgggggccagcacaccctgcctgcactgtcccgtgccactgcccccaccgaccccaactacatcatcctggccccgctgaatcctgggagccagctgctccggcctgtgtaccaggaggataccatccccgaagaatcagggagtcccagtaaagggaagtcctacacaggcctggggaagaagtcccggctgatgaagacagtgcagaccatgaagggccacgggaactaccaaaactgcccggttgtgaggccgcatgccacgcactcaagctatggcacctacgtcaccctggcccccaaagtcctggtgttccctgtctttgttcagcctctagatctctgtaatcctgcccggaccctcctgctgtcagaggagctgctgctgtatgaagggaggaacaaggctgccgaggtgacactgtttgcctattcggacctgctgctcttcaccaaggaggacgagcctggccgctgcgacgtcctgaggaaccccctctacctccagagtgtgaagctgcaggaaggttcttcagaagacctgaaattctgcgtgctctatctagcagagaaggcagagtgcttattcactttggaagcgcactcgcaggagcagaagaagagagtgtgctggtgcctgtcggagaacatcgccaagcagcaacagctggcagcatcacccccggacagcaagatgtttgagacggaggcagatgagaagagggagatggccttggaggaagggaaggggcctggtgccgaggattccccacccagcaaggagccctctcctggccaggagcttcctccaggacaagaccttccacccaacaaggactccccttctgggcaggaacccgctcccagccaagaaccactgtccagcaaagactcagctacctctgaaggatcccctccaggcccagatgctccgcccagcaaggatgtgccaccatgccaggaaccccctccagcccaagacctctcaccctgccaggacctacctgctggtcaagaacccctgcctcaccaggaccctctactcaccaaagacctccctgccatccaggaatcccccacccgggaccttccaccctgtcaagatctgcctcctagccaggtctccctgccagccaaggcccttactgaggacaccatgagctccggggacctactagcagctactggggacccacctgcggcccccaggccagccttcgtgatccctgaggtccggctggatagcacctacagccagaaggcaggggcagagcagggctgctcgggagatgaggaggatgcagaagaggccgaggaggtggaggagggggaggaaggggaggaggacgaggatgaggacaccagcgatgacaactacggagagcgcagtgaggccaagcgcagcagcatgatcgagacgggccagggggctgagggtggcctctcactgcgtgtgcagaactcgctgcggcgccggacgcacagcgagggcagcctgctgcaggagccccgagggccctgctttgcctccgacaccaccttgcactgctcagacggtgagggcgccgcctccacctggggcatgccttcgcccagcaccctcaagaaagagctgggccgcaatggtggctccatgcaccacctttccctcttcttcacaggacacaggaagatgagcggggctgacaccgttggggatgatgacgaagcctcccggaagagaaagagcaaaaacctagccaaggacatgaagaacaagctggggatcttcagacggcggaatgagtcccctggagcccctcccgcgggcaaggcagacaaaatgatgaagtcattcaagcccacctcagaggaagccctcaagtggggcgagtccttggagaagctgctggttcacaaatacgggttagcagtgttccaagccttccttcgcactgagttcagtgaggagaatctggagttctggttggcttgtgaggacttcaagaaggtcaagtcacagtccaagatggcatccaaggccaagaagatctttgctgaatacatcgcgatccaggcatgcaaggaggtcaacctggactcctacacgcgggagcacaccaaggacaacctgcagagcgtcacgcggggctgcttcgacctggcacagaagcgcatcttcgggctcatggaaaaggactcgtaccctcgctttctccgttctgacctctacctggaccttattaaccagaagaagatgagtcccccgctttaggggccactggagtcgagctcagcgttcacaccaggcgggctgggtcccctgcccacctgcctccctgccccctgtgacggagggggcaagcaagcccccagaggctgtgtctctggacagacggatagacatacggaagcgaggcctggaccaagagaggcccaggctactggaggagtagaaggatgggccccgtggggtccccactgccccggtacgagggggcccaagaccctggcaggtcaggggccctggccaagccagatctggagctgctgctccctgctgcggagaccgcggaggcttcgcgttgaccaagttccttaaagaactggctgatggggcaggaggtccaggcctgggctctcgggccctcctagagggccattggagcttgcagctcagacccccactttgagttttatttatttaaatagtagttggatgcttggcacgtcgtcctgtaataggaaacccttgcctcatcagttttcctgatttacaagtgcaatattttagccaatgccttgggagaagctgccatgcaaaggtggacaccattctccagcttcaggggatatgctcgtcccgggcaccggtggcaggcagctggccttctggactaaggcagcctggggggacactgcagtctggctacacacagagatctggcaccccctgggtggagtgtccctcgggggctttgggaaagcatggcaccctcagaccacacagtagccaagttctggagcaaataaaaggcctgtgttatttcttgttcttgaccctt

SEQ ID NO: 6253 - protein, 1198 aa, Homo sapiens; identical to SEQ ID NO: 644

SEQ ID NO: 6254 - DNA, 2640 bp, Homo sapiens
ttcaaacccgcgcgggccaatcagggccgggcgcgccctggccgttccaacgcttggggcagccctacctcccgctcgcgctcctcccgccctggagactccggttactggggagcaacacagccgcctcgggttgcagacgctcctgtccgggtcgcagtgggacgccatggagcgctccctgcaccgcgtctccctcgggagccggcgtgcccacccggacttgtccttctacctcaccacctttggtcagctgaggctgtccattgatgcccaggaccgggttctgctgcttcacattatagaaggtaaaggcctgatcagcaaacagcctggcacctgtgatccgtatgtgaagatttctttgatccctgaagatagtagactacgccaccagaagacgcagaccgttccagactgcagagacccggctttccacgagcacttcttctttcctgtccaagaggaggatgatcagaagcgtctcttggttactgtgtggaacagggccagccagtccagacagagtggactcattggctgcatgagctttggggtgaagtctctcctgactccagacaaggagatcagtggttggtactacctcctaggggagcacctgggccggaccaagcacttgaaggtggccaggcggcgactgcggccgctgagagacccgctgctgagaatgccaggaggtggggacactgagaatgggaagaaactaaagatcaccatcccgaggggaaaggacggctttggcttcaccatctgctgcgactctccagttcgagtccaggccgtggattccgggggtccggcggaacgggcagggctgcagcagctggacacggtgctgcagctgaatgagaggcctgtggagcactggaaatgtgtggagctggcccacgagatccggagctgccccagtgagatcatcctactcgtgtggcgcatggtcccccaggtcaagccaggaccagatggcggggtcctgcggcgggcctcctgcaagtcgacacatgacctccagtcaccccccaacaaacgggagaagaactgcacccatggggtccaggcacggcctgagcagcgccacagctgccacctggtatgtgacagctctgatgggctgctgctcggcggctgggagcgctacaccgaggtggccaagcgcgggggccagcacaccctgcctgcactgtcccgtgccactgcccccaccgaccccaactacatcatcctggccccgctgaatcctgggagccagctgctccggcctgtgtaccaggaggataccatccccgaagaatcagggagtcccagtaaagggaagtcctacacaggcctggggaagaagtcccggctgatgaagacagtgcagaccatgaagggccacgggaactaccaaaactgcccggttgtgaggccgcatgccacgcactcaagctatggcacctacgtcaccctggcccccaaagtcctggtgttccctgtctttgttcagcctctagatctctgtaatcctgcccggaccctcctgctgtcagaggagctgctgctgtatgaagggaggaacaaggctgccgaggtgacactgtttgcctattcggacctgctgctcttcaccaaggaggacgagcctggccgctgcgacgtcctgaggaaccccctctacctccagagtgtgaagctgcaggaaggttcttcagaagacctgaaattctgcgtgctctatctagcagagaaggcagagtgcttattcactttggaagcgcactcgcaggagcagaagaagagagtgtgctggtgcctgtcggagaacatcgccaagcagcaacagctggcagcatcacccccggacagcaagaaactccaccctttcggctctctccagcaggagatggggccggtcaactcaaccaatgccacccaggatagaagctttacctcaccaggacagactctgattggctgagcaaacccaagggcgggactctgcttctggcaacttaaccctttcttgggcatcccctaccacacagtaacctcacctcaactggacctgaaacagaggaccaagatggtgggtctagggtcatctgaagggagtggtcccaagggtgcatgtggatgtcaacagaaggaccacaatggtgtgagaggccttgtgggcatgcagagactggcagcagaaagtcccaagaggagaggactcagaggcttcttccttccaaggaggaggaggaggaggacattccacatctgggcttccagtggtggctcccggacctgccttgggggcagcaggagaggttgggagaggtcaccctgatgaagaacaatgccatgatctgctgctgccagaggacatctccgcccatccactcattttccacctgtacacattggctcattcattcgatggatatttcgggtgcatctactttatgccaggctctatgctaggagctggggatactgtggagaaaaagtcggatatggtctcgctctcatcaagatttcagtctagctgggagtgagcgttaaataagtcaataccaacacacacacgtgcacacacgtgatggcaagctgtgatcatctatgaaagaaaaaacacagatttctttaagaggg

SEQ ID NO: 6255 - protein, 602 aa, Homo sapiens; identical to SEQ ID NO: 636

SEQ ID NO: 6256 - DNA, 2855 bp, Homo sapiens
ttcaaacccgcgcgggccaatcagggccgggcgcgccctggccgttccaacgcttggggcagccctacctcccgctcgcgctcctcccgccctggagactccggttactggggagcaacacagccgcctcgggttgcagacgctcctgtccgggtcgcagtgggacgccatggagcgctccctgcaccgcgtctccctcgggagccggcgtgcccacccggacttgtccttctacctcaccacctttggtcagctgaggctgtccattgatgcccaggaccgggttctgctgcttcacattatagaaggtaaaggcctgatcagcaaacagcctggcacctgtgatccgtatgtgaagatttctttgatccctgaagatagtagactacgccaccagaagacgcagaccgttccagactgcagagacccggctttccacgagcacttcttctttcctgtccaagaggaggatgatcagaagcgtctcttggttactgtgtggaacagggccagccagtccagacagagtggactcattggctgcatgagctttggggtgaagtctctcctgactccagacaaggagatcagtggttggtactacctcctaggggagcacctgggccggaccaagcacttgaaggtggccaggcggcgactgcggccgctgagagacccgctgctgagaatgccaggaggtggggacactgagaatgggaagaaactaaagatcaccatcccgaggggaaaggacggctttggcttcaccatctgctgcgactctccagttcgagtccaggccgtggattccgggggtccggcggaacgggcagggctgcagcagctggacacggtgctgcagctgaatgagaggcctgtggagcactggaaatgtgtggagctggcccacgagatccggagctgccccagtgagatcatcctactcgtgtggcgcatggtcccccaggtcaagccaggaccagatggcggggtcctgcggcgggcctcctgcaagtcgacacatgacctccagtcaccccccaacaaacgggagaagaactgcacccatggggtccaggcacggcctgagcagcgccacagctgccacctggtatgtgacagctctgatgggctgctgctcggcggctgggagcgctacaccgaggtggccaagcgcgggggccagcacaccctgcctgcactgtcccgtgccactgcccccaccgaccccaactacatcatcctggccccgctgaatcctgggagccagctgctccggcctgtgtaccaggaggataccatccccgaagaatcagggagtcccagtaaagggaagtcctacacaggcctggggaagaagtcccggctgatgaagacagtgcagaccatgaagggccacgggaactaccaaaactgcccggttgtgaggccgcatgccacgcactcaagctatggcacctacgtcaccctggcccccaaagtcctggtgttccctgtctttgttcagcctctagatctctgtaatcctgcccggaccctcctgctgtcagaggagctgctgctgtatgaagggaggaacaaggctgccgaggtgacactgtttgcctattcggacctgctgctcttcaccaaggaggacgagcctggccgctgcgacgtcctgaggaaccccctctacctccagagtgtgaagctgcaggaaggttcttcagaagacctgaaattctgcgtgctctatctagcagagaaggcagagtgcttattcactttggaagcgcactcgcaggagcagaagaagagagtgtgctggtgcctgtcggagaacatcgccaagcagcaacagctggcagcatcacccccggacagcaagaaactccaccctttcggctctctccagcaggagatggggccggtcaactcaaccaatgccacccaggatagaagctttacctcaccaggacagactctgattggctgagcaaacccaagggcgggactctgcttctggcaacttaaccctttcttgggcatcccctaccacacagtaacctcacctcaactggacctgaaacagaggaccaagatggtgggtctagggtcatctgaagggagtggtcccaagggtgcatgtggatgtcaacagaaggaccacaatggtgtgagaggccttgtgggcatgcagagactggcagcagaaagtcccaagaggagaggactcagaggcttcttccttccaaggaggaggaggaggaggacattccacatctgggcttccagtggtggctcccggacctgccttgggggcagcaggagaggttgggagaggtcaccctgatgaagaacaatgccatgatctgctgctgccagaggacatctccgcccatccactcattttccacctgtacacattggctcattcattcgatggatatttcgggtgcatctactttatgccaggctctatgctaggagctggggatactgtggagaaaaagtcggatatggtctcgctctcatcaagatttcagtctagctgggagtgagcgttaaataagtcaataccaacacacacacgtgcacacacgtgatggcaagctgtgatcatctatgaaagaaaaaacacagatttctttaagagggaattgtacttagagtgctgtgtgtgggggtggggatggggaaggacataacttttaaaccgagacttgtgggctggagaggaaggagccagtcctggacttggggaagagtgttcgcggtggatggaatagcacgtggagagtccctgagatgggaaggagctcagtgggctggaggaatggcgagcaggccagtgtggctggagcttagtgagg

SEQ ID NO: 6257 - protein, 602 aa, Homo sapiens; identical to SEQ ID NO: 636

SEQ ID NO: 6258 - DNA, 4231 bp, Homo sapiens
agactccggttactggggagcaacacagccgcctcgggttgcagacgctcctgtccgggtcgcagtgggacgccatggagcgctccctgcaccgcgtctccctcgggagccggcgtgcccacccggacttgtccttctacctcaccacctttggtcagctgaggctgtccattgatgcccaggaccgggttctgctgcttcacagtctctttattcgtgtggatggatatgtctatgtgtgtctctctttctcgctgtgtgtgtgtgtatgtttccattcatccaccccaatgtctgaattctcttttagttatagaaggtaaaggcctgatcagcaaacagcctggcacctgtgatccgtatgtgaagatttctttgatccctgaagatagtagactacgccaccagaagacgcagaccgttccagactgcagagacccggctttccacgagcacttcttctttcctgtccaagaggaggatgatcagaagcgtctcttggttactgtgtggaacagggccagccagtccagacagagtggactcattggctgcatgagctttggggtgaagtctctcctgactccagacaaggagatcagtggttggtactacctcctaggggagcacctgggccggaccaagcacttgaaggtggccaggcggcgactgcggccgctgagagacccgctgctgagaatgccaggaggtggggacactgagaatgggaagaaactaaagatcaccatcccgaggggaaaggacggctttggcttcaccatctgctgcgactctccagttcgagtccaggccgtggattccgggggtccggcggaacgggcagggctgcagcagctggacacggtgctgcagctgaatgagaggcctgtggagcactggaaatgtgtggagctggcccacgagatccggagctgccccagtgagatcatcctactcgtgtggcgcatggtcccccaggtcaagccaggaccagatggcggggtcctgcggcgggcctcctgcaagtcgacacatgacctccagtcaccccccaacaaacgggagaagaactgcacccatggggtccaggcacggcctgagcagcgccacagctgccacctggtatgtgacagctctgatgggctgctgctcggcggctgggagcgctacaccgaggtggccaagcgcgggggccagcacaccctgcctgcactgtcccgtgccactgcccccaccgaccccaactacatcatcctggccccgctgaatcctgggagccagctgctccggcctgtgtaccaggaggataccatccccgaagaatcagggagtcccagtaaagggaagtcctacacaggcctggggaagaagtcccggctgatgaagacagtgcagaccatgaagggccacgggaactaccaaaactgcccggttgtgaggccgcatgccacgcactcaagctatggcacctacgtcaccctggcccccaaagtcctggtgttccctgtctttgttcagcctctagatctctgtaatcctgcccggaccctcctgctgtcagaggagctgctgctgtatgaagggaggaacaaggctgccgaggtgacactgtttgcctattcggacctgctgctcttcaccaaggaggacgagcctggccgctgcgacgtcctgaggaaccccctctacctccagagtgtgaagctgcaggaaggttcttcagaagacctgaaattctgcgtgctctatctagcagagaaggcagagtgcttattcactttggaagcgcactcgcaggagcagaagaagagagtgtgctggtgcctgtcggagaacatcgccaagcagcaacagctggcagcatcacccccggacagcaagatgtttgagacggaggcagatgagaagagggagatggccttggaggaagggaaggggcctggtgccgaggattccccacccagcaaggagccctctcctggccaggagcttcctccaggacaagaccttccacccaacaaggactccccttctgggcaggaacccgctcccagccaagaaccactgtccagcaaagactcagctacctctgaaggatcccctccaggcccagatgctccgcccagcaaggatgtgccaccatgccaggaaccccctccagcccaagacctctcaccctgccaggacctacctgctggtcaagaacccctgcctcaccaggaccctctactcaccaaagacctccctgccatccaggaatcccccacccgggaccttccaccctgtcaagatctgcctcctagccaggtctccctgccagccaaggcccttactgaggacaccatgagctccggggacctactagcagctactggggacccacctgcggcccccaggccagccttcgtgatccctgaggtccggctggatagcacctacagccagaaggcaggggcagagcagggctgctcgggagatgaggaggatgcagaagaggccgaggaggtggaggagggggaggaaggggaggaggacgaggatgaggacaccagcgatgacaactacggagagcgcagtgaggccaagcgcagcagcatgatcgagacgggccagggggctgagggtggcctctcactgcgtgtgcagaactcgctgcggcgccggacgcacagcgagggcagcctgctgcaggagccccgagggccctgctttgcctccgacaccaccttgcactgctcagacggtgagggcgccgcctccacctggggcatgccttcgcccagcaccctcaagaaagagctgggccgcaatggtggctccatgcaccacctttccctcttcttcacaggacacaggaagatgagcggggctgacaccgttggggatgatgacgaagcctcccggaagagaaagagcaaaaacctagccaaggacatgaagaacaagctggggatcttcagacggcggaatgagtcccctggagcccctcccgcgggcaaggcagacaaaatgatgaagtcattcaagcccacctcagaggaagccctcaagtggggcgagtccttggagaagctgctggttcacaaatacgggttagcagtgttccaagccttccttcgcactgagttcagtgaggagaatctggagttctggttggcttgtgaggacttcaagaaggtcaagtcacagtccaagatggcatccaaggccaagaagatctttgctgaatacatcgcgatccaggcatgcaaggaggtcaacctggactcctacacgcgggagcacaccaaggacaacctgcagagcgtcacgcggggctgcttcgacctggcacagaagcgcatcttcgggctcatggaaaaggactcgtaccctcgctttctccgttctgacctctacctggaccttattaaccagaagaagatgagtcccccgctttaggggccactggagtcgagctcagcgttcacaccaggcgggctgggtcccctgcccacctgcctccctgccccctgtgacggagggggcaagcaagcccccagaggctgtgtctctggacagacggatagacatacggaagcgaggcctggaccaagagaggcccaggctactggaggagtagaaggatgggccccgtggggtccccactgccccggtacgagggggcccaagaccctggcaggtcaggggccctggccaagccagatctggagctgctgctccctgctgcggagaccgcggaggcttcgcgttgaccaagttccttaaagaactggctgatggggcaggaggtccaggcctgggctctcgggccctcctagagggccattggagcttgcagctcagacccccactttgagttttatttatttaaatagtagttggatgcttggcacgtcgtcctgtaataggaaacccttgcctcatcagttttcctgatttacaagtgcaatattttagccaatgccttgggagaagctgccatgcaaaggtggacaccattctccagcttcaggggatatgctcgtcccgggcaccggtggcaggcagctggccttctggactaaggcagcctggggggacactgcagtctggctacacacagagatctggcaccccctgggtggagtgtccctcgggggctttgggaaagcatggcaccctcagaccacacagtagccaagttctggagcaaataaaaggcctgtgttatttcttgttcttgaccctt

SEQ ID NO: 6259 - protein, 1088 aa, Homo sapiens
MPRTGFCCFTVSLFVWMDMSMCVSLSRCVCVYVSIHPPQCLNSLLVIEGKGLISKQPGTCDPYVKISLIPEDSRLRHQKTQTVPDCRDPAFHEHFFFPVQEEDDQKRLLVTVWNRASQSRQSGLIGCMSFGVKSLLTPDKEISGWYYLLGEHLGRTKHLKVARRRLRPLRDPLLRMPGGGDTENGKKLKITIPRGKDGFGFTICCDSPVRVQAVDSGGPAERAGLQQLDTVLQLNERPVEHWKCVELAHEIRSCPSEIILLVWRMVPQVKPGPDGGVLRRASCKSTHDLQSPPNKREKNCTHGVQARPEQRHSCHLVCDSSDGLLLGGWERYTEVAKRGGQHTLPALSRATAPTDPNYIILAPLNPGSQLLRPVYQEDTIPEESGSPSKGKSYTGLGKKSRLMKTVQTMKGHGNYQNCPVVRPHATHSSYGTYVTLAPKVLVFPVFVQPLDLCNPARTLLLSEELLLYEGRNKAAEVTLFAYSDLLLFTKEDEPGRCDVLRNPLYLQSVKLQEGSSEDLKFCVLYLAEKAECLFTLEAHSQEQKKRVCWCLSENIAKQQQLAASPPDSKMFETEADEKREMALEEGKGPGAEDSPPSKEPSPGQELPPGQDLPPNKDSPSGQEPAPSQEPLSSKDSATSEGSPPGPDAPPSKDVPPCQEPPPAQDLSPCQDLPAGQEPLPHQDPLLTKDLPAIQESPTRDLPPCQDLPPSQVSLPAKALTEDTMSSGDLLAATGDPPAAPRPAFVIPEVRLDSTYSQKAGAEQGCSGDEEDAEEAEEVEEGEEGEEDEDEDTSDDNYGERSEAKRSSMIETGQGAEGGLSLRVQNSLRRRTHSEGSLLQEPRGPCFASDTTLHCSDGEGAASTWGMPSPSTLKKELGRNGGSMHHLSLFFTGHRKMSGADTVGDDDEASRKRKSKNLAKDMKNKLGIFRRRNESPGAPPAGKADKMMKSFKPTSEEALKWGESLEKLLVHKYGLAVFQAFLRTEFSEENLEFWLACEDFKKVKSQSKMASKAKKIFAEYIAIQACKEVNLDSYTREHTKDNLQSVTRGCFDLAQKRIFGLMEKDSYPRFLRSDLYLDLINQKKMSPPL

SEQ ID NO: 6260 - DNA, 679 bp, Homo sapiens
gaggtttcaggaagccttcgggcttatcgtgcagaggcacacagcacagacagggcttggggagggcccgccccaggctaacgctctgtgaacctctgtgagaaaggaagaagggagccaggaaaacagtggatcaaagatcaccatcccgaggggaaaggacggctttggcttcaccatctgctgcgactctccagttcgagtccaggccgtggattccgggggtccggcggaacgggcagggctgcagcagctggacacggtgctgcagctgaatgagaggcctgtggagcactggaaatgtgtggagctggcccacgagatccggagctgccccagtgagatcatcctactcgtgtggcgcatggtcccccaggtcaagccaggaccagatggcggggtcctgcggcgggcctcctgcaagtcgacacatgacctccagtcaccccccaacaaacgggagaagaactgcacccatggggtccaggcacggcctgagcagcgccacagctgccacctggtatgtgacagctctgatgggctgctgctcggcggctgggagcgctacaccgaggtggccaagcgcgggggccagcacaccctgcctgcactgtcccgtgccactgcccccaccgaccccaactacatcatcctggccccgctgaatcctgggagccag

SEQ ID NO: 6261 - protein, 129 aa, Homo sapiens
MRGLWSTGNVWSWPTRSGAAPVRSSYSCGAWSPRSSQDQMAGSCGGPPASRHMTSSHPPTNGRRTAPMGSRHGLSSATAATWYVTALMGCCSAAGSATPRWPSAGASTPCLHCPVPLPPPTPTTSSWPR

SEQ ID NO: 6262 - DNA, 3694 bp, Homo sapiens
ttggggaggtgagaggtgatttcctgccattcttctgtggggcgggcttcccagggtgctcatgccaggctgacgggtccagtgcgggctcccgctgctgggggagagctgggttttcatggggcggcagccgaggcaggacccgcagccatgaaccgcttcaatgggctctgcaaggtgtgctcggagcgccgctaccgccagatcaccatcccgaggggaaaggacggctttggcttcaccatctgctgcgactctccagttcgagtccaggccgtggattccgggggtccggcggaacgggcagggctgcagcagctggacacggtgctgcagctgaatgagaggcctgtggagcactggaaatgtgtggagctggcccacgagatccggagctgccccagtgagatcatcctactcgtgtggcgcatggtcccccaggtcaagccaggaccagatggcggggtcctgcggcgggcctcctgcaagtcgacacatgacctccagtcaccccccaacaaacgggagaagaactgcacccatggggtccaggcacggcctgagcagcgccacagctgccacctggtatgtgacagctctgatgggctgctgctcggcggctgggagcgctacaccgaggtggccaagcgcgggggccagcacaccctgcctgcactgtcccgtgccactgcccccaccgaccccaactacatcatcctggccccgctgaatcctgggagccagctgctccggcctgtgtaccaggaggataccatccccgaagaatcagggagtcccagtaaagggaagtcctacacaggcctggggaagaagtcccggctgatgaagacagtgcagaccatgaagggccacgggaactaccaaaactgcccggttgtgaggccgcatgccacgcactcaagctatggcacctacgtcaccctggcccccaaagtcctggtgttccctgtctttgttcagcctctagatctctgtaatcctgcccggaccctcctgctgtcagaggagctgctgctgtatgaagggaggaacaaggctgccgaggtgacactgtttgcctattcggacctgctgctcttcaccaaggaggacgagcctggccgctgcgacgtcctgaggaaccccctctacctccagagtgtgaagctgcaggaaggttcttcagaagacctgaaattctgcgtgctctatctagcagagaaggcagagtgcttattcactttggaagcgcactcgcaggagcagaagaagagagtgtgctggtgcctgtcggagaacatcgccaagcagcaacagctggcagcatcacccccggacagcaagatgtttgagacggaggcagatgagaagagggagatggccttggaggaagggaaggggcctggtgccgaggattccccacccagcaaggagccctctcctggccaggagcttcctccaggacaagaccttccacccaacaaggactccccttctgggcaggaacccgctcccagccaagaaccactgtccagcaaagactcagctacctctgaaggatcccctccaggcccagatgctccgcccagcaaggatgtgccaccatgccaggaaccccctccagcccaagacctctcaccctgccaggacctacctgctggtcaagaacccctgcctcaccaggaccctctactcaccaaagacctccctgccatccaggaatcccccacccgggaccttccaccctgtcaagatctgcctcctagccaggtctccctgccagccaaggcccttactgaggacaccatgagctccggggacctactagcagctactggggacccacctgcggcccccaggccagccttcgtgatccctgaggtccggctggatagcacctacagccagaaggcaggggcagagcagggctgctcgggagatgaggaggatgcagaagaggccgaggaggtggaggagggggaggaaggggaggaggacgaggatgaggacaccagcgatgacaactacggagagcgcagtgaggccaagcgcagcagcatgatcgagacgggccagggggctgagggtggcctctcactgcgtgtgcagaactcgctgcggcgccggacgcacagcgagggcagcctgctgcaggagccccgagggccctgctttgcctccgacaccaccttgcactgctcagacggtgagggcgccgcctccacctggggcatgccttcgcccagcaccctcaagaaagagctgggccgcaatggtggctccatgcaccacctttccctcttcttcacaggacacaggaagatgagcggggctgacaccgttggggatgatgacgaagcctcccggaagagaaagagcaaaaacctagccaaggacatgaagaacaagctggggatcttcagacggcggaatgagtcccctggagcccctcccgcgggcaaggcagacaaaatgatgaagtcattcaagcccacctcagaggaagccctcaagtggggcgagtccttggagaagctgctggttcacaaatacgggttagcagtgttccaagccttccttcgcactgagttcagtgaggagaatctggagttctggttggcttgtgaggacttcaagaaggtcaagtcacagtccaagatggcatccaaggccaagaagatctttgctgaatacatcgcgatccaggcatgcaaggaggtcaacctggactcctacacgcgggagcacaccaaggacaacctgcagagcgtcacgcggggctgcttcgacctggcacagaagcgcatcttcgggctcatggaaaaggactcgtaccctcgctttctccgttctgacctctacctggaccttattaaccagaagaagatgagtcccccgctttaggggccactggagtcgagctcagcgttcacaccaggcgggctgggtcccctgcccacctgcctccctgccccctgtgacggagggggcaagcaagcccccagaggctgtgtctctggacagacggatagacatacggaagcgaggcctggaccaagagaggcccaggctactggaggagtagaaggatgggccccgtggggtccccactgccccggtacgagggggcccaagaccctggcaggtcaggggccctggccaagccagatctggagctgctgctccctgctgcggagaccgcggaggcttcgcgttgaccaagttccttaaagaactggctgatggggcaggaggtccaggcctgggctctcgggccctcctagagggccattggagcttgcagctcagacccccactttgagttttatttatttaaatagtagttggatgcttggcacgtcgtcctgtaataggaaacccttgcctcatcagttttcctgatttacaagtgcaatattttagccaatgccttgggagaagctgccatgcaaaggtggacaccattctccagcttcaggggatatgctcgtcccgggcaccggtggcaggcagctggccttctggactaaggcagcctggggggacactgcagtctggctacacacagagatctggcaccccctgggtggagtgtccctcgggggctttgggaaagcatggcaccctcagaccacacagtagccaagttctggagcaaataaaaggcctgtgttatttcttgttcttgaccctt

SEQ ID NO: 6263 - protein, 917 aa, Homo sapiens; identical to SEQ ID NO: 640

SEQ ID NO: 6264 - DNA, 2664 bp, Homo sapiens
agggtgctcatgccaggctgacgggtccagtgcgggctcccgctgctgggggagagctgggttttcatggggcggcagccgaggcaggacccgcagccatgaaccgcttcaatgggctctgcaaggtgtgctcggagcgccgctaccgccagatcaccatcccgaggggaaaggacggctttggcttcaccatctgctgcgactctccagttcgagtccaggccgtggattccgggggtccggcggaacgggcagggctgcagcagctggacacggtgctgcagctgaatgagaggcctgtggagcactggaaatgtgtggagctggcccacgagatccggagctgccccagtgagatcatcctactcgtgtggcgcatggtcccccaggtcaagccaggaccagatggcggggtcctgcggcgggcctcctgcaagtcgacacatgacctccagtcaccccccaacaaacgggagaagaactgcacccatggggtccaggcacggcctgagcagcgccacagctgccacctggtatgtgacagctctgatgggctgctgctcggcggctgggagcgctacaccgaggtggccaagcgcgggggccagcacaccctgcctgcactgtcccgtgccactgcccccaccgaccccaactacatcatcctggccccgctgaatcctgggagccagctgctccggcctgtgtaccaggaggataccatccccgaagaatcagggagtcccagtaaagggaagtcctacacaggcctggggaagaagtcccggctgatgaagacagtgcagaccatgaagggccacgggaactaccaaaactgcccggttgtgaggccgcatgccacgcactcaagctatggcacctacgtcaccctggcccccaaagtcctggtgttccctgtctttgttcagcctctagatctctgtaatcctgcccggaccctcctgctgtcagaggagctgctgctgtatgaagggaggaacaaggctgccgaggtgacactgtttgcctattcggacctgctgctcttcaccaaggaggacgagcctggccgctgcgacgtcctgaggaaccccctctacctccagagtgtgaagctgcaggaaggttcttcagaagacctgaaattctgcgtgctctatctagcagagaaggcagagtgcttattcactttggaagcgcactcgcaggagcagaagaagagagtgtgctggtgcctgtcggagaacatcgccaagcagcaacagctggcagcatcacccccggacagcaagatgagcggggctgacaccgttggggatgatgacgaagcctcccggaagagaaagagcaaaaacctagccaaggacatgaagaacaagctggggatcttcagacggcggaatgagtcccctggagcccctcccgcgggcaaggcagacaaaatgatgaagtcattcaagcccacctcagaggaagccctcaagtggggcgagtccttggagaagctgctggttcacaaatacgggttagcagtgttccaagccttccttcgcactgagttcagtgaggagaatctggagttctggttggcttgtgaggacttcaagaaggtcaagtcacagtccaagatggcatccaaggccaagaagatctttgctgaatacatcgcgatccaggcatgcaaggaggtcaacctggactcctacacgcgggagcacaccaaggacaacctgcagagcgtcacgcggggctgcttcgacctggcacagaagcgcatcttcgggctcatggaaaaggactcgtaccctcgctttctccgttctgacctctacctggaccttattaaccagaagaagatgagtcccccgctttaggggccactggagtcgagctcagcgttcacaccaggcgggctgggtcccctgcccacctgcctccctgccccctgtgacggagggggcaagcaagcccccagaggctgtgtctctggacagacggatagacatacggaagcgaggcctggaccaagagaggcccaggctactggaggagtagaaggatgggccccgtggggtccccactgccccggtacgagggggcccaagaccctggcaggtcaggggccctggccaagccagatctggagctgctgctccctgctgcggagaccgcggaggcttcgcgttgaccaagttccttaaagaactggctgatggggcaggaggtccaggcctgggctctcgggccctcctagagggccattggagcttgcagctcagacccccactttgagttttatttatttaaatagtagttggatgcttggcacgtcgtcctgtaataggaaacccttgcctcatcagttttcctgatttacaagtgcaatattttagccaatgccttgggagaagctgccatgcaaaggtggacaccattctccagcttcaggggatatgctcgtcccgggcaccggtggcaggcagctggccttctggactaaggcagcctggggggacactgcagtctggctacacacagagatctggcaccccctgggtggagtgtccctcgggggctttgggaaagcatggcaccctcagaccacacagtagccaagttctggagcaaataaaaggcctgtgttatttcttgttcttgaccctt

SEQ ID NO: 6265 - protein, 591 aa, Homo sapiens
MNRFNGLCKVCSERRYRQITIPRGKDGFGFTICCDSPVRVQAVDSGGPAERAGLQQLDTVLQLNERPVEHWKCVELAHEIRSCPSEIILLVWRMVPQVKPGPDGGVLRRASCKSTHDLQSPPNKREKNCTHGVQARPEQRHSCHLVCDSSDGLLLGGWERYTEVAKRGGQHTLPALSRATAPTDPNYIILAPLNPGSQLLRPVYQEDTIPEESGSPSKGKSYTGLGKKSRLMKTVQTMKGHGNYQNCPVVRPHATHSSYGTYVTLAPKVLVFPVFVQPLDLCNPARTLLLSEELLLYEGRNKAAEVTLFAYSDLLLFTKEDEPGRCDVLRNPLYLQSVKLQEGSSEDLKFCVLYLAEKAECLFTLEAHSQEQKKRVCWCLSENIAKQQQLAASPPDSKMSGADTVGDDDEASRKRKSKNLAKDMKNKLGIFRRRNESPGAPPAGKADKMMKSFKPTSEEALKWGESLEKLLVHKYGLAVFQAFLRTEFSEENLEFWLACEDFKKVKSQSKMASKAKKIFAEYIAIQACKEVNLDSYTREHTKDNLQSVTRGCFDLAQKRIFGLMEKDSYPRFLRSDLYLDLINQKKMSPPL

SEQ ID NO: 6266 - DNA, 677 bp, Homo sapiens
aatgtggtcagtgatcatggtggacagagtgtaattctgcttcctccgagctaggagcacagggcccgccccaggctaacgctctgtgaacctctgtgagaaaggaagaagggagccaggaaaacagtggatcaaagatcaccatcccgaggggaaaggacggctttggcttcaccatctgctgcgactctccagttcgagtccaggccgtggattccgggggtccggcggaacgggcagggctgcagcagctggacacggtgctgcagctgaatgagaggcctgtggagcactggaaatgtgtggagctggcccacgagatccggagctgccccagtgagatcatcctactcgtgtggcgcatggtcccccaggtcaagccaggaccagatggcggggtcctgcggcgggcctcctgcaagtcgacacatgacctccagtcaccccccaacaaacgggagaagaactgcacccatggggtccaggcacggcctgagcagcgccacagctgccacctggtatgtgacagctctgatgggctgctgctcggcggctgggagcgctacaccgaggtggccaagcgcgggggccagcacaccctgcctgcactgtcccgtgccactgcccccaccgaccccaactacatcatcctggccccgctgaatcctgggagccag

SEQ ID NO: 6267 - protein, 129 aa, Homo sapiens; identical to SEQ ID NO: 6261

SEQ ID NO: 6268 - DNA, 2090 bp, Homo sapiens
agtgctcaagttgtctgggctgagatagggacactgaggggctggctagctcctttgtgcctccagttcccttggagaggagggtggctcttggcaggggtgggctgtgggcttcctgaccttggggtagaggcaagagcctccagcttctggcagtgaccgggcagggctgtgtcctagatcaccatcccgaggggaaaggacggctttggcttcaccatctgctgcgactctccagttcgagtccaggccgtggattccgggggtccggcggaacgggcagggctgcagcagctggacacggtgctgcagctgaatgagaggcctgtggagcactggaaatgtgtggagctggcccacgagatccggagctgccccagtgagatcatcctactcgtgtggcgcatggtcccccaggtcaagccaggaccagatggcggggtcctgcggcgggcctcctgcaagtcgacacatgacctccagtcaccccccaacaaacgggagaagaactgcacccatggggtccaggcacggcctgagcagcgccacagctgccacctggtatgtgacagctctgatgggctgctgctcggcggctgggagcgctacaccgaggtggccaagcgcgggggccagcacaccctgcctgcactgtcccgtgccactgcccccaccgaccccaactacatcatcctggccccgctgaatcctgggagccagctgctccggcctgtgtaccaggaggataccatccccgaagaatcagggagtcccagtaaagggaagtcctacacaggcctggggaagaagtcccggctgatgaagacagtgcagaccatgaagggccacgggaactaccaaaactgcccggttgtgaggccgcatgccacgcactcaagctatggcacctacgtcaccctggcccccaaagtcctggtgttccctgtctttgttcagcctctagatctctgtaatcctgcccggaccctcctgctgtcagaggagctgctgctgtatgaagggaggaacaaggctgccgaggtgacactgtttgcctattcggacctgctgctcttcaccaaggaggacgagcctggccgctgcgacgtcctgaggaaccccctctacctccagagtgtgaagctgcaggaaggttcttcagaagacctgaaattctgcgtgctctatctagcagagaaggcagagtgcttattcactttggaagcgcactcgcaggagcagaagaagagagtgtgctggtgcctgtcggagaacatcgccaagcagcaacagctggcagcatcacccccggacagcaagaaactccaccctttcggctctctccagcaggagatggggccggtcaactcaaccaatgccacccaggatagaagctttacctcaccaggacagactctgattggctgagcaaacccaagggcgggactctgcttctggcaacttaaccctttcttgggcatcccctaccacacagtaacctcacctcaactggacctgaaacagaggaccaagatggtgggtctagggtcatctgaagggagtggtcccaagggtgcatgtggatgtcaacagaaggaccacaatggtgtgagaggccttgtgggcatgcagagactggcagcagaaagtcccaagaggagaggactcagaggcttcttccttccaaggaggaggaggaggaggacattccacatctgggcttccagtggtggctcccggacctgccttgggggcagcaggagaggttgggagaggtcaccctgatgaagaacaatgccatgatctgctgctgccagaggacatctccgcccatccactcattttccacctgtacacattggctcattcattcgatggatatttcgggtgcatctactttatgccaggctctatgctaggagctggggatactgtggagaaaaagtcggatatggtctcgctctcatcaagatttcagtctagctgggagtgagcgttaaataagtcaataccaacacacacacgtgcacacacgtgatggcaagctgtgatcatctatgaaagaaaaaacacagatttctttaagaggg

SEQ ID NO: 6269 - protein, 340 aa, Homo sapiens
MVPQVKPGPDGGVLRRASCKSTHDLQSPPNKREKNCTHGVQARPEQRHSCHLVCDSSDGLLLGGWERYTEVAKRGGQHTLPALSRATAPTDPNYIILAPLNPGSQLLRPVYQEDTIPEESGSPSKGKSYTGLGKKSRLMKTVQTMKGHGNYQNCPVVRPHATHSSYGTYVTLAPKVLVFPVFVQPLDLCNPARTLLLSEELLLYEGRNKAAEVTLFAYSDLLLFTKEDEPGRCDVLRNPLYLQSVKLQEGSSEDLKFCVLYLAEKAECLFTLEAHSQEQKKRVCWCLSENIAKQQQLAASPPDSKKLHPFGSLQQEMGPVNSTNATQDRSFTSPGQTLIG

SEQ ID NO: 6270 - DNA, 1101 bp, Homo sapiens
cccttgcagctgctccggcctgtgtaccaggaggataccatccccgaagcctctagatctctgtaatcctgcccggaccctcctgctgtcagaggagctgctgctgtatgaagggaggaacaaggctgccgaggtgacactgtttgcctattcggacctgctgctcttcaccaaggaggacgagcctggccgctgcgacgtcctgaggaaccccctctacctccagagtgtgaagctgcaggaaggttcttcagaagacctgaaattctgcgtgctctatctagcagagaaggcagagtgcttattcactttggaagcgcactcgcaggacttcctccaggacaagaccttccacccaacaaggactccccttctgggcaggaacccgctcccagccaagaaccactgtccagcaaagactcagctacctctgaaggatcccctccaggcccagatgctccgcccagcaaggatgtgccaccatgccaggaaccccctccagcccaagacctctcaccctgccaggacctacctgctggtcaagaacccctgcctcaccaggaccctctactcaccaaagacctccctgccatccaggaatcccccacccgggaccttccaccctgtcaagatctgcctcctagccaggtctccctgccagccaaggcccttactgaggacaccatgagctccggggacctactagcagctactggggacccacctgcggcccccaggccagccttcgtgatccctgaggtccggctggatagcacctacagccagaaggcaggggcagagcagggctgctcgggagatgaggaggatgcagaagaggccgaggaggtggaggagggggaggaaggggaggaggacgaggatgaggacaccagcgatgacaactacggagagcgcagtgaggccaagcgcagcagcatgatcgagacgggccagggggctgagggtggcctctcactgcgtgtgcagaactcgctgcggcgccggacgcacagcgagggcagcctgctgcaggagccccgagggccctgctttgcctccgacaccaccttgcactgctcagacggtgagggcgccgcctcc

SEQ ID NO: 6271 - protein, 138 aa, Homo sapiens
MSSGDLLAATGDPPAAPRPAFVIPEVRLDSTYSQKAGAEQGCSGDEEDAEEAEEVEEGEEGEEDEDEDTSDDNYGERSEAKRSSMIETGQGAEGGLSLRVQNSLRRRTHSEGSLLQEPRGPCFASDTTLHCSDGEGAA

SEQ ID NO: 6272 - DNA, 1399 bp, Homo sapiens
ggggaagaagtcccggctgatgaagacagtgcagaccatgaagggccacgggaactaccaaaactgcccggttgtgaggccgcatgccacgcactcaagctatggcacctacgtcaccctggcccccaaagtcctggtgttccctgtctttgttcagcctctagatctctgtaatcctgcccggaccctcctgctgtcagaggagctgctgctgtatgaagggaggaacaaggctgccgaggtgacactgtttgcctattcggacctgctgctcttcaccaaggaggacgagcctggccgctgcgacgtcctgaggaaccccctctacctccagagtgtgaagctgcaggaaggttcttcagaagacctgaaattctgcgtgctctatctagcagagaaggcagagtgcttattcactttggaagcgcactcgcaggagcagaagaagagagtgtgctggtgcctgtcggagaacatcgccaagcagcaacagctggcagcatcacccccggacagcaagatgtttgagacggaggcagatgagaagagggagatggccttggaggaagggaaggggcctggtgccgaggattccccacccagcaaggagccctctcctggccaggagcttcctccaggacaagaccttccacccaacaaggactccccttctgggcaggaacccgctcccagccaagaaccactgtccagcaaagactcagctacctctgaaggatcccctccaggcccagatgctccgcccagcaaggatgtgccaccatgccaggaaccccctccagcccaagacctctcaccctgccaggacctacctgctggtcaagaacccctgcctcaccaggaccctctactcaccaaagacctccctgccatccaggaatcccccacccgggaccttccaccctgtcaagatctgcctcctagccaggtctccctgccagccaaggcccttactgaggacaccatgagctccggggacctactagcagctactggggacccacctgcggcccccaggccagccttcgtgatccctgaggtccggctggatagcacctacagccagaaggcaggggcagagcagggctgctcgggagatgaggaggatgcagaagaggccgaggaggtggaggagggggaggaaggggaggaggacgaggatgaggacaccagcgatgacaactacggagagcgcagtgaggccaagcgcagcagcatgatcgagacgggccagggggctgagggtggcctctcactgcgtgtgcagaactcgctgcggcgccggacgcacagcgagggcagcctgctgcaggagccccgagggccctgctttgcctccgacaccaccttgcactgctcagacggtgagggcgccgcctcc

SEQ ID NO: 6273 - protein, 459 aa, Homo sapiens
MKTVQTMKGHGNYQNCPVVRPHATHSSYGTYVTLAPKVLVFPVFVQPLDLCNPARTLLLSEELLLYEGRNKAAEVTLFAYSDLLLFTKEDEPGRCDVLRNPLYLQSVKLQEGSSEDLKFCVLYLAEKAECLFTLEAHSQEQKKRVCWCLSENIAKQQQLAASPPDSKMFETEADEKREMALEEGKGPGAEDSPPSKEPSPGQELPPGQDLPPNKDSPSGQEPAPSQEPLSSKDSATSEGSPPGPDAPPSKDVPPCQEPPPAQDLSPCQDLPAGQEPLPHQDPLLTKDLPAIQESPTRDLPPCQDLPPSQVSLPAKALTEDTMSSGDLLAATGDPPAAPRPAFVIPEVRLDSTYSQKAGAEQGCSGDEEDAEEAEEVEEGEEGEEDEDEDTSDDNYGERSEAKRSSMIETGQGAEGGLSLRVQNSLRRRTHSEGSLLQEPRGPCFASDTTLHCSDGEGAA

SEQ ID NO: 6274 - DNA, 1279 bp, Homo sapiens
gtggttagacttcctgtcaatgagtgtagctctcacgcctctagatctctgtaatcctgcccggaccctcctgctgtcagaggagctgctgctgtatgaagggaggaacaaggctgccgaggtgacactgtttgcctattcggacctgctgctcttcaccaaggaggacgagcctggccgctgcgacgtcctgaggaaccccctctacctccagagtgtgaagctgcaggaaggttcttcagaagacctgaaattctgcgtgctctatctagcagagaaggcagagtgcttattcactttggaagcgcactcgcaggagcagaagaagagagtgtgctggtgcctgtcggagaacatcgccaagcagcaacagctggcagcatcacccccggacagcaagatgtttgagacggaggcagatgagaagagggagatggccttggaggaagggaaggggcctggtgccgaggattccccacccagcaaggagccctctcctggccaggagcttcctccaggacaagaccttccacccaacaaggactccccttctgggcaggaacccgctcccagccaagaaccactgtccagcaaagactcagctacctctgaaggatcccctccaggcccagatgctccgcccagcaaggatgtgccaccatgccaggaaccccctccagcccaagacctctcaccctgccaggacctacctgctggtcaagaacccctgcctcaccaggaccctctactcaccaaagacctccctgccatccaggaatcccccacccgggaccttccaccctgtcaagatctgcctcctagccaggtctccctgccagccaaggcccttactgaggacaccatgagctccggggacctactagcagctactggggacccacctgcggcccccaggccagccttcgtgatccctgaggtccggctggatagcacctacagccagaaggcaggggcagagcagggctgctcgggagatgaggaggatgcagaagaggccgaggaggtggaggagggggaggaaggggaggaggacgaggatgaggacaccagcgatgacaactacggagagcgcagtgaggccaagcgcagcagcatgatcgagacgggccagggggctgagggtggcctctcactgcgtgtgcagaactcgctgcggcgccggacgcacagcgagggcagcctgctgcaggagccccgagggccctgctttgcctccgacaccaccttgcactgctcagacggtgagggcgccgcctcc

SEQ ID NO: 6275 - protein, 419 aa, Homo sapiens
MSVALTPLDLCNPARTLLLSEELLLYEGRNKAAEVTLFAYSDLLLFTKEDEPGRCDVLRNPLYLQSVKLQEGSSEDLKFCVLYLAEKAECLFTLEAHSQEQKKRVCWCLSENIAKQQQLAASPPDSKMFETEADEKREMALEEGKGPGAEDSPPSKEPSPGQELPPGQDLPPNKDSPSGQEPAPSQEPLSSKDSATSEGSPPGPDAPPSKDVPPCQEPPPAQDLSPCQDLPAGQEPLPHQDPLLTKDLPAIQESPTRDLPPCQDLPPSQVSLPAKALTEDTMSSGDLLAATGDPPAAPRPAFVIPEVRLDSTYSQKAGAEQGCSGDEEDAEEAEEVEEGEEGEEDEDEDTSDDNYGERSEAKRSSMIETGQGAEGGLSLRVQNSLRRRTHSEGSLLQEPRGPCFASDTTLHCSDGEGAA

SEQ ID NO: 6276 - DNA, 1243 bp, Homo sapiens
aaacttatccacaaggaatttgataatattagctcacattgtgtggcgctttactaggtctgcaaaaagctcttggaaggatcctgtgacactgtttgcctattcggacctgctgctcttcaccaaggaggacgagcctggccgctgcgacgtcctgaggaaccccctctacctccagagtgtgaagctgcaggaaggttcttcagaagacctgaaattctgcgtgctctatctagcagagaaggcagagtgcttattcactttggaagcgcactcgcaggagcagaagaagagagtgtgctggtgcctgtcggagaacatcgccaagcagcaacagctggcagcatcacccccggacagcaagatgtttgagacggaggcagatgagaagagggagatggccttggaggaagggaaggggcctggtgccgaggattccccacccagcaaggagccctctcctggccaggagcttcctccaggacaagaccttccacccaacaaggactccccttctgggcaggaacccgctcccagccaagaaccactgtccagcaaagactcagctacctctgaaggatcccctccaggcccagatgctccgcccagcaaggatgtgccaccatgccaggaaccccctccagcccaagacctctcaccctgccaggacctacctgctggtcaagaacccctgcctcaccaggaccctctactcaccaaagacctccctgccatccaggaatcccccacccgggaccttccaccctgtcaagatctgcctcctagccaggtctccctgccagccaaggcccttactgaggacaccatgagctccggggacctactagcagctactggggacccacctgcggcccccaggccagccttcgtgatccctgaggtccggctggatagcacctacagccagaaggcaggggcagagcagggctgctcgggagatgaggaggatgcagaagaggccgaggaggtggaggagggggaggaaggggaggaggacgaggatgaggacaccagcgatgacaactacggagagcgcagtgaggccaagcgcagcagcatgatcgagacgggccagggggctgagggtggcctctcactgcgtgtgcagaactcgctgcggcgccggacgcacagcgagggcagcctgctgcaggagccccgagggccctgctttgcctccgacaccaccttgcactgctcagacggtgagggcgccgcctcc

SEQ ID NO: 6277 - protein, 292 aa, Homo sapiens
MFETEADEKREMALEEGKGPGAEDSPPSKEPSPGQELPPGQDLPPNKDSPSGQEPAPSQEPLSSKDSATSEGSPPGPDAPPSKDVPPCQEPPPAQDLSPCQDLPAGQEPLPHQDPLLTKDLPAIQESPTRDLPPCQDLPPSQVSLPAKALTEDTMSSGDLLAATGDPPAAPRPAFVIPEVRLDSTYSQKAGAEQGCSGDEEDAEEAEEVEEGEEGEEDEDEDTSDDNYGERSEAKRSSMIETGQGAEGGLSLRVQNSLRRRTHSEGSLLQEPRGPCFASDTTLHCSDGEGAA

SEQ ID NO: 6278 - DNA, 1336 bp, Homo sapiens
agtgctctttcagccagacacttagagcagaataaaagcaaatatggaaaatcttacagcttaaggattgctccaagccccaggtgctgggctggaggctccaggagcatttggtcagagatgtaggcttcggggatcaggctgtggagaggcttgcagagaccagctgccatggagggtgacactgtttgcctattcggacctgctgctcttcaccaaggaggacgagcctggccgctgcgacgtcctgaggaaccccctctacctccagagtgtgaagctgcaggaaggttcttcagaagacctgaaattctgcgtgctctatctagcagagaaggcagagtgcttattcactttggaagcgcactcgcaggagcagaagaagagagtgtgctggtgcctgtcggagaacatcgccaagcagcaacagctggcagcatcacccccggacagcaagatgtttgagacggaggcagatgagaagagggagatggccttggaggaagggaaggggcctggtgccgaggattccccacccagcaaggagccctctcctggccaggagcttcctccaggacaagaccttccacccaacaaggactccccttctgggcaggaacccgctcccagccaagaaccactgtccagcaaagactcagctacctctgaaggatcccctccaggcccagatgctccgcccagcaaggatgtgccaccatgccaggaaccccctccagcccaagacctctcaccctgccaggacctacctgctggtcaagaacccctgcctcaccaggaccctctactcaccaaagacctccctgccatccaggaatcccccacccgggaccttccaccctgtcaagatctgcctcctagccaggtctccctgccagccaaggcccttactgaggacaccatgagctccggggacctactagcagctactggggacccacctgcggcccccaggccagccttcgtgatccctgaggtccggctggatagcacctacagccagaaggcaggggcagagcagggctgctcgggagatgaggaggatgcagaagaggccgaggaggtggaggagggggaggaaggggaggaggacgaggatgaggacaccagcgatgacaactacggagagcgcagtgaggccaagcgcagcagcatgatcgagacgggccagggggctgagggtggcctctcactgcgtgtgcagaactcgctgcggcgccggacgcacagcgagggcagcctgctgcaggagccccgagggccctgctttgcctccgacaccaccttgcactgctcagacggtgagggcgccgcctcc

SEQ ID NO: 6279 - protein, 292 aa, Homo sapiens; identical to SEQ ID NO: 6277

SEQ ID NO: 6280 - DNA, 1321 bp, Homo sapiens
gtgctgcctgcccctgggggtgacctcatcggctctgtcctgctctccacaggcctctgctgtgttgggagccactgccttcctcccctcccccaacctgtgggcccacagctcgccagctggcccttgaacccacttccctgcgcctctggctgcctcaatgtcactggggattagtgtgcatttgcggcttttggcggacactcccctcctggctgcagcctcaccctctggagcccagggatgggcttgggcctgggagccccctgaaccagggagcagccctgaccgtccgtttctctattttccctgacgtcagaaggcagagtgcttattcactttggaagcgcactcgcaggagcagaagaagagagtgtgctggtgcctgtcggagaacatcgccaagcagcaacagctggcagcatcacccccggacagcaagatgtttgagacggaggcagatgagaagagggagatggccttggaggaagggaaggggcctggtgccgaggattccccacccagcaaggagccctctcctggccaggagcttcctccaggacaagaccttccacccaacaaggactccccttctgggcaggaacccgctcccagccaagaaccactgtccagcaaagactcagctacctctgaaggatcccctccaggcccagatgctccgcccagcaaggatgtgccaccatgccaggaaccccctccagcccaagacctctcaccctgccaggacctacctgctggtcaagaacccctgcctcaccaggaccctctactcaccaaagacctccctgccatccaggaatcccccacccgggaccttccaccctgtcaagatctgcctcctagccaggtctccctgccagccaaggcccttactgaggacaccatgagctccggggacctactagcagctactggggacccacctgcggcccccaggccagccttcgtgatccctgaggtccggctggatagcacctacagccagaaggcaggggcagagcagggctgctcgggagatgaggaggatgcagaagaggccgaggaggtggaggagggggaggaaggggaggaggacgaggatgaggacaccagcgatgacaactacggagagcgcagtgaggccaagcgcagcagcatgatcgagacgggccagggggctgagggtggcctctcactgcgtgtgcagaactcgctgcggcgccggacgcacagcgagggcagcctgctgcaggagccccgagggccctgctttgcctccgacaccaccttgcactgctcagacggtgagggcgccgcctcc

SEQ ID NO: 6281 - protein, 292 aa, Homo sapiens; identical to SEQ ID NO: 6277

SEQ ID NO: 6282 - DNA, 1185 bp, Homo sapiens
atcggctctgtcctgctctccacaggcctctgctgtgttgggagccactgccttcctcccctcccccaacctgtgggcccacagctcgccagctggcccttgaacccacttccctgcgcctctggctgcctcaatgtcactggggattagtgtgcatttgcggcttttggcggacactcccctcctggctgcagcctcaccctctggagcccagggatgggcttgggcctgggagccccctgaaccagggagcagccctgaccgtccgtttctctattttccctgacgtcagaaggcagagtgcttattcactttggaagcgcactcgcaggagcagaagaagagagtgtgctggtgcctgtcggagaacatcgccaagcagcaacagctggcagcatcacccccggacagcaagaaactccaccctttcggctctctccagcaggagatggggccggtcaactcaaccaatgccacccaggatagaagctttacctcaccaggacagactctgattggctgagcaaacccaagggcgggactctgcttctggcaacttaaccctttcttgggcatcccctaccacacagtaacctcacctcaactggacctgaaacagaggaccaagatggtgggtctagggtcatctgaagggagtggtcccaagggtgcatgtggatgtcaacagaaggaccacaatggtgtgagaggccttgtgggcatgcagagactggcagcagaaagtcccaagaggagaggactcagaggcttcttccttccaaggaggaggaggaggaggacattccacatctgggcttccagtggtggctcccggacctgccttgggggcagcaggagaggttgggagaggtcaccctgatgaagaacaatgccatgatctgctgctgccagaggacatctccgcccatccactcattttccacctgtacacattggctcattcattcgatggatatttcgggtgcatctactttatgccaggctctatgctaggagctggggatactgtggagaaaaagtcggatatggtctcgctctcatcaagatttcagtctagctgggagtgagcgttaaataagtcaataccaacacacacacgtgcacacacgtgatggcaagctgtgatcatctatgaaagaaaaaacacagatttctttaagaggg

SEQ ID NO: 6283 - protein, 113 aa, Homo sapiens
MWMSTEGPQWCERPCGHAETGSRKSQEERTQRLLPSKEEEEEDIPHLGFQWWLPDLPWGQQERLGEVTLMKNNAMICCCQRTSPPIHSFSTCTHWLIHSMDISGASTLCQALC

SEQ ID NO: 6284 - DNA, 1400 bp, Homo sapiens
atcggctctgtcctgctctccacaggcctctgctgtgttgggagccactgccttcctcccctcccccaacctgtgggcccacagctcgccagctggcccttgaacccacttccctgcgcctctggctgcctcaatgtcactggggattagtgtgcatttgcggcttttggcggacactcccctcctggctgcagcctcaccctctggagcccagggatgggcttgggcctgggagccccctgaaccagggagcagccctgaccgtccgtttctctattttccctgacgtcagaaggcagagtgcttattcactttggaagcgcactcgcaggagcagaagaagagagtgtgctggtgcctgtcggagaacatcgccaagcagcaacagctggcagcatcacccccggacagcaagaaactccaccctttcggctctctccagcaggagatggggccggtcaactcaaccaatgccacccaggatagaagctttacctcaccaggacagactctgattggctgagcaaacccaagggcgggactctgcttctggcaacttaaccctttcttgggcatcccctaccacacagtaacctcacctcaactggacctgaaacagaggaccaagatggtgggtctagggtcatctgaagggagtggtcccaagggtgcatgtggatgtcaacagaaggaccacaatggtgtgagaggccttgtgggcatgcagagactggcagcagaaagtcccaagaggagaggactcagaggcttcttccttccaaggaggaggaggaggaggacattccacatctgggcttccagtggtggctcccggacctgccttgggggcagcaggagaggttgggagaggtcaccctgatgaagaacaatgccatgatctgctgctgccagaggacatctccgcccatccactcattttccacctgtacacattggctcattcattcgatggatatttcgggtgcatctactttatgccaggctctatgctaggagctggggatactgtggagaaaaagtcggatatggtctcgctctcatcaagatttcagtctagctgggagtgagcgttaaataagtcaataccaacacacacacgtgcacacacgtgatggcaagctgtgatcatctatgaaagaaaaaacacagatttctttaagagggaattgtacttagagtgctgtgtgtgggggtggggatggggaaggacataacttttaaaccgagacttgtgggctggagaggaaggagccagtcctggacttggggaagagtgttcgcggtggatggaatagcacgtggagagtccctgagatgggaaggagctcagtgggctggaggaatggcgagcaggccagtgtggctggagcttagtgagg

SEQ ID NO: 6285 - protein, 113 aa, Homo sapiens; identical to SEQ ID NO: 6283

SEQ ID NO: 6286 - DNA, 2765 bp, Homo sapiens
atcggctctgtcctgctctccacaggcctctgctgtgttgggagccactgccttcctcccctcccccaacctgtgggcccacagctcgccagctggcccttgaacccacttccctgcgcctctggctgcctcaatgtcactggggattagtgtgcatttgcggcttttggcggacactcccctcctggctgcagcctcaccctctggagcccagggatgggcttgggcctgggagccccctgaaccagggagcagccctgaccgtccgtttctctattttccctgacgtcagaaggcagagtgcttattcactttggaagcgcactcgcaggagcagaagaagagagtgtgctggtgcctgtcggagaacatcgccaagcagcaacagctggcagcatcacccccggacagcaagatgtttgagacggaggcagatgagaagagggagatggccttggaggaagggaaggggcctggtgccgaggattccccacccagcaaggagccctctcctggccaggagcttcctccaggacaagaccttccacccaacaaggactccccttctgggcaggaacccgctcccagccaagaaccactgtccagcaaagactcagctacctctgaaggatcccctccaggcccagatgctccgcccagcaaggatgtgccaccatgccaggaaccccctccagcccaagacctctcaccctgccaggacctacctgctggtcaagaacccctgcctcaccaggaccctctactcaccaaagacctccctgccatccaggaatcccccacccgggaccttccaccctgtcaagatctgcctcctagccaggtctccctgccagccaaggcccttactgaggacaccatgagctccggggacctactagcagctactggggacccacctgcggcccccaggccagccttcgtgatccctgaggtccggctggatagcacctacagccagaaggcaggggcagagcagggctgctcgggagatgaggaggatgcagaagaggccgaggaggtggaggagggggaggaaggggaggaggacgaggatgaggacaccagcgatgacaactacggagagcgcagtgaggccaagcgcagcagcatgatcgagacgggccagggggctgagggtggcctctcactgcgtgtgcagaactcgctgcggcgccggacgcacagcgagggcagcctgctgcaggagccccgagggccctgctttgcctccgacaccaccttgcactgctcagacggtgagggcgccgcctccacctggggcatgccttcgcccagcaccctcaagaaagagctgggccgcaatggtggctccatgcaccacctttccctcttcttcacaggacacaggaagatgagcggggctgacaccgttggggatgatgacgaagcctcccggaagagaaagagcaaaaacctagccaaggacatgaagaacaagctggggatcttcagacggcggaatgagtcccctggagcccctcccgcgggcaaggcagacaaaatgatgaagtcattcaagcccacctcagaggaagccctcaagtggggcgagtccttggagaagctgctggttcacaaatacgggttagcagtgttccaagccttccttcgcactgagttcagtgaggagaatctggagttctggttggcttgtgaggacttcaagaaggtcaagtcacagtccaagatggcatccaaggccaagaagatctttgctgaatacatcgcgatccaggcatgcaaggaggtcaacctggactcctacacgcgggagcacaccaaggacaacctgcagagcgtcacgcggggctgcttcgacctggcacagaagcgcatcttcgggctcatggaaaaggactcgtaccctcgctttctccgttctgacctctacctggaccttattaaccagaagaagatgagtcccccgctttaggggccactggagtcgagctcagcgttcacaccaggcgggctgggtcccctgcccacctgcctccctgccccctgtgacggagggggcaagcaagcccccagaggctgtgtctctggacagacggatagacatacggaagcgaggcctggaccaagagaggcccaggctactggaggagtagaaggatgggccccgtggggtccccactgccccggtacgagggggcccaagaccctggcaggtcaggggccctggccaagccagatctggagctgctgctccctgctgcggagaccgcggaggcttcgcgttgaccaagttccttaaagaactggctgatggggcaggaggtccaggcctgggctctcgggccctcctagagggccattggagcttgcagctcagacccccactttgagttttatttatttaaatagtagttggatgcttggcacgtcgtcctgtaataggaaacccttgcctcatcagttttcctgatttacaagtgcaatattttagccaatgccttgggagaagctgccatgcaaaggtggacaccattctccagcttcaggggatatgctcgtcccgggcaccggtggcaggcagctggccttctggactaaggcagcctggggggacactgcagtctggctacacacagagatctggcaccccctgggtggagtgtccctcgggggctttgggaaagcatggcaccctcagaccacacagtagccaagttctggagcaaataaaaggcctgtgttatttcttgttcttgaccctt

SEQ ID NO: 6287 - protein, 519 aa, Homo sapiens; identical to SEQ ID NO: 638

SEQ ID NO: 6288 - DNA, 854 bp, Homo sapiens
ttccacataggattctgcagagtttagcattcaaagattcagctgtgtgctgggaagggactgaagctgccaccccccaccctgggggcagtcgcattctggaagtcagcgtgtgctggctgcaggagcctgggttcagttgcagcctcccactgggacaggaacagcgtcggggtgggggtgtgacagggaagcctcggtgcctcggtgattggcttggtcttgcagggagcggctgccagcaggccggctggaggcggctttgcgctgccccagcctgggagccctcaggatgtgtgtggggtggagcctgctagggatcccagtgccagggggtgccgttgtgagggatggacgcctctcccccggagcagcactttggggccagcttgggccctggggatgagccacaggggacccacagcctatgcgtgtgagcatgtaacccgggagccagctgggcccctcgcggggtgggcagaaggacgggctggcccaggaccctcttctttgagacatcccggactccatctcggatgaaagtgctttgagaaaccacagagttttctgtttaatggaagaaagaaatccagcctctctccagagtggcggtggccggctagacagggctgtggctcttacccgtgccgagctttcacatccgctcacatctgtgctcccagatgccagcgtgacccctgacacgtgtgtgcagcagcctgcagctgccccaagccatggctgaacactgactcccagctgtggggcttcaccattacagactccccagggcttcaaagacttctcagcttcgagcatggcttttggctgtcagggcagctgtacaatagtgg

SEQ ID NO: 6289 - protein, 56 aa, Homo sapiens
MEERNPASLQSGGGRLDRAVALTRAELSHPLTSVLPDASVTPDTCVQQPAAAPSHG

SEQ ID NO: 6290 - DNA, 1507 bp, Homo sapiens
ttccacataggattctgcagagtttagcattcaaagattcagctgtgtgctgggaagggactgaagctgccaccccccaccctgggggcagtcgcattctggaagtcagcgtgtgctggctgcaggagcctgggttcagttgcagcctcccactgggacaggaacagcgtcggggtgggggtgtgacagggaagcctcggtgcctcggtgattggcttggtcttgcagggagcggctgccagcaggccggctggaggcggctttgcgctgccccagcctgggagccctcaggatgtgtgtggggtggagcctgctagggatcccagtgccagggggtgccgttgtgagggatggacgcctctcccccggagcagcactttggggccagcttgggccctggggatgagccacaggggacccacagcctatgcgtgtgagcatgtaacccgggagccagctgggcccctcgcggggtgggcagaaggacgggctggcccaggaccctcttctttgagacatcccggactccatctcggatgaaagtgctttgagaaaccacagagttttctgtttaatggaagaaagaaatccagcctctctccagagtggcggtggccggctagacaggatgtttgagacggaggcagatgagaagagggagatggccttggaggaagggaaggggcctggtgccgaggattccccacccagcaaggagccctctcctggccaggagcttcctccaggacaagaccttccacccaacaaggactccccttctgggcaggaacccgctcccagccaagaaccactgtccagcaaagactcagctacctctgaaggatcccctccaggcccagatgctccgcccagcaaggatgtgccaccatgccaggaaccccctccagcccaagacctctcaccctgccaggacctacctgctggtcaagaacccctgcctcaccaggaccctctactcaccaaagacctccctgccatccaggaatcccccacccgggaccttccaccctgtcaagatctgcctcctagccaggtctccctgccagccaaggcccttactgaggacaccatgagctccggggacctactagcagctactggggacccacctgcggcccccaggccagccttcgtgatccctgaggtccggctggatagcacctacagccagaaggcaggggcagagcagggctgctcgggagatgaggaggatgcagaagaggccgaggaggtggaggagggggaggaaggggaggaggacgaggatgaggacaccagcgatgacaactacggagagcgcagtgaggccaagcgcagcagcatgatcgagacgggccagggggctgagggtggcctctcactgcgtgtgcagaactcgctgcggcgccggacgcacagcgagggcagcctgctgcaggagccccgagggccctgctttgcctccgacaccaccttgcactgctcagacggtgagggcgccgcctcc

SEQ ID NO: 6291 - protein, 310 aa, Homo sapiens
MEERNPASLQSGGGRLDRMFETEADEKREMALEEGKGPGAEDSPPSKEPSPGQELPPGQDLPPNKDSPSGQEPAPSQEPLSSKDSATSEGSPPGPDAPPSKDVPPCQEPPPAQDLSPCQDLPAGQEPLPHQDPLLTKDLPAIQESPTRDLPPCQDLPPSQVSLPAKALTEDTMSSGDLLAATGDPPAAPRPAFVIPEVRLDSTYSQKAGAEQGCSGDEEDAEEAEEVEEGEEGEEDEDEDTSDDNYGERSEAKRSSMIETGQGAEGGLSLRVQNSLRRRTHSEGSLLQEPRGPCFASDTTLHCSDGEGAA

SEQ ID NO: 6292 - DNA, 1720 bp, Homo sapiens
ttccacataggattctgcagagtttagcattcaaagattcagctgtgtgctgggaagggactgaagctgccaccccccaccctgggggcagtcgcattctggaagtcagcgtgtgctggctgcaggagcctgggttcagttgcagcctcccactgggacaggaacagcgtcggggtgggggtgtgacagggaagcctcggtgcctcggtgattggcttggtcttgcagggagcggctgccagcaggccggctggaggcggctttgcgctgccccagcctgggagccctcaggatgtgtgtggggtggagcctgctagggatcccagtgccagggggtgccgttgtgagggatggacgcctctcccccggagcagcactttggggccagcttgggccctggggatgagccacaggggacccacagcctatgcgtgtgagcatgtaacccgggagccagctgggcccctcgcggggtgggcagaaggacgggctggcccaggaccctcttctttgagacatcccggactccatctcggatgaaagtgctttgagaaaccacagagttttctgtttaatggaagaaagaaatccagcctctctccagagtggcggtggccggctagacagggtatcgctcccctggggaacttgggtaagtccataaatagctctgctgacacaaaggagctctgtctggggaaggcagccgcttgacacggccgccaggagctgccacagccacggccgcccgcctgcgggaggagccgggtggaaacctgggcgggcgagctggcaggagcggcagccaggagtcgcctgggtccctgctggagtatgctggatgtttgagacggaggcagatgagaagagggagatggccttggaggaagggaaggggcctggtgccgaggattccccacccagcaaggagccctctcctggccaggagcttcctccaggacaagaccttccacccaacaaggactccccttctgggcaggaacccgctcccagccaagaaccactgtccagcaaagactcagctacctctgaaggatcccctccaggcccagatgctccgcccagcaaggatgtgccaccatgccaggaaccccctccagcccaagacctctcaccctgccaggacctacctgctggtcaagaacccctgcctcaccaggaccctctactcaccaaagacctccctgccatccaggaatcccccacccgggaccttccaccctgtcaagatctgcctcctagccaggtctccctgccagccaaggcccttactgaggacaccatgagctccggggacctactagcagctactggggacccacctgcggcccccaggccagccttcgtgatccctgaggtccggctggatagcacctacagccagaaggcaggggcagagcagggctgctcgggagatgaggaggatgcagaagaggccgaggaggtggaggagggggaggaaggggaggaggacgaggatgaggacaccagcgatgacaactacggagagcgcagtgaggccaagcgcagcagcatgatcgagacgggccagggggctgagggtggcctctcactgcgtgtgcagaactcgctgcggcgccggacgcacagcgagggcagcctgctgcaggagccccgagggccctgctttgcctccgacaccaccttgcactgctcagacggtgagggcgccgcctcc

SEQ ID NO: 6293 - protein, 292 aa, Homo sapiens; identical to SEQ ID NO: 6277

SEQ ID NO: 6294 - DNA, 1935 bp, Homo sapiens
ttccacataggattctgcagagtttagcattcaaagattcagctgtgtgctgggaagggactgaagctgccaccccccaccctgggggcagtcgcattctggaagtcagcgtgtgctggctgcaggagcctgggttcagttgcagcctcccactgggacaggaacagcgtcggggtgggggtgtgacagggaagcctcggtgcctcggtgattggcttggtcttgcagggagcggctgccagcaggccggctggaggcggctttgcgctgccccagcctgggagccctcaggatgtgtgtggggtggagcctgctagggatcccagtgccagggggtgccgttgtgagggatggacgcctctcccccggagcagcactttggggccagcttgggccctggggatgagccacaggggacccacagcctatgcgtgtgagcatgtaacccgggagccagctgggcccctcgcggggtgggcagaaggacgggctggcccaggaccctcttctttgagacatcccggactccatctcggatgaaagtgctttgagaaaccacagagttttctgtttaatggaagaaagaaatccagcctctctccagagtggcggtggccggctagacaggagccaaggacatgaagaacaagctggggatcttcagacggcggaatgagtcccctggagcccctcccgcgggcaaggcagacaaaatgatgaagtcattcaagcccacctcagaggaagccctcaagtggggcgagtccttggagaagctgctggttcacaaatacgggttagcagtgttccaagccttccttcgcactgagttcagtgaggagaatctggagttctggttggcttgtgaggacttcaagaaggtcaagtcacagtccaagatggcatccaaggccaagaagatctttgctgaatacatcgcgatccaggcatgcaaggaggtcaacctggactcctacacgcgggagcacaccaaggacaacctgcagagcgtcacgcggggctgcttcgacctggcacagaagcgcatcttcgggctcatggaaaaggactcgtaccctcgctttctccgttctgacctctacctggaccttattaaccagaagaagatgagtcccccgctttaggggccactggagtcgagctcagcgttcacaccaggcgggctgggtcccctgcccacctgcctccctgccccctgtgacggagggggcaagcaagcccccagaggctgtgtctctggacagacggatagacatacggaagcgaggcctggaccaagagaggcccaggctactggaggagtagaaggatgggccccgtggggtccccactgccccggtacgagggggcccaagaccctggcaggtcaggggccctggccaagccagatctggagctgctgctccctgctgcggagaccgcggaggcttcgcgttgaccaagttccttaaagaactggctgatggggcaggaggtccaggcctgggctctcgggccctcctagagggccattggagcttgcagctcagacccccactttgagttttatttatttaaatagtagttggatgcttggcacgtcgtcctgtaataggaaacccttgcctcatcagttttcctgatttacaagtgcaatattttagccaatgccttgggagaagctgccatgcaaaggtggacaccattctccagcttcaggggatatgctcgtcccgggcaccggtggcaggcagctggccttctggactaaggcagcctggggggacactgcagtctggctacacacagagatctggcaccccctgggtggagtgtccctcgggggctttgggaaagcatggcaccctcagaccacacagtagccaagttctggagcaaataaaaggcctgtgttatttcttgttcttgaccctt

SEQ ID NO: 6295 - protein, 168 aa, Homo sapiens; identical to SEQ ID NO: 642

SEQ ID NO: 6296 - DNA, 1103 bp, Homo sapiens
gattggcttggtcttgcagggagcggctgccagcaggccggctggaggcggctttgcgctgccccagcctgggagccctcaggatgtgtgtggggtggagcctgctagggatcccagtgccagggggtgccgttgtgagggatggacgcctctcccccggagcagcactttggggccagcttgggccctggggatgagccacaggggacccacagcctatgcgtatgtttgagacggaggcagatgagaagagggagatggccttggaggaagggaaggggcctggtgccgaggattccccacccagcaaggagccctctcctggccaggagcttcctccaggacaagaccttccacccaacaaggactccccttctgggcaggaacccgctcccagccaagaaccactgtccagcaaagactcagctacctctgaaggatcccctccaggcccagatgctccgcccagcaaggatgtgccaccatgccaggaaccccctccagcccaagacctctcaccctgccaggacctacctgctggtcaagaacccctgcctcaccaggaccctctactcaccaaagacctccctgccatccaggaatcccccacccgggaccttccaccctgtcaagatctgcctcctagccaggtctccctgccagccaaggcccttactgaggacaccatgagctccggggacctactagcagctactggggacccacctgcggcccccaggccagccttcgtgatccctgaggtccggctggatagcacctacagccagaaggcaggggcagagcagggctgctcgggagatgaggaggatgcagaagaggccgaggaggtggaggagggggaggaaggggaggaggacgaggatgaggacaccagcgatgacaactacggagagcgcagtgaggccaagcgcagcagcatgatcgagacgggccagggggctgagggtggcctctcactgcgtgtgcagaactcgctgcggcgccggacgcacagcgagggcagcctgctgcaggagccccgagggccctgctttgcctccgacaccaccttgcactgctcagacggtgagggcgccgcctcc

SEQ ID NO: 6297 - protein, 294 aa, Homo sapiens
MRMFETEADEKREMALEEGKGPGAEDSPPSKEPSPGQELPPGQDLPPNKDSPSGQEPAPSQEPLSSKDSATSEGSPPGPDAPPSKDVPPCQEPPPAQDLSPCQDLPAGQEPLPHQDPLLTKDLPAIQESPTRDLPPCQDLPPSQVSLPAKALTEDTMSSGDLLAATGDPPAAPRPAFVIPEVRLDSTYSQKAGAEQGCSGDEEDAEEAEEVEEGEEGEEDEDEDTSDDNYGERSEAKRSSMIETGQGAEGGLSLRVQNSLRRRTHSEGSLLQEPRGPCFASDTTLHCSDGEGAA

SEQ ID NO: 6298 - DNA, 1588 bp, Homo sapiens
aggatgtgtgtggggtggagcctgctagggatcccagtgccagggggtgccgttgtgagggatggacgcctctcccccggagcagcactttggggccagcttgggccctggggatgagccacaggggacccacagcctatgcgtgtgagcatgtaacccgggagccagctgggcccctcgcggggtgggcagaaggacgggctggcccaggaccctcttctttgagacatcccggactccatctcggatgaaagtgctttgagaaaccacagagttttctgtttaatggaagaaagaaatccagcctctctccagagtggcggtggccggctagacagggtgtgtgtttgggaaaggcgctggaggaggaggaagaggaggaggacaagtaggaggaggaggaagaggaggagggacgggtgatgcaagggttttgaaagcgctacctagatgtgggaggtggaacctggtcatttggttctgcttttcctagcaggtatcgctcccctggggaacttgggtaagtccataaatagctctgctgacacaaaggagctctgtctggggaaggcagccgcttgacacggccgccaggagctgccacagccacggccgcccgcctgcgggaggagccgggtggaaacctgggcgggcgagctggcaggagcggcagccaggagtcgcctgggtccctgctggagtatgctggatgtttgagacggaggcagatgagaagagggagatggccttggaggaagggaaggggcctggtgccgaggattccccacccagcaaggagccctctcctggccaggagcttcctccaggacaagaccttccacccaacaaggactccccttctgggcaggaacccgctcccagccaagaaccactgtccagcaaagactcagctacctctgaaggatcccctccaggcccagatgctccgcccagcaaggatgtgccaccatgccaggaaccccctccagcccaagacctctcaccctgccaggacctacctgctggtcaagaacccctgcctcaccaggaccctctactcaccaaagacctccctgccatccaggaatcccccacccgggaccttccaccctgtcaagatctgcctcctagccaggtctccctgccagccaaggcccttactgaggacaccatgagctccggggacctactagcagctactggggacccacctgcggcccccaggccagccttcgtgatccctgaggtccggctggatagcacctacagccagaaggcaggggcagagcagggctgctcgggagatgaggaggatgcagaagaggccgaggaggtggaggagggggaggaaggggaggaggacgaggatgaggacaccagcgatgacaactacggagagcgcagtgaggccaagcgcagcagcatgatcgagacgggccagggggctgagggtggcctctcactgcgtgtgcagaactcgctgcggcgccggacgcacagcgagggcagcctgctgcaggagccccgagggccctgctttgcctccgacaccaccttgcactgctcagacggtgagggcgccgcctcc

SEQ ID NO: 6299 - protein, 292 aa, Homo sapiens; identical to SEQ ID NO: 6277

SEQ ID NO: 6300 - DNA, 1018 bp, Homo sapiens
agtgccagggggtgccgttgtgagggatggacgcctctcccccggagcagcactttggggccagcttgggccctggggatgagccacaggggacccacagcctatgcgagtcgcctgggtccctgctggagtatgctggatgtttgagacggaggcagatgagaagagggagatggccttggaggaagggaaggggcctggtgccgaggattccccacccagcaaggagccctctcctggccaggagcttcctccaggacaagaccttccacccaacaaggactccccttctgggcaggaacccgctcccagccaagaaccactgtccagcaaagactcagctacctctgaaggatcccctccaggcccagatgctccgcccagcaaggatgtgccaccatgccaggaaccccctccagcccaagacctctcaccctgccaggacctacctgctggtcaagaacccctgcctcaccaggaccctctactcaccaaagacctccctgccatccaggaatcccccacccgggaccttccaccctgtcaagatctgcctcctagccaggtctccctgccagccaaggcccttactgaggacaccatgagctccggggacctactagcagctactggggacccacctgcggcccccaggccagccttcgtgatccctgaggtccggctggatagcacctacagccagaaggcaggggcagagcagggctgctcgggagatgaggaggatgcagaagaggccgaggaggtggaggagggggaggaaggggaggaggacgaggatgaggacaccagcgatgacaactacggagagcgcagtgaggccaagcgcagcagcatgatcgagacgggccagggggctgagggtggcctctcactgcgtgtgcagaactcgctgcggcgccggacgcacagcgagggcagcctgctgcaggagccccgagggccctgctttgcctccgacaccaccttgcactgctcagacggtgagggcgccgcctcc

SEQ ID NO: 6301 - protein, 304 aa, Homo sapiens
MRVAWVPAGVCWMFETEADEKREMALEEGKGPGAEDSPPSKEPSPGQELPPGQDLPPNKDSPSGQEPAPSQEPLSSKDSATSEGSPPGPDAPPSKDVPPCQEPPPAQDLSPCQDLPAGQEPLPHQDPLLTKDLPAIQESPTRDLPPCQDLPPSQVSLPAKALTEDTMSSGDLLAATGDPPAAPRPAFVIPEVRLDSTYSQKAGAEQGCSGDEEDAEEAEEVEEGEEGEEDEDEDTSDDNYGERSEAKRSSMIETGQGAEGGLSLRVQNSLRRRTHSEGSLLQEPRGPCFASDTTLHCSDGEGAA

SEQ ID NO: 6302 - DNA, 1201 bp, Homo sapiens
agtgccagggggtgccgttgtgagggatggacgcctctcccccggagcagcactttggggccagcttgggccctggggatgagccacaggggacccacagcctatgcgtgtatcgctcccctggggaacttgggtaagtccataaatagctctgctgacacaaaggagctctgtctggggaaggcagccgcttgacacggccgccaggagctgccacagccacggccgcccgcctgcgggaggagccgggtggaaacctgggcgggcgagctggcaggagcggcagccaggagtcgcctgggtccctgctggagtatgctggatgtttgagacggaggcagatgagaagagggagatggccttggaggaagggaaggggcctggtgccgaggattccccacccagcaaggagccctctcctggccaggagcttcctccaggacaagaccttccacccaacaaggactccccttctgggcaggaacccgctcccagccaagaaccactgtccagcaaagactcagctacctctgaaggatcccctccaggcccagatgctccgcccagcaaggatgtgccaccatgccaggaaccccctccagcccaagacctctcaccctgccaggacctacctgctggtcaagaacccctgcctcaccaggaccctctactcaccaaagacctccctgccatccaggaatcccccacccgggaccttccaccctgtcaagatctgcctcctagccaggtctccctgccagccaaggcccttactgaggacaccatgagctccggggacctactagcagctactggggacccacctgcggcccccaggccagccttcgtgatccctgaggtccggctggatagcacctacagccagaaggcaggggcagagcagggctgctcgggagatgaggaggatgcagaagaggccgaggaggtggaggagggggaggaaggggaggaggacgaggatgaggacaccagcgatgacaactacggagagcgcagtgaggccaagcgcagcagcatgatcgagacgggccagggggctgagggtggcctctcactgcgtgtgcagaactcgctgcggcgccggacgcacagcgagggcagcctgctgcaggagccccgagggccctgctttgcctccgacaccaccttgcactgctcagacggtgagggcgccgcctcc

SEQ ID NO: 6303 - protein, 292 aa, Homo sapiens; identical to SEQ ID NO: 6277

SEQ ID NO: 6304 - DNA, 1364 bp, Homo sapiens
agtgccagggggtgccgttgtgagggatggacgcctctcccccggagcagcactttggggccagcttgggccctggggatgagccacaggggacccacagcctatgcgtgtgagcatgtaacccgggagccagctgggcccctcgcggggtgggcagaaggacgggctggcccaggaccctcttctttgagacatcccggactccatctcggatgaaagtgctttgagaaaccacagagttttctgtttaatggaagaaagaaatccagcctctctccagagtggcggtggccggctagacagggtgtgtgtttgggaaaggcgctggaggaggaggaagaggaggaggacaagtaggaggaggaggaagaggaggagggacgggtgatgcaagggttttgaaagcgctacctagatgtgggaggtggaacctggtcatttggttctgcttttcctagcaggtatcgctcccctggggaacttggatgtttgagacggaggcagatgagaagagggagatggccttggaggaagggaaggggcctggtgccgaggattccccacccagcaaggagccctctcctggccaggagcttcctccaggacaagaccttccacccaacaaggactccccttctgggcaggaacccgctcccagccaagaaccactgtccagcaaagactcagctacctctgaaggatcccctccaggcccagatgctccgcccagcaaggatgtgccaccatgccaggaaccccctccagcccaagacctctcaccctgccaggacctacctgctggtcaagaacccctgcctcaccaggaccctctactcaccaaagacctccctgccatccaggaatcccccacccgggaccttccaccctgtcaagatctgcctcctagccaggtctccctgccagccaaggcccttactgaggacaccatgagctccggggacctactagcagctactggggacccacctgcggcccccaggccagccttcgtgatccctgaggtccggctggatagcacctacagccagaaggcaggggcagagcagggctgctcgggagatgaggaggatgcagaagaggccgaggaggtggaggagggggaggaaggggaggaggacgaggatgaggacaccagcgatgacaactacggagagcgcagtgaggccaagcgcagcagcatgatcgagacgggccagggggctgagggtggcctctcactgcgtgtgcagaactcgctgcggcgccggacgcacagcgagggcagcctgctgcaggagccccgagggccctgctttgcctccgacaccaccttgcactgctcagacggtgagggcgccgcctcc

SEQ ID NO: 6305 - protein, 292 aa, Homo sapiens; identical to SEQ ID NO: 6277

SEQ ID NO: 6306 - DNA, 392 bp, Homo sapiens
ccaccagagttgtaaacatacatgtgtgtacgtgcacacagaggcacacaccgtatggtgtgtgatttcagagcaagtgtttggaaccagacctggatataaatcctgctttcaccaactttggctgcatcaatgcctgcccagggcctagtctgcaaaggccctccaaagggattctcctttccatcttctccccactgtctcactatgtgaccttgtccagctgaaaagcagatggagcaaaacgctgccgcgctgcctcctgaatgcctgctcagtgtcagatccacgccaagcacctcacctacatcgctgcatttaataacagccacctatgagatgggcgctagtggcactcccactgctatcaggacacagaatccattcacatg

SEQ ID NO: 6307 - protein, 51 aa, Homo sapiens
MEQNAAALPPECLLSVRSTPSTSPTSLHLITATYEMGASGTPTAIRTQNPF

SEQ ID NO: 6308 - DNA, 2799 bp, Homo sapiens
ttctcggctgatctctctgggtaggtgccctctgggggcagtacccctgcctgagtggcacttcccctcctggctttgtttggtttggcctcgatttagaacagggttggcagaggcaggctgacttgcatttctggttttgggtttgttgctgcactttccccaaggggtgggcgggctctgactgacagtcaccactgggacaggcctgggccccaccctcaccacccaggaaaggggaaatgcggcccgctccccactcagtgccactctgtgccactccgtgccaggccctgagggcacccggttgctgcttccttccgtctttccccaaggactatcagagatgccagcgtgacccctgacacgtgtgtgcagcagcctgcagctgccccaagccatggctgaacactgactcccagctgtggggcttcaccattacagactccccagggcttcaaagacttctcagcttcgagcatggcttttggctgtcagggcagctgtacaatagtggatgtttgagacggaggcagatgagaagagggagatggccttggaggaagggaaggggcctggtgccgaggattccccacccagcaaggagccctctcctggccaggagcttcctccaggacaagaccttccacccaacaaggactccccttctgggcaggaacccgctcccagccaagaaccactgtccagcaaagactcagctacctctgaaggatcccctccaggcccagatgctccgcccagcaaggatgtgccaccatgccaggaaccccctccagcccaagacctctcaccctgccaggacctacctgctggtcaagaacccctgcctcaccaggaccctctactcaccaaagacctccctgccatccaggaatcccccacccgggaccttccaccctgtcaagatctgcctcctagccaggtctccctgccagccaaggcccttactgaggacaccatgagctccggggacctactagcagctactggggacccacctgcggcccccaggccagccttcgtgatccctgaggtccggctggatagcacctacagccagaaggcaggggcagagcagggctgctcgggagatcaccagcgatgacaactacggagagcgcagtgaggccaagcgcagcagcatgatcgagacgggccagggggctgagggtggcctctcactgcgtgtgcagaactcgctgcggcgccggacgcacagcgagggcagcctgctgcaggagccccgagggccctgctttgcctccgacaccaccttgcactgctcagacggtgagggcgccgcctccacctggggcatgccttcgcccagcaccctcaagaaagagctgggccgcaatggtggctccatgcaccacctttccctcttcttcacaggacacaggaagatgagcggggctgacaccgttggggatgatgacgaagcctcccggaagagaaagagcaaaaacctagccaaggacatgaagaacaagctggggatcttcagacggcggaatgagtcccctggagcccctcccgcgggcaaggcagacaaaatgatgaagtcattcaagcccacctcagaggaagccctcaagtggggcgagtccttggagaagctgctggttcacaaatacgggttagcagtgttccaagccttccttcgcactgagttcagtgaggagaatctggagttctggttggcttgtgaggacttcaagaaggtcaagtcacagtccaagatggcatccaaggccaagaagatctttgctgaatacatcgcgatccaggcatgcaaggaggtcaacctggactcctacacgcgggagcacaccaaggacaacctgcagagcgtcacgcggggctgcttcgacctggcacagaagcgcatcttcgggctcatggaaaaggactcgtaccctcgctttctccgttctgacctctacctggaccttattaaccagaagaagatgagtcccccgctttaggggccactggagtcgagctcagcgttcacaccaggcgggctgggtcccctgcccacctgcctccctgccccctgtgacggagggggcaagcaagcccccagaggctgtgtctctggacagacggatagacatacggaagcgaggcctggaccaagagaggcccaggctactggaggagtagaaggatgggccccgtggggtccccactgccccggtacgagggggcccaagaccctggcaggtcaggggccctggccaagccagatctggagctgctgctccctgctgcggagaccgcggaggcttcgcgttgaccaagttccttaaagaactggctgatggggcaggaggtccaggcctgggctctcgggccctcctagagggccattggagcttgcagctcagacccccactttgagttttatttatttaaatagtagttggatgcttggcacgtcgtcctgtaataggaaacccttgcctcatcagttttcctgatttacaagtgcaatattttagccaatgccttgggagaagctgccatgcaaaggtggacaccattctccagcttcaggggatatgctcgtcccgggcaccggtggcaggcagctggccttctggactaaggcagcctggggggacactgcagtctggctacacacagagatctggcaccccctgggtggagtgtccctcgggggctttgggaaagcatggcaccctcagaccacacagtagccaagttctggagcaaataaaaggcctgtgttatttcttgttcttgaccctt

SEQ ID NO: 6309 - protein, 281 aa, Homo sapiens [sequence omitted]

SEQ ID NO: 6310 - DNA, 2867 bp, Homo sapiens
ttctcggctgatctctctgggtaggtgccctctgggggcagtacccctgcctgagtggcacttcccctcctggctttgtttggtttggcctcgatttagaacagggttggcagaggcaggctgacttgcatttctggttttgggtttgttgctgcactttccccaaggggtgggcgggctctgactgacagtcaccactgggacaggcctgggccccaccctcaccacccaggaaaggggaaatgcggcccgctccccactcagtgccactctgtgccactccgtgccaggccctgagggcacccggttgctgcttccttccgtctttccccaaggactatcagagatgccagcgtgacccctgacacgtgtgtgcagcagcctgcagctgccccaagccatggctgaacactgactcccagctgtggggcttcaccattacagactccccagggcttcaaagacttctcagcttcgagcatggcttttggctgtcagggcagctgtacaatagtggatgtttgagacggaggcagatgagaagagggagatggccttggaggaagggaaggggcctggtgccgaggattccccacccagcaaggagccctctcctggccaggagcttcctccaggacaagaccttccacccaacaaggactccccttctgggcaggaacccgctcccagccaagaaccactgtccagcaaagactcagctacctctgaaggatcccctccaggcccagatgctccgcccagcaaggatgtgccaccatgccaggaaccccctccagcccaagacctctcaccctgccaggacctacctgctggtcaagaacccctgcctcaccaggaccctctactcaccaaagacctccctgccatccaggaatcccccacccgggaccttccaccctgtcaagatctgcctcctagccaggtctccctgccagccaaggcccttactgaggacaccatgagctccggggacctactagcagctactggggacccacctgcggcccccaggccagccttcgtgatccctgaggtccggctggatagcacctacagccagaaggcaggggcagagcagggctgctcgggagatgaggaggatgcagaagaggccgaggaggtggaggagggggaggaaggggaggaggacgaggatgaggacaccagcgatgacaactacggagagcgcagtgaggccaagcgcagcagcatgatcgagacgggccagggggctgagggtggcctctcactgcgtgtgcagaactcgctgcggcgccggacgcacagcgagggcagcctgctgcaggagccccgagggccctgctttgcctccgacaccaccttgcactgctcagacggtgagggcgccgcctccacctggggcatgccttcgcccagcaccctcaagaaagagctgggccgcaatggtggctccatgcaccacctttccctcttcttcacaggacacaggaagatgagcggggctgacaccgttggggatgatgacgaagcctcccggaagagaaagagcaaaaacctagccaaggacatgaagaacaagctggggatcttcagacggcggaatgagtcccctggagcccctcccgcgggcaaggcagacaaaatgatgaagtcattcaagcccacctcagaggaagccctcaagtggggcgagtccttggagaagctgctggttcacaaatacgggttagcagtgttccaagccttccttcgcactgagttcagtgaggagaatctggagttctggttggcttgtgaggacttcaagaaggtcaagtcacagtccaagatggcatccaaggccaagaagatctttgctgaatacatcgcgatccaggcatgcaaggaggtcaacctggactcctacacgcgggagcacaccaaggacaacctgcagagcgtcacgcggggctgcttcgacctggcacagaagcgcatcttcgggctcatggaaaaggactcgtaccctcgctttctccgttctgacctctacctggaccttattaaccagaagaagatgagtcccccgctttaggggccactggagtcgagctcagcgttcacaccaggcgggctgggtcccctgcccacctgcctccctgccccctgtgacggagggggcaagcaagcccccagaggctgtgtctctggacagacggatagacatacggaagcgaggcctggaccaagagaggcccaggctactggaggagtagaaggatgggccccgtggggtccccactgccccggtacgagggggcccaagaccctggcaggtcaggggccctggccaagccagatctggagctgctgctccctgctgcggagaccgcggaggcttcgcgttgaccaagttccttaaagaactggctgatggggcaggaggtccaggcctgggctctcgggccctcctagagggccattggagcttgcagctcagacccccactttgagttttatttatttaaatagtagttggatgcttggcacgtcgtcctgtaataggaaacccttgcctcatcagttttcctgatttacaagtgcaatattttagccaatgccttgggagaagctgccatgcaaaggtggacaccattctccagcttcaggggatatgctcgtcccgggcaccggtggcaggcagctggccttctggactaaggcagcctggggggacactgcagtctggctacacacagagatctggcaccccctgggtggagtgtccctcgggggctttgggaaagcatggcaccctcagaccacacagtagccaagttctggagcaaataaaaggcctgtgttatttcttgttcttgaccctt

SEQ ID NO: 6311 - protein, 519 aa, Homo sapiens; identical to SEQ ID NO: 638

SEQ ID NO: 6312 - DNA, 3999 bp, Homo sapiens
aaaggggaaatgcggcccgctccccactcagtgccactctgtgccactccgtgccaggccctgagggcacccggttgctgcttccttccgtctttccccaaggactatcagaggcaggtggctgggccagggggtgggtcggggggaggtctggccatgtggtagggtgataggactgaggggccccagggagctggctgcagggcagtttgtttctcctgatggagaatgctccctggtgggtggggcgatgggctggggactggtttgttcatggggacagagatcagaagtgggcttgagaagaacagggccagaaggcctggactctggccccagcctagcccctaatttgtgcagggtggctttgggcaagtcactaagtcactgtctagactgggccctcagccttcctgtctacccaatggagggtctttctgtccacctgggaacagcctgataggactgaagcacagcccttagtttccagatgagaattctggactggaggccctgacattacaattgccaacactgactctggtgtttggcaaaatttggtgtatgtgggaaacacgtgcctctggttgaggtccttaacttcagaatttccctctagatcaatgctttttaaagcactaactccaacaccaccatcttctgtaggagctttcgagctttccagcttttccagcatacgctcctgatctgttactcaggcatgctggttatcccatttcatacgtggacaccttgaggcctaaaggttggtgactggctctacctgacacctctgtgtgattctaggttgccccttgctcctctctgggcctcagcctttctgtctatgcagtggggatttcggatcgctgttgtttcagagtctgaggctatgaggtctgagagggcccttgtgtggagtcacctctgagctgcaggcaggatttccagggcaagaaggccacagcatcagcaggcacctgtctttggcctgtgagccatagcctaaggcgtgcccttcccgaccttggccagatcacgctagagtcctccaaggcctcccctcccttgcccagccaccttctctgctctgcagggctccactttcactttcacactcccaggctgtggctcttacccgtgccgagctttcacatccgctcacatctgtgctcccagatgccagcgtgacccctgacacgtgtgtgcagcagcctgcagctgccccaagccatggctgaacactgactcccagctgtggggcttcaccattacagactccccagggcttcaaagacttctcagcttcgagcatggcttttggctgtcagggcagctgtacaatagtggatgtttgagacggaggcagatgagaagagggagatggccttggaggaagggaaggggcctggtgccgaggattccccacccagcaaggagccctctcctggccaggagcttcctccaggacaagaccttccacccaacaaggactccccttctgggcaggaacccgctcccagccaagaaccactgtccagcaaagactcagctacctctgaaggatcccctccaggcccagatgctccgcccagcaaggatgtgccaccatgccaggaaccccctccagcccaagacctctcaccctgccaggacctacctgctggtcaagaacccctgcctcaccaggaccctctactcaccaaagacctccctgccatccaggaatcccccacccgggaccttccaccctgtcaagatctgcctcctagccaggtctccctgccagccaaggcccttactgaggacaccatgagctccggggacctactagcagctactggggacccacctgcggcccccaggccagccttcgtgatccctgaggtccggctggatagcacctacagccagaaggcaggggcagagcagggctgctcgggagatgaggaggatgcagaagaggccgaggaggtggaggagggggaggaaggggaggaggacgaggatgaggacaccagcgatgacaactacggagagcgcagtgaggccaagcgcagcagcatgatcgagacgggccagggggctgagggtggcctctcactgcgtgtgcagaactcgctgcggcgccggacgcacagcgagggcagcctgctgcaggagccccgagggccctgctttgcctccgacaccaccttgcactgctcagacggtgagggcgccgcctccacctggggcatgccttcgcccagcaccctcaagaaagagctgggccgcaatggtggctccatgcaccacctttccctcttcttcacaggacacaggaagatgagcggggctgacaccgttggggatgatgacgaagcctcccggaagagaaagagcaaaaacctgtacgttgggaagatccctggcttctgcgctcctcttcctcccttgccccagggcttgtctctcctctaggggtccaggtggggagaagaggttgtgcctggtcccgcccacaaccccagacagacaccaaggaaaaactggatcttggaactttgcagtgaccccaaagtggggtcacctgggtcctgagcattctctccaagtgaggcaaagtgctgattcagtacccggaagccacagtgaaccagaagcaaccagcccgtttgccctggctttagcccagcttctgagccaagcagggaccaagtgacttcaacaactcctttgctccctctgggcccaagagtgacctgagaaggggtggaactgacagtcattggctcctctttctcttcctgagctcctgaatgctaatagtctcaggcattgccaggagggggcgctgctggcccagctgccgaatcccgcactcgccaagcctttctggccacactcaggccttcttatactatagggtgtttgttagaggtgtcaatgaaaaagatgtgtgtgtgggttctcaggtcttcttctacccccaggcctaagaccctggagactcgggggaggtatagggaggaggcagtggggtgcatgcacagtgacacctccagaggaagcccctccccaccaggtcctgtagcacccaccactaggcaggaattgggctatagggaggagcctcctgcaaccctcttctctggccttgaccgtgggtggggtccactaccctagaaagccttcctcaccccagctgccttgacctctccagctttctgcagcaactgttggcttctcttactccacagccaattgcattttcttagcaaggtgaaatgcataaaccaaaacagtcccttgcaccaaccatcttcacttaaccttttgtaggatgagagaggatccagggggtgccaggactgttgaatgtggtgctggaagtgggaggtgtagggaagcagtgtgtggcgcagagggcaggcatcccgggtgctggagcagccctgtctagcctcctttcaatgtaggtgctgccttttgaattgcctgaagcccacactttttttttttggagacagagtctccttctgtcacccaggctggagtgcgatcttggcttgctgcaacctccgcctcccaagttcaagcagttcttgtccctcagcctcccaagtagctgcgattacaggtgtgtgccatcacacccagcaaattttttttgtacttttagtagagatgggggttttgccatgttggccaggctgttctcaaactcctggcctcaagtgatcttcccgcctcggcctcccaaagtgctgggattacagacatgagccaccatgcctggcctctgaaggtcatactcttaaaagcttagacgaagagtcttagaacatctacggtaataataagaataaccattaatgtttattatgccccgcactgttctgtgtgtatttcatatgtaatctaatttaatctttaccactacttttattttccgttctgttctttcttattgaccttacccttattttacacgtgaataaactactgtgcaaagag

SEQ ID NO: 6313 - protein, 370 aa, Homo sapiens
MFETEADEKREMALEEGKGPGAEDSPPSKEPSPGQELPPGQDLPPNKDSPSGQEPAPSQEPLSSKDSATSEGSPPGPDAPPSKDVPPCQEPPPAQDLSPCQDLPAGQEPLPHQDPLLTKDLPAIQESPTRDLPPCQDLPPSQVSLPAKALTEDTMSSGDLLAATGDPPAAPRPAFVIPEVRLDSTYSQKAGAEQGCSGDEEDAEEAEEVEEGEEGEEDEDEDTSDDNYGERSEAKRSSMIETGQGAEGGLSLRVQNSLRRRTHSEGSLLQEPRGPCFASDTTLHCSDGEGAASTWGMPSPSTLKKELGRNGGSMHHLSLFFTGHRKMSGADTVGDDDEASRKRKSKNLYVGKIPGFCAPLPPLPQGLSLL

SEQ ID NO: 6314 - DNA, 598 bp, Homo sapiens
aaatgcggcccgctccccactcagtgccactctgtgccactccgtgccaggccctgagggcacccggttgctgcttccttccgtctttccccaaggactatcagaggttgccccttgctcctctctgggcctcagcctttctgtctatgcagtggggatttcggatcgctgttgtttcagagtctgaggctatgaggtctgagagggcccttgtgtggagtcacctctgagctgcaggcaggatttccagggcaagaaggccacagcatcagcaggcacctgtctttggcctgtgagccatagcctaaggcgtgcccttcccgaccttggccagatcacgctagagtcctccaaggcctcccctcccttgcccagccaccttctctgctctgcagggctccactttcactttcacactcccaggctgtggctcttacccgtgccgagctttcacatccgctcacatctgtgctcccagatgccagcgtgacccctgacacgtgtgtgcagcagcctgcagctgccccaagccatggctgaacactgactcccagctgtggggcttcaccattacagactccccagggcttcaaagact

SEQ ID NO: 6315 - protein, 75 aa, Homo sapiens
MRPAPHSVPLCATPCQALRAPGCCFLPSFPKDYQRLPLAPLWASAFLSMQWGFRIAVVSESEAMRSERALVWSHL

SEQ ID NO: 6316 - DNA, 1010 bp, Homo sapiens
tcactttcacactcccaggctgtggctcttacccgtgccgagctttcacatccgctcacatctgtgctcccagatgccagcgtgacccctgacacgtgtgtgcagcagcctgcagctgccccaagccatggctgaacactgactcccagctgtggggcttcaccattacagactccccagggaaggggcctggtgccgaggattccccacccagcaaggagccctctcctggccaggagcttcctccaggacaagaccttccacccaacaaggactccccttctgggcaggaacccgctcccagccaagaaccactgtccagcaaagactcagctacctctgaaggatcccctccaggcccagatgctccgcccagcaaggatgtgccaccatgccaggaaccccctccagcccaagacctctcaccctgccaggacctacctgctggtcaagaacccctgcctcaccaggaccctctactcaccaaagacctccctgccatccaggaatcccccacccgggaccttccaccctgtcaagatctgcctcctagccaggtctccctgccagccaaggcccttactgaggacaccatgagctccggggacctactagcagctactggggacccacctgcggcccccaggccagccttcgtgatccctgaggtccggctggatagcacctacagccagaaggcaggggcagagcagggctgctcgggagatgaggaggatgcagaagaggccgaggaggtggaggagggggaggaaggggaggaggacgaggatgaggacaccagcgatgacaactacggagagcgcagtgaggccaagcgcagcagcatgatcgagacgggccagggggctgagggtggcctctcactgcgtgtgcagaactcgctgcggcgccggacgcacagcgagggcagcctgctgcaggagccccgagggccctgctttgcctccgacaccaccttgcactgctcagacggtgagggcgccgcctcc

SEQ ID NO: 6317 - protein, 138 aa, Homo sapiens; identical to SEQ ID NO: 6271

SEQ ID NO: 6318 - DNA, 1726 bp, Homo sapiens
atggtaacgaggaggccagtcacaaatagctgggactggcttcctgccggggcggccccagaggctgtcccttgcagacacatgcccctttcacggctccctctcagggttggccagaaggaatttttttttccgctccccctcctggtccctcccatttcctggctcctcctgtctgagtcccagccccggcttgtgcctgggagtccagtcatcaggccaggattccagagagcgtgtgtggctgcagcctgcaccgttgctgcccgctgcccaggacgcggggtgggggacaggagccagagtggtgcctcctacagaccaatctgcggccccaaggtggggggccctacagagatgctccgaggcatgtacctcactcgcaacgggaacctgcagaggcgacacacgatgaaggaagccaaggacatgaagaacaagctggggatcttcagacggcggaatgagtcccctggagcccctcccgcgggcaaggcagacaaaatgatgaagtcattcaagcccacctcagaggaagccctcaagtggggcgagtccttggagaagctgctggttcacaaatacgggttagcagtgttccaagccttccttcgcactgagttcagtgaggagaatctggagttctggttggcttgtgaggacttcaagaaggtcaagtcacagtccaagatggcatccaaggccaagaagatctttgctgaatacatcgcgatccaggcatgcaaggaggtcaacctggactcctacacgcgggagcacaccaaggacaacctgcagagcgtcacgcggggctgcttcgacctggcacagaagcgcatcttcgggctcatggaaaaggactcgtaccctcgctttctccgttctgacctctacctggaccttattaaccagaagaagatgagtcccccgctttaggggccactggagtcgagctcagcgttcacaccaggcgggctgggtcccctgcccacctgcctccctgccccctgtgacggagggggcaagcaagcccccagaggctgtgtctctggacagacggatagacatacggaagcgaggcctggaccaagagaggcccaggctactggaggagtagaaggatgggccccgtggggtccccactgccccggtacgagggggcccaagaccctggcaggtcaggggccctggccaagccagatctggagctgctgctccctgctgcggagaccgcggaggcttcgcgttgaccaagttccttaaagaactggctgatggggcaggaggtccaggcctgggctctcgggccctcctagagggccattggagcttgcagctcagacccccactttgagttttatttatttaaatagtagttggatgcttggcacgtcgtcctgtaataggaaacccttgcctcatcagttttcctgatttacaagtgcaatattttagccaatgccttgggagaagctgccatgcaaaggtggacaccattctccagcttcaggggatatgctcgtcccgggcaccggtggcaggcagctggccttctggactaaggcagcctggggggacactgcagtctggctacacacagagatctggcaccccctgggtggagtgtccctcgggggctttgggaaagcatggcaccctcagaccacacagtagccaagttctggagcaaataaaaggcctgtgttatttcttgttcttgaccctt

SEQ ID NO: 6319 - protein, 311 aa, Homo sapiens; identical to SEQ ID NO: 646

SEQ ID NO: 6320 - DNA, 730 bp, Homo sapiens
gaggccagtcacaaatagctgggactggcttcctgccggggcggccccagaggctgtcccttgcagacacatgcccctttcacggctccctctcagggttggccagaaggaatttttttttccgctccccctcctggtccctcccatttcctggctcctcctgtctgagtcccagccccggcttgtgcctgggagtccagtcatcaggccaggattccagagagcgtgtgtggctgcagcctgcaccgttgctgcccgctgcccaggacgcggggtgggggacaggagccagagtggtgcctcctacagaccaatctgcggccccaaggtggggggccctacagagatgctccgaggcatgtacctcactcgcaacgggaacctgcagaggcgacacacgatgaaggaagccaaggacatgaagaacaagctggggatcttcagacggcggaatgagtcccctggagcccctcccgcgggcaaggcagacaaaatgatgaagtcattcaagtaggtcctccctggcaccctgggaccctttggggaactcactggctccccggggagtaggactgagtggtagggttgaggggaaggggcttgccggcttgatccagctctgggggagacaggctttcacagagggagctgggtacctggcaagcagctaccctcacagggagcagctgccctagggggaaggctaggtggggtggagatgggggctgga

SEQ ID NO: 6321 - protein, 147 aa, Homo sapiens
MPLSRLPLRVGQKEFFFPLPLLVPPISWLLLSESQPRLVPGSPVIRPGFQRACVAAACTVAARCPGRGVGDRSQSGASYRPICGPKVGGPTEMLRGMYLTRNGNLQRRHTMKEAKDMKNKLGIFRRRNESPGAPPAGKADKMMKSFK

SEQ ID NO: 6322 - DNA, 777 bp, Homo sapiens
gaggccagtcacaaatagctgggactggcttcctgccggggcggccccagaggctgtcccttgcagacacatgcccctttcacggctccctctcagggttggccagaaggaatttttttttccgctccccctcctggtccctcccatttcctggctcctcctgtctgagtcccagccccggcttgtgcctgggagtccagtcatcaggccaggattccagagagcgtgtgtggctgcagcctgcaccgttgctgcccgctgcccaggacgcggggtgggggacaggagccagagtggtgcctcctacagaccaatctgcggccccaaggtggggggccctacagagatgctccgaggcatgtacctcactcgcaacgggaacctgcagaggcgacacacgatgaaggagtaggtgccctcgacccagctctcccgactctggatttgcaggggcgagtgggccaggctgagcaaccctcttttctgcttctgtccccagagccaaggacatgaagaacaagctggggatcttcagacggcggaatgagtcccctggagcccctcccgcgggcaaggcagacaaaatgatgaagtcattcaagcccacctcagaggaagccctcaagtggggcgagtccttggagaagctgctggttcacaaatgtaagttgggcctgcctgcccactccctgtgccctctctccctctccccttcgcccccatccagaccctgtgtagctggtgctagagaggccgccttccctctcctcggccgtc

SEQ ID NO: 6323 - protein, 88 aa, Homo sapiens
MKNKLGIFRRRNESPGAPPAGKADKMMKSFKPTSEEALKWGESLEKLLVHKCKLGLPAHSLCPLSLSPSPPSRPCVAGAREAAFPLLG

SEQ ID NO: 6324 - DNA, 1665 bp, Homo sapiens
gaggccagtcacaaatagctgggactggcttcctgccggggcggccccagaggctgtcccttgcagacacatgcccctttcacggctccctctcagggttggccagaaggaatttttttttccgctccccctcctggtccctcccatttcctggctcctcctgtctgagtcccagccccggcttgtgcctgggagtccagtcatcaggccaggattccagagagcgtgtgtggctgcagcctgcaccgttgctgcccgctgcccaggacgcggggtgggggacaggagccagagtggtgcctcctacagaccaatctgcggccccaaggtggggggccctacagagatgctccgaggcatccaaggacatgaagaacaagctggggatcttcagacggcggaatgagtcccctggagcccctcccgcgggcaaggcagacaaaatgatgaagtcattcaagcccacctcagaggaagccctcaagtggggcgagtccttggagaagctgctggttcacaaatacgggttagcagtgttccaagccttccttcgcactgagttcagtgaggagaatctggagttctggttggcttgtgaggacttcaagaaggtcaagtcacagtccaagatggcatccaaggccaagaagatctttgctgaatacatcgcgatccaggcatgcaaggaggtcaacctggactcctacacgcgggagcacaccaaggacaacctgcagagcgtcacgcggggctgcttcgacctggcacagaagcgcatcttcgggctcatggaaaaggactcgtaccctcgctttctccgttctgacctctacctggaccttattaaccagaagaagatgagtcccccgctttaggggccactggagtcgagctcagcgttcacaccaggcgggctgggtcccctgcccacctgcctccctgccccctgtgacggagggggcaagcaagcccccagaggctgtgtctctggacagacggatagacatacggaagcgaggcctggaccaagagaggcccaggctactggaggagtagaaggatgggccccgtggggtccccactgccccggtacgagggggcccaagaccctggcaggtcaggggccctggccaagccagatctggagctgctgctccctgctgcggagaccgcggaggcttcgcgttgaccaagttccttaaagaactggctgatggggcaggaggtccaggcctgggctctcgggccctcctagagggccattggagcttgcagctcagacccccactttgagttttatttatttaaatagtagttggatgcttggcacgtcgtcctgtaataggaaacccttgcctcatcagttttcctgatttacaagtgcaatattttagccaatgccttgggagaagctgccatgcaaaggtggacaccattctccagcttcaggggatatgctcgtcccgggcaccggtggcaggcagctggccttctggactaaggcagcctggggggacactgcagtctggctacacacagagatctggcaccccctgggtggagtgtccctcgggggctttgggaaagcatggcaccctcagaccacacagtagccaagttctggagcaaataaaaggcctgtgttatttcttgttcttgaccctt

SEQ ID NO: 6325 - protein, 168 aa, Homo sapiens; identical to SEQ ID NO: 642

SEQ ID NO: 6326 - DNA, 1270 bp, Homo sapiens
cggggacgggcattgtactcagctcccagcacgcccatctttaaagtcctgtaggggtaagctgaggcatcttaagggcaggagaggctgagtttgcctcttaccccaggatccgttctcctcacagacgggttagcagtgttccaagccttccttcgcactgagttcagtgaggagaatctggagttctggttggcttgtgaggacttcaagaaggtcaagtcacagtccaagatggcatccaaggccaagaagatctttgctgaatacatcgcgatccaggcatgcaaggaggtcaacctggactcctacacgcgggagcacaccaaggacaacctgcagagcgtcacgcggggctgcttcgacctggcacagaagcgcatcttcgggctcatggaaaaggactcgtaccctcgctttctccgttctgacctctacctggaccttattaaccagaagaagatgagtcccccgctttaggggccactggagtcgagctcagcgttcacaccaggcgggctgggtcccctgcccacctgcctccctgccccctgtgacggagggggcaagcaagcccccagaggctgtgtctctggacagacggatagacatacggaagcgaggcctggaccaagagaggcccaggctactggaggagtagaaggatgggccccgtggggtccccactgccccggtacgagggggcccaagaccctggcaggtcaggggccctggccaagccagatctggagctgctgctccctgctgcggagaccgcggaggcttcgcgttgaccaagttccttaaagaactggctgatggggcaggaggtccaggcctgggctctcgggccctcctagagggccattggagcttgcagctcagacccccactttgagttttatttatttaaatagtagttggatgcttggcacgtcgtcctgtaataggaaacccttgcctcatcagttttcctgatttacaagtgcaatattttagccaatgccttgggagaagctgccatgcaaaggtggacaccattctccagcttcaggggatatgctcgtcccgggcaccggtggcaggcagctggccttctggactaaggcagcctggggggacactgcagtctggctacacacagagatctggcaccccctgggtggagtgtccctcgggggctttgggaaagcatggcaccctcagaccacacagtagccaagttctggagcaaataaaaggcctgtgttatttcttgttcttgaccctt

SEQ ID NO: 6327 - protein, 81 aa, Homo sapiens
MASKAKKIFAEYIAIQACKEVNLDSYTREHTKDNLQSVTRGCFDLAQKRIFGLMEKDSYPRFLRSDLYLDLINQKKMSPPL

SEQ ID NO: 6328 - DNA, 3043 bp, Homo sapiens
ctgtgggccagaggagagcactgggtaccagaatcacagatcaggagctgtggaaggcgctgcccgacaggatgggggaccctgggagagggatgcagccacatccaaactgtggcccagaagagggagtgggaaaagtcctcgacctctctgtcttcctgctgtcttccaatatcctacctggaaagcaacgggtctgaaaggtaattctgttcttgatgagggtgcaggcagcagagggaattgtcatcctgctgaagacacacagctcttccatgctctaccctatgtgtaatttgttcttatctgctcctggagccaccacctgctacagtgtaaagagaccccacagactctctggatcaaactactcactgtccagaaggagaaaatgaggtcctatgtctgtggctagaacccaggcctctggggagcaacccagggctccatccagggtgacctgagcctgctctgctcatcagagccagtctttaccacccttcatatcccgggagcccacaggtagaaagatgggcattgcaggtcaccgtggttcccccactgaagcaagttccctggctcgcgattagccagtgctctgctggttcatgatgcgctccaaatgctagaccaagaaagaaactgggtcggtgggcaggacacaggaccagcgctctgggaggagagctgttctcaagcagtttggtggcatcagagcctctgtgtggtcagtcaagcagggcagccaatttcctctcctttcagccctaactctggactcctgtacctggaggggctccctttgtgctcctgcagcccagaagccctccgaggcttgacatgaaagagtcgcgggatcttggactgttccggtggaagggctcctagcaaaacccagatgttttctcttcttgtatggatgggaggaccgaagtccagagaagtggaataacttgcccagggttgtgctgagatttgtgaaggtgccggatgctggtgtgctggtggctggcatgctctgagcccttccttcccgctgtttccctggagttctgcttggcaaccacccgcctgcatttttgcaaagtgatgtcatctgcagataatggtttttccgttcctggtggagcaggagttccagatacagtgcttcgggggaggggctcaagagagctgattgtgcactcctcaggcaagtgggggctgcatagaccccctcccctctgacagtcacatctcagttgtaaggcaaggcaccgtctcaggcttcctggactccggaacctggaatgaccaaaatggcagaggccccagagacaagcctcccctgcctcctccttgtagagttgggaatctgaggcccagagagggcagagccttgcccaagctcacacagcatttacaggcaaaaccttgactcacatcccgactcctaacatctgtggccacttgcccgtggttgggggtttttcaccctcaacaccgttgacattttgggccaaggagttttgttgtgggggcagtccctttcatggcaggatgtttggcagcatccctggcctcgacctcctacaggccagtagcacccctctccagttctcaaatccagacactgccaaatgtctttcacctaagttggggtgggagaaagtaaccctccagctcctaagacctttatccactgccataggcaggagaggtttcttgagtccaagcccaaagggtgctttgtctgaggctctgacttaacgtcaggcaccttcaggatgggaggcaggcctggagggggctatgaggggctggagatggtccaggccctccttctggttaggaacactgcttcctctgatcacttttcttggagcaaaactgccgatttattttcctggggaaataaaaataaatgctggctgttgtaatctcatccctgatcccatctggaaaaagcaggctcatgaatcttggccgcctgagctctgaggactgtgtctggcggaacctggagttacaatgggccttcgaacatcggaacagtcacggctgacatttcctttcccgttacatggctccttggaatgtgagccccagggggccgtccgtgggcaggcggaatttggtggaaagaagtgctgcacgggccggaggccagctcagcttctgacttgctgtgtgactttgggccacttttctgttcgtttctgggccttgatttctccatctgcagaatgaggggagccacgttcctcaacaaggggtccatggaccaccttgtatcagaaccatttagggaatgtgtttatggctattcctgatatttctgattcctcttccagacctcctaaagtttttatgcatctctaagtgatttcgatatatataagttttgggacccacaacaccaaggactttgaactttccacccagtttcaagtttgaacacatcacagttcttcagcctccttccccctcataacgaagtgtagagttatgaagctagagggtaaaattatggggtgggctggaactgggcattgctcctaacaattatctgctttcaaactcttggcagggtctctggggtccttgatccaactgaaatcactgttaaagcactttattcctccagtaatgaaactcgagctgctagttacagagtttggtttcaaaattgtgccatttattatttttgttggattggcttataaaccctcatatagtcatacatcatttataatgcattattccatgagaatgcattttccagatgagatttattttttctgttaaaaacttaaaactgttctttttttttttttaaatggcagtctttcgccatgtgttacctatttataccaccttaagtgaaggtcaggaaatgcaattttacttattctcaatgctccagggttgtcattgtgagttttaactactgtatgcattgatgtaaattttagggactccaaaactcactgtgcctgaactatgaatgtcccccaagctgcttagcccttgtgtctgcttttaaaagttctgctttgcttct

SEQ ID NO: 6329 - protein, 42 aa, Homo sapiens
MGDPGRGMQPHPNCGPEEGVGKVLDLSVFLLSSNILPGKQRV

SEQ ID NO: 6330 - DNA, 1221 bp, Homo sapiens
gaagactcactggtccagaagtcagaacacctgagtcacttgacatgcactctcagatgagctgctgcactgctctgtgcctcagccgctttcatctgtagaatgggatggtcatgatgcctggccagcagggcccatggagcttgtataaaacctgatgggaggggaggttgcagtaaaagccttggagatgaaaacactggacacaggtcccctggagtcattggaatgcaggttcctactcggaggcctgggtttccaacaatctcccagttcctaggcccagatgtccaccctccttcacgagctcagaattgagctcgtatcgccaacatgttttgcggaaatgctcatatcaacacttggtgaaccaggaagactgtaccctcattcctttctcctgctgcctgctaggttgagttagaaagcttactctcgagttttactggcttgcttgtgctttttggcattttcaaaattttgtacaatgatcttcaaaaagcaaaaatacattaatttttttaaaggtaggatccatatgagattggatcttcatcttctaacactttggagaacagaaaagtggtatttggagatataatcttcataagaattgtggcactgaataaaagagcactggaagaggaaagaaacataaaggaaagaaaggaaaagaaaagaccaaaagaaaagcaaggctccacttgcaaatgagagagcaacttggaaaacctgccactcactaccactgatgcccacaagagggcgtctcagggtcatccggaaggcaaaactcaagtccaagatccgcttcccagcagctggaaatgaccaatgagtaggttctggaatatcagcaatgaccctggctctccagcactttacagtttacattagactctcctccccgacgtcatttgcacctcccaaggccagttctcccggtggtttccagccctggggcgtttgtggttctctctgcctagtgggatgcaactggcatttagtgtttgtccgtatgtgggtgtggctggggagggcagagaggcaaacagccccgcacaagctgtacagtccccctcatcaagatgtggcactccctctttgccaatagcaactcctttttgaaacactgggcctgaagcaatcatcttgaagacatttttcatcaatcttgttgaaatcaacctggtttttcaaaatagaggaagcacatcaatg

SEQ ID NO: 6331 - protein, 40 aa, Homo sapiens
MGGEVAVKALEMKTLDTGPLESLECRFLLGGLGFQQSPSS

SEQ ID NO: 6332 - DNA, 8884 bp, Homo sapiens
cgcaaaaaataaataaattagagcatcttttggggggagggaattcagcggatcagtcttaagaggagcttttttttggagcgagaaatcatataaaataaaatgaaataaaacaaggaggaaggcaaccagctgttaggggaaaaataaggcagataaaggagcggggagagaaattaattgccaaccaggaggagttgggctgtatttttcaaaggtggggagagtggagcacacaccttgaggaggaaagcgagaaagaaaagaaaaaagcaagtggaaaggggggctcgcccaagaagggtgaagaagcgaagaaagtcgaggcgccgaggctcccaaagctggcagctccgggtggcggtgcaggggcgaagggggggcggggggaaccgtcggacatgcggctctggagttgggtgctgcacctggggctgctgagcgccgcgctgggctgcgggctggccgagcgtccccgccgggcccggagagacccgcgggccggccgacccccgcgccccgccgccggcccggccacctgcgccacccgggcggcccgcggccgccgcgcctcgccgccgccgccgccgccgccgggcggtgcctgggaagccgtgcgcgtcccccggcggcggcagcagcgggaggcgaggggcgccaccgaggagccgagcccgccgagccgggcgctctatttcagcgggcgaggcgagcagctgcgcctccgggccgacctcgagctgccccgggacgcgttcacgctgcaagtgtggctgcgagcggaggggggccagaggtctccggcagtgatcacagggctgtatgacaaatgttcttatatctcacgtgaccgaggatgggtcgtgggcattcacaccatcagtgaccaagacaacaaagacccacgctactttttctccttgaagacagaccgagcccggcaagtgaccaccatcaatgcccaccgcagctacctcccaggccagtgggtatacctagctgccacctatgatgggcagttcatgaagctctatgtgaatggtgcccaggtggccacctctggggaacaagtgggtggcatattcagcccactgacccagaagtgcaaagtgctcatgttagggggcagtgccctgaatcacaactaccggggctacatcgagcacttcagtctgtggaaggtggccaggactcagcgggagatactgtctgacatggaaacccatggcgcccacactgctctacctcagctcctcctccaggagaactgggacaatgtgaagcatgcctggtcccccatgaaggatggcagcagccccaaagtggaattcagcaatgcccacggctttctgctggacacgagtctggagcctcctctgtgcggacagacattgtgtgacaacacagaggtcattgccagctacaatcagctctcaagtttccgccagcccaaggtggtgcgctaccgcgtggtcaacctctatgaagatgatcataagaacccgacggtgacgcgcgagcaggtggacttccagcaccatcagctggctgaggccttcaagcaatacaacatctcctgggagctggacgtgctggaggtgagcaactcctcccttcgccgccgcctcatcctggccaactgtgacatcagcaagattggggatgagaactgtgaccccgagtgcaaccacacgctgacgggccacgacggcggggattgccgccacctgcgccaccctgccttcgtgaagaagcagcacaacggggtgtgtgacatggactgcaactatgaacggttcaactttgatggtggagagtgctgtgaccctgaaatcaccaatgtcactcagacttgctttgaccccgactctccacacagagcctacttggatgttaatgagctgaagaacattcttaaattggatggatcaacacatctcaatattttctttgcaaaatcctcagaggaggagttggcaggagtagcaacttggccatgggacaaggaggccctgatgcacttaggtggcattgtcttgaacccatctttctatggcatgcctgggcacacccacaccatgatccatgagattggtcacagcctgggcctctatcacgtcttccgaggcatctcagaaatccagtcctgcagtgacccctgcatggagacagagccctccttcgagactggagacctctgcaatgataccaacccagcccctaaacacaagtcctgtggtgacccagggccaggaaatgacacctgtggctttcatagcttcttcaacactccttacaacaacttcatgagctatgcagatgacgactgtacggactccttcacgcccaatcaagtcgccagaatgcactgttacctggacctggtctaccagggctggcagccctccaggaaaccagcgcctgttgccctcgccccccaagttctgggccacacaacggactctgtgacactggagtggttcccacctatagatggccatttctttgaaagagaattgggatcagcatgtcatctttgcctggaagggagaatcctggtgcagtatgcttccaacgcttcctccccaatgccctgcagcccatcaggacactggagccctcgtgaagcagaaggtcatcctgatgttgaacagccctgtaagtccagtgtccgcacctggagcccaaattcagctgtcaacccacacacggttcctccagcctgccctgagcctcaaggctgctacctcgagctggagttcctctaccccttggtccctgagtctctgaccatttgggtgacctttgtctccactgactgggactctagtggagctgtcaatgacatcaaactgttggctgtcagtgggaagaacatctccctgggtcctcagaatgtcttctgtgatgtcccactgaccatcagactctgggacgtgggcgaggaggtgtatggcatccaaatctacacgctggatgagcacctggagatcgatgctgccatgttgacctccactgcagacaccccactctgtctacagtgtaagcccctgaagtataaggtggtccgggaccctcctctccagatggatgtggcctccatcctacatctcaataggaaattcgtagacatggatctaaatcttggcagtgtgtaccagtattgggtcataactatttcaggaactgaagagagtgagccatcacctgctgtcacatacatccatggaagtgggtactgtggcgatggcattatacaaaaagaccaaggtgaacaatgcgacgacatgaataagatcaatggtgatggctgctcccttttctgccgacaagaagtctccttcaattgtattgatgaacccagccggtgctatttccatgatggtgatggggtatgtgaggagtttgaacaaaaaaccagcattaaggactgtggtgtctacacgccccagggattcctggatcagtgggcatccaatgcttcagtatctcatcaagaccagcaatgcccaggctgggtcatcatcggacagccagcagcatcccaggtgtgtcgaaccaaggtgatagatctcagtgaaggcatttcccagcatgcctggtacccttgcaccatcagctacccatattcccagctggctcagaccactttttggctccgggcgtatttttctcaaccaatggttgccgcagctgtcattgtccacctggtgacggatgggacatattatggggaccaaaagcaggagaccatcagcgtgcagctgcttgataccaaagatcagagccacgatctaggcctccatgtcctgagctgcaggaacaatcccctgattatccctgtggtccatgacctcagccagcccttctaccacagccaggcggtacgtgtgagcttcagttcgcccctggtcgccatctcgggggtggccctccgttccttcgacaactttgaccccgtcaccctgagcagctgccagagaggggagacctacagccctgccgagcagagctgcgtgcacttcgcatgtgagaaaactgactgtccagagctggctgtggagaatgcttctctcaattgctccagcagcgaccgctaccacggtgcccagtgtactgtgagctgccggacaggctacgtgctccagatacggcgggatgatgagctgatcaagagccagacgggacccagcgtcacagtgacctgtacagagggcaagtggaataagcaggtggcctgtgagccagtcgactgcagcatcccagatcaccatcaagtctatgctgcctccttctcctgccctgagggcaccacctttggcagtcaatgttccttccagtgccgtcaccctgcacaattgaaaggcaacaacagcctcctgacctgcatggaggatgggctgtggtccttcccagaggccctgtgtgagctcatgtgcctcgctccaccccctgtgcccaatgcagacctccagaccgcccggtgccgagagaataagcacaaggtgggctccttctgcaaatacaaatgcaagcctggataccatgtgcctggatcctctcggaagtcaaagaaacgggccttcaagactcagtgtacccaggatggcagctggcaggagggagcttgtgttcctgtgacctgtgacccacctccaccaaaattccatgggctctaccagtgtactaatggcttccagttcaacagtgagtgtaggatcaagtgtgaagacagtgatgcctcccagggacttgggagcaatgtcattcattgccggaaagatggcacctggaacggctccttccatgtctgccaggagatgcaaggccagtgctcggttccaaacgagctcaacagcaacctcaaactgcagtgccctgatggctatgccatagggtcggagtgtgccacctcgtgcctggaccacaacagcgagtccatcatcctgccaatgaacgtgaccgtgcgtgacatcccccactggctgaaccccacacgggtagagagagttgtctgcactgctggtctcaagtggtatcctcaccctgctctgattcactgtgtcaaaggctgtgagcccttcatgggagacaattattgtgatgccatcaacaaccgagccttttgcaactatgacggtggggattgctgcacctccacagtgaagaccaaaaaggtcaccccattccctatgtcctgtgatctacaaggtgactgtgcttgtcgggacccccaggcccaagaacacagccggaaagacctccggggatacagccatggctaaggaaggacaagaagttgtcaaagaattcccaacgccaggacccacatccctttggtattgatttcacagtcagctgctcaacggaatggcctctccacaccagggatccttagcacccaaccggtctgcctttaattttacccaggaaggactcacattggggcgaatgaaccaagtttcgccatgctggatgatgaaatggattcccatcccaaagtctgagatggattgcatatacagtgtgcagtcccagagcctcctaaaattctagccatttgtcacacaaccacagcaagaaacgtgttctatatctagagtgtgcccatctgtgtttagtacacatgcatgcatacacacccatacaaacatctgtgtgagggcagttctggagatgagcagagagagaccggaataaactcaatcttttctttcccaagctcctagccaacactatccttgggagaaagaaatttgcagaaactgctaagaccaagtgtggagatgtcaagctagttcacactctgaggctcagaatatgtaggacatgcacaattgtgcagtcctttgggattggaagtgaaacagtctgtgatcccctaccttctagggaactaggacctaggaagaggtaaagattatcaggtatgcaaagcgccccaattcttctgctgccatgggggattttaccccaactccagggttcgaggccaatctgagaatggcttaggattgcaatgtcaaggtattatatcagccccttgcttgaggcttgaggtcataatatccctctaggacttacctgttcccccagatcttgccttgggaccacatttgctgctacttttcctgctgctctatcctatacattgaataatccaagatggtagaactaggttaggaaaaattccacacaaccaaacagtctgccttaaaagtgacccacatttttccatagctcctcactttttagcccttctgcaagagaaaaaccctcatgggtccacatggtgagaagttaagtttcctgtaagtgggcctctcaccctggaaaggagttgagggacatcagatgctggaaccctcactgaaagtccagaatgtctaagccagtgttagattttgtaaacaagtggaacagtgttaaatttctatgatgttggagccatccagagactactggaattgtcgagacttttggattattatccttatccttatcctaatcttcctagcccttcaggctagagtaggctttgatcctgagaaccttgctgttgctctgaggagatataattctgggagaaagaatcttttataagaacagtacagattgttctcaagagggccatcagaaggaagccaaagagttcacagcctcagcaccaacaactcaacatggtcatcatgttttctatatggtttttccagctagcagtactcccttccatacctgtgactgggcagtgcttttctctctcccatgtctagcctccaaaagttaagtgaaaattagtcaactgcacgtggaagcccccaccactttggggatctctttatttcttttcagccagggacctgtccactccctttgaattaatatgggaagaaattaatacaggatgaactggagagaagggttgagtgtggcatactttctgaaacctggagctgggaattgcggagaagggaaggtctagactagttacatcacatagggattactgtaaatcaagtcatctcaagtctagtgaagacagccaacagaaacaaaacctagcatagggatagaaaataccatgcacgtgtgcagccccacctaattcctgcatccaaggcaggtgttgttaatctatcatagcacttaaaaaaaaaaaaaaaaagagaccaaaaataactttaggaaccaccatattatatcactcccaatagcactgacctggtgatcaaaaacacttgagaagacatctattggccatctctggccaattacactaagaaacatatcaaggtgcttttggcacaggtgcccacaaatacggatgcagtgctgagatagtttatgagacttgtaccatttcacaaactctgaaattgggttccatattggcaaggctgccacagttgttaagaataatcctctatgtttcttcctcacaaaaccatatctcatttatatccagaccattacttcactataattacaaggacaaattattagcaagaaataagaatagtattagaagaattgatcctattttgaacccctctccagtatcttcacactcttgtcaactctccaggcctctctcttgccctgagttatcagcctgtgtggtgttaactaccttagaaggtacaagctaagaaatgtaacagtatcaaccctcccagttgcttaattatacccataggtaatacaaaaagctctgaagacccaaagatgacattactaatgatgtgatttcaggagccacagaagaaccttaccagcttccctcaaatcagtccttatcctctttctatcttcactcccatcatcatctattttcacactatccagctaagcaaagattcctggaggctgacttgtatcttcagactcacagagtgaattcagctcttctgaatcaagacccacccagtctctttcattcagacctgttgctaacaaatttatatttgccaaggatattaggcaaaagaggctacttgattggtggccaacctcgtgcccacatggaaggtatctttaatagggtcttttcaaaccttagtggaggagggtcagctcaatttgggcaatgcatttgttcccagtttcattttcttcctgggaattaactcgtcatttcattccttcagtcatcttctgtgtaggtgaccggagcactgagaggcagctctgatgcactattgtgtgtcagcagctcaaaggccctaaaacactgaaggttctgcatctgaagtattagattgttagcagcaaaatatgaaagatgaggtggacagtcctctaagccctatttagggaagcttttccaagccacaatcttaactacctacccaaaggatttgcattacccccagattctgtgccaacaaccttttaaggaaatacagtccttgggaaatgagttttgatggtgaattggggtgttaaggaagggaaagattgtcatagatggtagggctttgaaaatgcagggtatcagctgccactcctggcttcaacacattgagtcactgcctagacggttctcttggtcttattcccatcctggccaatgcttaaatactatttgttgaaaataattctttgagacagatttcagctacctcccttccaggttcgatttaacttggttgtaattgtcaatttgttgttataggtcttacctgtgtgaaagaaagaaaaagaaagaaagaaagaaagagaaaggaaattataaggtcaagttaacagttttgaggttttgtgtttttttctggaactacttcaagtgagaaaataaaaaaaaatggtgacaaagctgtacagatagagataatagaagacaaagagattaaaaggaaataaaaatgcatgattaaaaactaag

SEQ ID NO: 6333 - protein, 1627 aa, Homo sapiens; identical to SEQ ID NO: 648

SEQ ID NO: 6334 - DNA, 10991 bp, Homo sapiens
cgcaaaaaataaataaattagagcatcttttggggggagggaattcagcggatcagtcttaagaggagcttttttttggagcgagaaatcatataaaataaaatgaaataaaacaaggaggaaggcaaccagctgttaggggaaaaataaggcagataaaggagcggggagagaaattaattgccaaccaggaggagttgggctgtatttttcaaaggtggggagagtggagcacacaccttgaggaggaaagcgagaaagaaaagaaaaaagcaagtggaaaggggggctcgcccaagaagggtgaagaagcgaagaaagtcgaggcgccgaggctcccaaagctggcagctccgggtggcggtgcaggggcgaagggggggcggggggaaccgtcggacatgcggctctggagttgggtgctgcacctggggctgctgagcgccgcgctgggctgcgggctggccgagcgtccccgccgggcccggagagacccgcgggccggccgacccccgcgccccgccgccggcccggccacctgcgccacccgggcggcccgcggccgccgcgcctcgccgccgccgccgccgccgccgggcggtgcctgggaagccgtgcgcgtcccccggcggcggcagcagcgggaggcgaggggcgccaccgaggagccgagcccgccgagccgggcgctctatttcagcgggcgaggcgagcagctgcgcctccgggccgacctcgagctgccccgggacgcgttcacgctgcaagtgtggctgcgagcggaggggggccagaggtctccggcagtgatcacagggctgtatgacaaatgttcttatatctcacgtgaccgaggatgggtcgtgggcattcacaccatcagtgaccaagacaacaaagacccacgctactttttctccttgaagacagaccgagcccggcaagtgaccaccatcaatgcccaccgcagctacctcccaggccagtgggtatacctagctgccacctatgatgggcagttcatgaagctctatgtgaatggtgcccaggtggccacctctggggaacaagtgggtggcatattcagcccactgacccagaagtgcaaagtgctcatgttagggggcagtgccctgaatcacaactaccggggctacatcgagcacttcagtctgtggaaggtggccaggactcagcgggagatactgtctgacatggaaacccatggcgcccacactgctctacctcagctcctcctccaggagaactgggacaatgtgaagcatgcctggtcccccatgaaggatggcagcagccccaaagtggaattcagcaatgcccacggctttctgctggacacgagtctggagcctcctctgtgcggacagacattgtgtgacaacacagaggtcattgccagctacaatcagctctcaagtttccgccagcccaaggtggtgcgctaccgcgtggtcaacctctatgaagatgatcataagaacccgacggtgacgcgcgagcaggtggacttccagcaccatcagctggctgaggccttcaagcaatacaacatctcctgggagctggacgtgctggaggtgagcaactcctcccttcgccgccgcctcatcctggccaactgtgacatcagcaagattggggatgagaactgtgaccccgagtgcaaccacacgctgacgggccacgacggcggggattgccgccacctgcgccaccctgccttcgtgaagaagcagcacaacggggtgtgtgacatggactgcaactatgaacggttcaactttgatggtggagagtgctgtgaccctgaaatcaccaatgtcactcagacttgctttgaccccgactctccacacagagcctacttggatgttaatgagctgaagaacattcttaaattggatggatcaacacatctcaatattttctttgcaaaatcctcagaggaggagttggcaggagtagcaacttggccatgggacaaggaggccctgatgcacttaggtggcattgtcttgaacccatctttctatggcatgcctgggcacacccacaccatgatccatgagattggtcacagcctgggcctctatcacgtcttccgaggcatctcagaaatccagtcctgcagtgacccctgcatggagacagagccctccttcgagactggagacctctgcaatgataccaacccagcccctaaacacaagtcctgtggtgacccagggccaggaaatgacacctgtggctttcatagcttcttcaacactccttacaacaacttcatgagctatgcagatgacgactgtacggactccttcacgcccaatcaagtcgccagaatgcactgttacctggacctggtctaccagggctggcagccctccaggaaaccagcgcctgttgccctcgccccccaagttctgggccacacaacggactctgtgacactggagtggttcccacctatagatggccatttctttgaaagagaattgggatcagcatgtcatctttgcctggaagggagaatcctggtgcagtatgcttccaacgcttcctccccaatgccctgcagcccatcaggacactggagccctcgtgaagcagaaggtcatcctgatgttgaacagccctgtaagtccagtgtccgcacctggagcccaaattcagctgtcaacccacacacggttcctccagcctgccctgagcctcaaggctgctacctcgagctggagttcctctaccccttggtccctgagtctctgaccatttgggtgacctttgtctccactgactgggactctagtggagctgtcaatgacatcaaactgttggctgtcagtgggaagaacatctccctgggtcctcagaatgtcttctgtgatgtcccactgaccatcagactctgggacgtgggcgaggaggtgtatggcatccaaatctacacgctggatgagcacctggagatcgatgctgccatgttgacctccactgcagacaccccactctgtctacagtgtaagcccctgaagtataaggtggtccgggaccctcctctccagatggatgtggcctccatcctacatctcaataggaaattcgtagacatggatctaaatcttggcagtgtgtaccagtattgggtcataactatttcaggaactgaagagagtgagccatcacctgctgtcacatacatccatggaagtgggtactgtggcgatggcattatacaaaaagaccaaggtgaacaatgcgacgacatgaataagatcaatggtgatggctgctcccttttctgccgacaagaagtctccttcaattgtattgatgaacccagccggtgctatttccatgatggtgatggggtatgtgaggagtttgaacaaaaaaccagcattaaggactgtggtgtctacacgccccagggattcctggatcagtgggcatccaatgcttcagtatctcatcaagaccagcaatgcccaggctgggtcatcatcggacagccagcagcatcccaggtgtgtcgaaccaaggtgatagatctcagtgaaggcatttcccagcatgcctggtacccttgcaccatcagctacccatattcccagctggctcagaccactttttggctccgggcgtatttttctcaaccaatggttgccgcagctgtcattgtccacctggtgacggatgggacatattatggggaccaaaagcaggagaccatcagcgtgcagctgcttgataccaaagatcagagccacgatctaggcctccatgtcctgagctgcaggaacaatcccctgattatccctgtggtccatgacctcagccagcccttctaccacagccaggcggtacgtgtgagcttcagttcgcccctggtcgccatctcgggggtggccctccgttccttcgacaactttgaccccgtcaccctgagcagctgccagagaggggagacctacagccctgccgagcagagctgcgtgcacttcgcatgtgagaaaactgactgtccagagctggctgtggagaatgcttctctcaattgctccagcagcgaccgctaccacggtgcccagtgtactgtgagctgccggacaggctacgtgctccagatacggcgggatgatgagctgatcaagagccagacgggacccagcgtcacagtgacctgtacagagggcaagtggaataagcaggtggcctgtgagccagtcgactgcagcatcccagatcaccatcaagtctatgctgcctccttctcctgccctgagggcaccacctttggcagtcaatgttccttccagtgccgtcaccctgcacaattgaaaggcaacaacagcctcctgacctgcatggaggatgggctgtggtccttcccagaggccctgtgtgagctcatgtgcctcgctccaccccctgtgcccaatgcagacctccagaccgcccggtgccgagagaataagcacaaggtgggctccttctgcaaatacaaatgcaagcctggataccatgtgcctggatcctctcggaagtcaaagaaacgggccttcaagactcagtgtacccaggatggcagctggcaggagggagcttgtgttcctgtgacctgtgacccacctccaccaaaattccatgggctctaccagtgtactaatggcttccagttcaacagtgagtgtaggatcaagtgtgaagacagtgatgcctcccagggacttgggagcaatgtcattcattgccggaaagatggcacctggaacggctccttccatgtctgccaggagatgcaaggccagtgctcggttccaaacgagctcaacagcaacctcaaactgcagtgccctgatggctatgccatagggtcggagtgtgccacctcgtgcctggaccacaacagcgagtccatcatcctgccaatgaacgtgaccgtgcgtgacatcccccactggctgaaccccacacgggtagagagagttgtctgcactgctggtctcaagtggtatcctcaccctgctctgattcactgtgtcaaaggctgtgagcccttcatgggagacaattattgtgatgccatcaacaaccgagccttttgcaactatgacggtggggattgctgcacctccacagtgaagaccaaaaaggtcaccccattccctatgtcctgtgatctacaaggtgactgtgcttgtcgggacccccaggcccaagaacacagccggaaagacctccggggatacagccatggctaaggaaggacaagaagttgtcaaagaattcccaacgccaggacccacatccctttggtattgatttcacagtcagctgctcaacggaatggcctctccacaccagggatccttagcacccaaccggtctgcctttaattttacccaggaaggactcacattggggcgaatgaaccaagtttcgccatgctggatgatgaaatggattcccatcccaaagtctgagatggattgcatatacagtgtgcagtcccagagcctcctaaaattctagccatttgtcacacaaccacagcaagaaacgtgttctatatctagagtgtgcccatctgtgtttagtacacatgcatgcatacacacccatacaaacatctgtgtgagggcagttctggagatgagcagagagagaccggaataaactcaatcttttctttcccaagctcctagccaacactatccttgggagaaagaaatttgcagaaactgctaagaccaagtgtggagatgtcaagctagttcacactctgaggctcagaatatgtaggacatgcacaattgtgcagtcctttgggattggaagtgaaacagtctgtgatcccctaccttctagggaactaggacctaggaagaggtaaagattatcaggtatgcaaagcgccccaattcttctgctgccatgggggattttaccccaactccagggttcgaggccaatctgagaatggcttaggattgcaatgtcaaggtattatatcagccccttgcttgaggcttgaggtcataatatccctctaggacttacctgttcccccagatcttgccttgggaccacatttgctgctacttttcctgctgctctatcctatacattgaataatccaagatggtagaactaggttaggaaaaattccacacaaccaaacagtctgccttaaaagtgacccacatttttccatagctcctcactttttagcccttctgcaagagaaaaaccctcatgggtccacatggtgagaagttaagtttcctgtaagtgggcctctcaccctggaaaggagttgagggacatcagatgctggaaccctcactgaaagtccagaatgtctaagccagtgttagattttgtaaacaagtggaacagtgttaaatttctatgatgttggagccatccagagactactggaattgtcgagacttttggattattatccttatccttatcctaatcttcctagcccttcaggctagagtaggctttgatcctgagaaccttgctgttgctctgaggagatataattctgggagaaagaatcttttataagaacagtacagattgttctcaagagggccatcagaaggaagccaaagagttcacagcctcagcaccaacaactcaacatggtcatcatgttttctatatggtttttccagctagcagtactcccttccatacctgtgactgggcagtgcttttctctctcccatgtctagcctccaaaagttaagtgaaaattagtcaactgcacgtggaagcccccaccactttggggatctctttatttcttttcagccagggacctgtccactccctttgaattaatatgggaagaaattaatacaggatgaactggagagaagggttgagtgtggcatactttctgaaacctggagctgggaattgcggagaagggaaggtctagactagttacatcacatagggattactgtaaatcaagtcatctcaagtctagtgaagacagccaacagaaacaaaacctagcatagggatagaaaataccatgcacgtgtgcagccccacctaattcctgcatccaaggcaggtgttgttaatctatcatagcacttaaaaaaaaaaaaaaaaagagaccaaaaataactttaggaaccaccatattatatcactcccaatagcactgacctggtgatcaaaaacacttgagaagacatctattggccatctctggccaattacactaagaaacatatcaaggtgcttttggcacaggtgcccacaaatacggatgcagtgctgagatagtttatgagacttgtaccatttcacaaactctgaaattgggttccatattggcaaggctgccacagttgttaagaataatcctctatgtttcttcctcacaaaaccatatctcatttatatccagaccattacttcactataattacaaggacaaattattagcaagaaataagaatagtattagaagaattgatcctattttgaacccctctccagtatcttcacactcttgtcaactctccaggcctctctcttgccctgagttatcagcctgtgtggtgttaactaccttagaaggtacaagctaagaaatgtaacagtatcaaccctcccagttgcttaattatacccataggtaatacaaaaagctctgaagacccaaagatgacattactaatgatgtgatttcaggagccacagaagaaccttaccagcttccctcaaatcagtccttatcctctttctatcttcactcccatcatcatctattttcacactatccagctaagcaaagattcctggaggctgacttgtatcttcagactcacagagtgaattcagctcttctgaatcaagacccacccagtctctttcattcagacctgttgctaacaaatttatatttgccaaggatattaggcaaaagaggctacttgattggtggccaacctcgtgcccacatggaaggtatctttaatagggtcttttcaaaccttagtggaggagggtcagctcaatttgggcaatgcatttgttcccagtttcattttcttcctgggaattaactcgtcatttcattccttcagtcatcttctgtgtaggtgaccggagcactgagaggcagctctgatgcactattgtgtgtcagcagctcaaaggccctaaaacactgaaggttctgcatctgaagtattagattgttagcagcaaaatatgaaagatgaggtggacagtcctctaagccctatttagggaagcttttccaagccacaatcttaactacctacccaaaggatttgcattacccccagattctgtgccaacaaccttttaaggaaatacagtccttgggaaatgagttttgatggtgaattggggtgttaaggaagggaaagattgtcatagatggtagggctttgaaaatgcagggtatcagctgccactcctggcttcaacacattgagtcactgcctagacggttctcttggtcttattcccatcctggccaatgcttaaatactatttgttgaaaataattctttgagacagatttcagctacctcccttccaggttcgatttaacttggttgtaattgtcaatttgttgttataggtcttacctgtgtgaaagaaagaaaaagaaagaaagaaagaaagagaaaggaaattataaggtcaagttaacagttttgaggttttgtgtttttttctggaactacttcaagtgagaaaataaaaaaaaatggtgacaaagctgtacagatagagataatagaagacaaagagattaaaaggaaataaaaatgcatgattaaaaactaagaataaaaaacctatttttatgtttcctaaaggaaattgtttattctacagcctcagtaggtagacacaaacataaagatttccctagaagacatagagtgggatttgataacactgtctgttattttctgtacattgtggtaggtccaggaaatatgacattttcccccttgatgtgttattgttgttgttgggtggggtgggcattttgtttatttgtttggtggcaatcagtggtagtagggagtgggagggcttatattggtttttccagctattaaggggacatattgtgtcgttgtgcttttcacgttataaaatgtttatatttaccagtacagcactgggctttataaagactgcactcagaaccacactgcacagtccagttttttaaaaagctgctacatgacagacaggtaatcccactgagtgagttttgagaaacaaatcaaacgaagtaaacaagaaacataaaaaccaaatagcaaatgaataaaagcctgttcttgtaacttattcaacttttgccaaattcctaccaatcacttgctttttaaaagaaatgtataatagccaaaagagaaattatgtccctgttgtacagaagttagaatttttgactccaggcagcagtttgctcagtgatcttgaacaagttatccaattgcctctacatttgcatcagtttctctagctgcaaaatggggataatactatatacctacctcacagtgggagggcaggagattttgaggccctgaggttttaggtgggctgtgagggccaacgcttgacacaaagtccatgggttattattcaagaatgcacaggcccatcggccttttagaaagacaagacagggagtgcttgtttgatatttcaaggaataaagccggagctcctgaattgtagtccaccttaaaagagagacctgtattggagaatattttatttttttggcaaatttgatcttaccctttaccagttctataatttggttaaaagctgattatgtcctacaatgtcaaagtcagctaactgtcgtctacttaagacttctggtcatttccaacttatagaggaagggagtctctaaaatctcttcttcagaaggcacctcacttctcagacttaaaattccacatcaagtgttccattaaaagaagataaggcattctgagtgcaaacaaatgggggcttcttaaactacacaccagcagtcagtgaggaaaactttgaacaattattgagttgctttcttgggtctctataatcaataacctgtctgcagatatctatctatataaagatattatatataaatataaatttacatatatatgcacatgtatatatagttgtacatatatgtgtgtatatatatacttaaatgtaatatttacaaaataaaactgtgatctcgtctagagaaaatgtattcatattacaaactgctcttccatatttatgtaccatattatacctttttattattgttataattattatgggtatttctaattaatatgatgttgaaacctgtttggcaccttctggaagctaccaaaaaaatgacactccattgaagtgcttaaaagctgttctcataagaattcttctggcctattgtaaaaaagaaaaaaaaaaagaaaaagaagaaagacacaaagaaaataatctaaacaccaaaaactaaacacaattccaatcctttttctgtacctcacgcgcataaatttgctgctcctatttttttttctgtttatgtgtttttatggatctaagttaaatcttttggcaatatataaaaatgtaaatagtaaactttatttattaagaatgtcatcttttttaatttatatttacacaattgttcatctaatttattttttctatacagttttaaatactcagacatattttgctgttcatgatatttttatcctgttctcatggatttgttttcccatactgttttctctgatctcaattacaggttggatctcacaaataataatgtcagagacagaaatattttgccactgttgattactatactttaaagttctatattatgaaaatatataatagcttgtacgcttcag

SEQ ID NO: 6335 - protein, 1627 aa, Homo sapiens; identical to SEQ ID NO: 648

SEQ ID NO: 6336 - DNA, 448 bp, Homo sapiens
aactacaccctatagacaccttagacaccagcttaaaacctggaaaggttacatttagtatgtttatgttcttacccatcatccacattccattaagacaccttagtatccagagaactgtgataaatgctgtaggggtccaagatataatctctgtcttcaaggtgcttgtatcctgtgattcaatgacattttgttacagtcattcaagagaagttaggaaaggtttaatgatggagaagggatgcaataggcttttagcataagcaggctttgtaataatagaaaagagctggtgggctggccagacatgtagtgataatagggtaaataaattgaagtgggaagatgttgaggagatgcaagaaagatgtgagtctggttggggcttcatgaaggtagatgccacagttttttcttcagactgtagacactgaagactcgggct

SEQ ID NO: 6337 - protein, 68 aa, Homo sapiens
MFMFLPIIHIPLRHLSIQRTVINAVGVQDIISVFKVLVSCDSMTFCYSHSREVRKGLMMEKGCNRLLA

SEQ ID NO: 6338 - DNA, 657 bp, Homo sapiens
ggttcagaaactgttgtcatgtctaacttttggtgattggtttgtacaaacttatgtcttgtttatggatatgtataatttgaatgtaagaagagttcctgttggtgttggtgggtggaacatggaggaacacagagttcttgcaaactcactttttcttgcctctttggtgtcttttaagccaacccatgactggctgtgccagtacagtgtggttaccagactgagaagatatttgcaggaactaggagacagagggtataaggagaaagcaaacaatgggcagtgttggaaacttaaattccaattgtgactgtcactgtcttgcgtgtgatgttggataagccccatttcctctctgggtctcatttccccattgataaaacatggttaataatatggtgctatttccttcagaaaattgcttggtggtcaaaatgagataaaggatgctaaagaattttgtaaattaaaaagtgataaaggcttagagaaccttcttcataccttactaagttcaagttgctacttagcaatgttttcctttttcttaatgctgtctctcccaaggagttctcacagagcccagccagtagcacacattagtgatggtttcctgctcttcccctcttagaataataaagggtctccccatgt

SEQ ID NO: 6339 - protein, 82 aa, Homo sapiens
MDMYNLNVRRVPVGVGGWNMEEHRVLANSLFLASLVSFKPTHDWLCQYSVVTRLRRYLQELGDRGYKEKANNGQCWKLKFQL

SEQ ID NO: 6340 - DNA, 4934 bp, Homo sapiens
tgaaactccctagattttactgtataatgtcaatggactcattatttgtacaacagctgatgtatttaggacttgttgattcacttaattggtaactgtactacattcataacttcaacaactgaaaacaataggtcagtgtctgctgtttatgcataaatagtcacatcggagcaggatatgtctgaatggcagaatatgttagtctgaggaggaatctggcatgtgaatggctccattgcttgccatactgagatcctgaggtgcagaggcaattcccggaggactacagtgaccaggaagttctacagactttgaccaagttttgtttccccttctatgtggacagcctcacagttagccaagttggccagaacttcacattcgtgctcactgacattgacagcaaacagagattcgggttctgccgcttatcttcaggagcgaagagctgcttctgtatcttaaggaaaatcagtggaatgagcttcttgaaactctgcacaaacttcccatccctgacccaggagtgtctgtccatctcagcgtgcattcttattttactgtgcctgataccagagaacttcccagcatacctgagaatagaaatctgacagaatattttgtggctgtggatgttaacaacatgttgcatctgtacgccagtatgctgtacgaacgccggatactcatcatttgcagcaaactcagcactctgactgcctgcatccacgggtctgcggcgatgctctaccccatgtactggcagcacgtgtacatccccgtgctgccgccgcatctgctggactactgctgtgctcccatgccctacctcataggaatccatttaagtttaatggagaaagtcagaaacatggccctggatgatgtcgtgatcctgaatgtggacaccaacaccctggaaacccccttcgatgacctccagagcctcccaaacgacgtgatctcttccctgaagaacaggctgaaaaaggtctccacaaccactggggatggtgtggccagagcgttcctcaaggcccaggctgctttcttcggtagctaccgaaacgctctgaaaatcgagccgaaaggaagtggagcaattctgaatactgtaaagaccaaagcaaatccggccatgaagactgtctacaagttcgcaaaagatcatgcaaaaatgggaataaaagaggtgaaaaaccgcttgaagcaaaaggacattgccgagaatggctgcgcccccaccccagaagagcagctgccaaagactgcaccgtccccactggtggaggccaaggaccccaagctccgagaagaccggcggccaatcacagtccactttggacaggtgcgcccacctcgtccacatgttgttaagagaccaaagagcaacatcgcagtggaaggccggaggacgtctgtgccgagccctgagcacctggtaaagcccttgcgacactatgcggtcttcctctccgaagactcctctgatgatgaatgccagcgggaagagggcccgagctctggcttcaccgagagctttttcttctccgctccctttgaatggccgcagccgtatcggacactcagggagtcagacagcgcggaaggcgacgaggcagagagtccagagcagcaagtgcggaagtccacaggccctgtcccagctccccctgaccgggctgccagcatcgaccttctggaagacgtcttcagcaacctggacatggaggccgcactgcagccactgggccaggccaagagcttagaggaccttcgtgcccccaaagacctgagggagcagccagggacctttgactatcagaggctggatctgggcgggagtgagaggagccgcggggtgacagtggccttgaagcttacccacccgtacaacaagctctggagcctgggccaggacgacatggccatccccagcaagcccccagctgcctcccctgagaagccctcagccctgctcggaaactccctggccctgcctcgaaggccccagaaccgggacagcatcctgaaccccagtgacaaggaggaggtgcccacccctactctgggcagcatcaccatcccccggccccaaggcaggaagaccccagagctgggcatcgtgcctccaccgcccattccccgcccggccaagctccaggctgccggcgccgcacttggtgacgtctcagagcggctgcagacggatcgggacaggcgagctgccctgagtccagggctcctgcctggtgttgtcccccaaggccccactgaactgctccagccgctcagccctggccccggggctgcaggcacgagcagtgacgccctgctcgccctcctggacccgctcagcacagcctggtcaggcagcaccctcccgtcacgccccgccaccccgaatgtagccaccccattcaccccccaattcagcttcccccctgcagggacacccaccccattcccacagccaccactcaacccctttgtcccatccatgccagcagccccacccaccctgcccctggtctccacaccagccgggcctttcggggcccctccagcttccctggggccggcttttgcgtccggcctcctgctgtccagtgctggcttctgtgcccctcacaggtctcagcccaacctctccgccctctccatgcccaacctctttggccagatgcccatgggcacccacacgagccccctacagccgctgggtcccccagcagttgccccgtcgaggatccgaacgttgcccctggcccgctcaagtgccagggctgctgagaccaagcaggggctggccctgaggcctggagaccccccgcttctgcctcccaggccccctcaaggcctggagccaacactgcagccctctgctcctcaacaggccagagacccctttgaggatttgttacagaaaaccaagcaagacgtgagcccgagtccggccctggccccggccccagactcggtggagcagctcaggaagcagtgggagaccttcgagtgagccgggccctgagggtgggggatgcaccgaggcccgagggtccgtccactgctgcggttccgaggctcccccgccactctctctctgcccaggttctgctggtgggaagggatgggacccctctctgctgccccctcctcccctccacactgcccatctctgatgtctggccctggggaatggcaccagttccagcctgggaatcaacccagttcctgagtgcccatcccaccccgcggttgcctctcctcggcacccttgattgggttttgcactaaagaggtcagctgggccaatgatattgctccagaccgagtcctacccaccttcccccggaagtgtcccaagaggctccgaaggcctcccctccgagcccagctctcctgtctcctccacagccaggccctgcacgcccacctcctcggacacaggtgacagggttaccctccagtttgagctcatctgcacgagacacaggtagcttggggttgaagttaggactcctcctgggctggaggatttacctggtggggcacttccagactgtttctagcaatatacacacacgttctttcctgtgtcttcaccccaaaacttcagttgattctgacctgggaggatctggggaccagggggtcttgggctgccttgtgatacacagccccagccaccctgcacgggggctgcgagcaccagcaactttgatttatagaaggaaaatggaaacccccatctgagtattttgggaggagcccccagccctcatccagctctggcacgctgatacctccaggtactcccctcactgtcaaagctggggctcagcctcttgtcatctggagctttgtgggcaaagctgagaagctgcaacccagatttcaacccaaaaaggtcaagctgaatgcctcagactgatgtggaaggcagctggccttcctgggttggaacgaggcagtggccctgagccccttctccagggccaggtagaaaggacaaacttggtctctgcctcggggaagcaggaggagggctagaagccagtccctccccacctgcccagagctccaggccagcacagaaattcctgaggccaacgtcaccaaagttagattgaatgtttattatctttctttttcctttttaccttattgatttgatgaatcttgaaatggattcatttccataaaccaagttaaagtatggcccgaccatttaagaaaacaaccatctgagacacgcaggaaattgtgagcatttcgacccgagctctcatttcctatttgtgaagggtcagacacagtctacccaggggtgtctgggggacaagggggtctctggagatgtcacccagggagccccctctatgtctgagaggctgccactgctgcacatgctcagtgaggcttggcggccatcctggcacatggctcttcctgggtcaaccgtgacctgtctggctcaggaatgggctctggctgctgggggagccgtgtcactcctgggccatgggggcacctcctgggcacttaggtgtttcagcatagattccagtttcgcaccctgggcagacccccaggccccatccgggatagggcagaggaggtgctggcggccccagggaaggagggtgtgtaccccaaggccccctggctgtgctgaggggctggggtgagcgctccatgttcacatgagcactgctgcctcttcacttgtgggactttttgcaaacccaaggatgaactttgtgtgcattcaataaaatcatcttggggaagaggctggcatccccgtgtccttgaagcttttgggtcggggaggccccacacgggcccggagccatcctcaccacctgctcctgtagaggcaggggccaggcgcagagcagttagggaaggagtcaactccccgcacc

SEQ ID NO: 6341 - protein, 791 aa, Homo sapiens
MLHLYASMLYERRILIICSKLSTLTACIHGSAAMLYPMYWQHVYIPVLPPHLLDYCCAPMPYLIGIHLSLMEKVRNMALDDVVILNVDTNTLETPFDDLQSLPNDVISSLKNRLKKVSTTTGDGVARAFLKAQAAFFGSYRNALKIEPKGSGAILNTVKTKANPAMKTVYKFAKDHAKMGIKEVKNRLKQKDIAENGCAPTPEEQLPKTAPSPLVEAKDPKLREDRRPITVHFGQVRPPRPHVVKRPKSNIAVEGRRTSVPSPEHLVKPLRHYAVFLSEDSSDDECQREEGPSSGFTESFFFSAPFEWPQPYRTLRESDSAEGDEAESPEQQVRKSTGPVPAPPDRAASIDLLEDVFSNLDMEAALQPLGQAKSLEDLRAPKDLREQPGTFDYQRLDLGGSERSRGVTVALKLTHPYNKLWSLGQDDMAIPSKPPAASPEKPSALLGNSLALPRRPQNRDSILNPSDKEEVPTPTLGSITIPRPQGRKTPELGIVPPPPIPRPAKLQAAGAALGDVSERLQTDRDRRAALSPGLLPGVVPQGPTELLQPLSPGPGAAGTSSDALLALLDPLSTAWSGSTLPSRPATPNVATPFTPQFSFPPAGTPTPFPQPPLNPFVPSMPAAPPTLPLVSTPAGPFGAPPASLGPAFASGLLLSSAGFCAPHRSQPNLSALSMPNLFGQMPMGTHTSPLQPLGPPAVAPSRIRTLPLARSSARAAETKQGLALRPGDPPLLPPRPPQGLEPTLQPSAPQQARDPFEDLLQKTKQDVSPSPALAPAPDSVEQLRKQWETFE

SEQ ID NO: 6342 - DNA, 2515 bp, Homo sapiens
ttcgccgggctggagcgagtacattaacccctggaggcggcggcggcggcgagggagcgagcctcgagcgggcgggccccagccatgccagcagccccacccaccctgcccctggtctccacaccagccgggcctttcggggcccctccagcttccctggggccggcttttgcgtccggcctcctgctgtccagtgctggcttctgtgcccctcacaggtctcagcccaacctctccgccctctccatgcccaacctctttggccagatgcccatgggcacccacacgagccccctacagccgctgggtcccccagcagttgccccgtcgaggatccgaacgttgcccctggcccgctcaagtgccagggctgctgagaccaagcaggggctggccctgaggcctggagaccccccgcttctgcctcccaggccccctcaaggcctggagccaacactgcagccctctgctcctcaacaggccagagacccctttgaggatttgttacagaaaaccaagcaagacgtgagcccgagtccggccctggccccggccccagactcggtggagcagctcaggaagcagtgggagaccttcgagtgagccgggccctgagggtgggggatgcaccgaggcccgagggtccgtccactgctgcggttccgaggctcccccgccactctctctctgcccaggttctgctggtgggaagggatgggacccctctctgctgccccctcctcccctccacactgcccatctctgatgtctggccctggggaatggcaccagttccagcctgggaatcaacccagttcctgagtgcccatcccaccccgcggttgcctctcctcggcacccttgattgggttttgcactaaagaggtcagctgggccaatgatattgctccagaccgagtcctacccaccttcccccggaagtgtcccaagaggctccgaaggcctcccctccgagcccagctctcctgtctcctccacagccaggccctgcacgcccacctcctcggacacaggtgacagggttaccctccagtttgagctcatctgcacgagacacaggtagcttggggttgaagttaggactcctcctgggctggaggatttacctggtggggcacttccagactgtttctagcaatatacacacacgttctttcctgtgtcttcaccccaaaacttcagttgattctgacctgggaggatctggggaccagggggtcttgggctgccttgtgatacacagccccagccaccctgcacgggggctgcgagcaccagcaactttgatttatagaaggaaaatggaaacccccatctgagtattttgggaggagcccccagccctcatccagctctggcacgctgatacctccaggtactcccctcactgtcaaagctggggctcagcctcttgtcatctggagctttgtgggcaaagctgagaagctgcaacccagatttcaacccaaaaaggtcaagctgaatgcctcagactgatgtggaaggcagctggccttcctgggttggaacgaggcagtggccctgagccccttctccagggccaggtagaaaggacaaacttggtctctgcctcggggaagcaggaggagggctagaagccagtccctccccacctgcccagagctccaggccagcacagaaattcctgaggccaacgtcaccaaagttagattgaatgtttattatctttctttttcctttttaccttattgatttgatgaatcttgaaatggattcatttccataaaccaagttaaagtatggcccgaccatttaagaaaacaaccatctgagacacgcaggaaattgtgagcatttcgacccgagctctcatttcctatttgtgaagggtcagacacagtctacccaggggtgtctgggggacaagggggtctctggagatgtcacccagggagccccctctatgtctgagaggctgccactgctgcacatgctcagtgaggcttggcggccatcctggcacatggctcttcctgggtcaaccgtgacctgtctggctcaggaatgggctctggctgctgggggagccgtgtcactcctgggccatgggggcacctcctgggcacttaggtgtttcagcatagattccagtttcgcaccctgggcagacccccaggccccatccgggatagggcagaggaggtgctggcggccccagggaaggagggtgtgtaccccaaggccccctggctgtgctgaggggctggggtgagcgctccatgttcacatgagcactgctgcctcttcacttgtgggactttttgcaaacccaaggatgaactttgtgtgcattcaataaaatcatcttggggaagaggctggcatccccgtgtccttgaagcttttgggtcggggaggccccacacgggcccggagccatcctcaccacctgctcctgtagaggcaggggccaggcgcagagcagttagggaaggagtcaactccccgcacc

SEQ ID NO: 6343 - protein, 172 aa, Homo sapiens [sequence omitted]

SEQ ID NO: 6344 - DNA, 2397 bp, Homo sapiens
ttcgccgggctggagcgagtacattaacccctggaggcggcggcggcggcgagggagcgagcctcgagcgggcgggccccagcttctgtgcccctcacaggtctcagcccaacctctccgccctctccatgcccaacctctttggccagatgcccatgggcacccacacgagccccctacagccgctgggtcccccagcagttgccccgtcgaggatccgaacgttgcccctggcccgctcaagtgccagggctgctgagaccaagcaggggctggccctgaggcctggagaccccccgcttctgcctcccaggccccctcaaggcctggagccaacactgcagccctctgctcctcaacaggccagagacccctttgaggatttgttacagaaaaccaagcaagacgtgagcccgagtccggccctggccccggccccagactcggtggagcagctcaggaagcagtgggagaccttcgagtgagccgggccctgagggtgggggatgcaccgaggcccgagggtccgtccactgctgcggttccgaggctcccccgccactctctctctgcccaggttctgctggtgggaagggatgggacccctctctgctgccccctcctcccctccacactgcccatctctgatgtctggccctggggaatggcaccagttccagcctgggaatcaacccagttcctgagtgcccatcccaccccgcggttgcctctcctcggcacccttgattgggttttgcactaaagaggtcagctgggccaatgatattgctccagaccgagtcctacccaccttcccccggaagtgtcccaagaggctccgaaggcctcccctccgagcccagctctcctgtctcctccacagccaggccctgcacgcccacctcctcggacacaggtgacagggttaccctccagtttgagctcatctgcacgagacacaggtagcttggggttgaagttaggactcctcctgggctggaggatttacctggtggggcacttccagactgtttctagcaatatacacacacgttctttcctgtgtcttcaccccaaaacttcagttgattctgacctgggaggatctggggaccagggggtcttgggctgccttgtgatacacagccccagccaccctgcacgggggctgcgagcaccagcaactttgatttatagaaggaaaatggaaacccccatctgagtattttgggaggagcccccagccctcatccagctctggcacgctgatacctccaggtactcccctcactgtcaaagctggggctcagcctcttgtcatctggagctttgtgggcaaagctgagaagctgcaacccagatttcaacccaaaaaggtcaagctgaatgcctcagactgatgtggaaggcagctggccttcctgggttggaacgaggcagtggccctgagccccttctccagggccaggtagaaaggacaaacttggtctctgcctcggggaagcaggaggagggctagaagccagtccctccccacctgcccagagctccaggccagcacagaaattcctgaggccaacgtcaccaaagttagattgaatgtttattatctttctttttcctttttaccttattgatttgatgaatcttgaaatggattcatttccataaaccaagttaaagtatggcccgaccatttaagaaaacaaccatctgagacacgcaggaaattgtgagcatttcgacccgagctctcatttcctatttgtgaagggtcagacacagtctacccaggggtgtctgggggacaagggggtctctggagatgtcacccagggagccccctctatgtctgagaggctgccactgctgcacatgctcagtgaggcttggcggccatcctggcacatggctcttcctgggtcaaccgtgacctgtctggctcaggaatgggctctggctgctgggggagccgtgtcactcctgggccatgggggcacctcctgggcacttaggtgtttcagcatagattccagtttcgcaccctgggcagacccccaggccccatccgggatagggcagaggaggtgctggcggccccagggaaggagggtgtgtaccccaaggccccctggctgtgctgaggggctggggtgagcgctccatgttcacatgagcactgctgcctcttcacttgtgggactttttgcaaacccaaggatgaactttgtgtgcattcaataaaatcatcttggggaagaggctggcatccccgtgtccttgaagcttttgggtcggggaggccccacacgggcccggagccatcctcaccacctgctcctgtagaggcaggggccaggcgcagagcagttagggaaggagtcaactccccgcacc

SEQ ID NO: 6345 - protein, 118 aa, Homo sapiens [sequence omitted]

SEQ ID NO: 6346 - DNA, 5175 bp, Homo sapiens
cgcgcgccgggcacgcgcgccggcgaccatggcgttcgccgggctggagcgagtacattaacccctggaggcggcggcggcggcgagggagcgagcctcgagcgggcgggccccagcctgagggaagggaggaaggggcggggagagcgccagagggaggccggtcggccgcgggcgggcgggcagcgcagcgccgagcggggcccgcgggcccatgaggaggcctggggaccatgggctccaggatcaagcagaatccagagaccacatttgaagtatatgttgaagtggcctatcccaggacaggtggcactctttcagatcctgaggtgcagaggcaattcccggaggactacagtgaccaggaagttctacagactttgaccaagttttgtttccccttctatgtggacagcctcacagttagccaagttggccagaacttcacattcgtgctcactgacattgacagcaaacagagattcgggttctgccgcttatcttcaggagcgaagagctgcttctgtatcttaagctatctcccctggttcgaggtattttataagctgcttaacatcctggcagattacacgacaaaaagacaggaaaatcagtggaatgagcttcttgaaactctgcacaaacttcccatccctgacccaggagtgtctgtccatctcagcgtgcattcttattttactgtgcctgataccagagaacttcccagcatacctgagaatagaaatctgacagaatattttgtggctgtggatgttaacaacatgttgcatctgtacgccagtatgctgtacgaacgccggatactcatcatttgcagcaaactcagcactctgactgcctgcatccacgggtctgcggcgatgctctaccccatgtactggcagcacgtgtacatccccgtgctgccgccgcatctgctggactactgctgtgctcccatgccctacctcataggaatccatttaagtttaatggagaaagtcagaaacatggccctggatgatgtcgtgatcctgaatgtggacaccaacaccctggaaacccccttcgatgacctccagagcctcccaaacgacgtgatctcttccctgaagaacaggctgaaaaaggtctccacaaccactggggatggtgtggccagagcgttcctcaaggcccaggctgctttcttcggtagctaccgaaacgctctgaaaatcgagccggaggagccgatcactttctgtgaggaagccttcgtgtcccactaccgctccggagccatgaggcagttcctgcagaacgccacacagctgcagctcttcaagcagtttattgatggtcgattagatcttctcaattccggcgaaggtttcagtgatgtttttgaagaggaaatcaacatgggcgagtacgctggcagtgacaaactgtaccatcagtggctctccactgtccggaaaggaagtggagcaattctgaatactgtaaagaccaaagcaaatccggccatgaagactgtctacaagttcgcaaaagatcatgcaaaaatgggaataaaagaggtgaaaaaccgcttgaagcaaaaggacattgccgagaatggctgcgcccccaccccagaagagcagctgccaaagactgcaccgtccccactggtggaggccaaggaccccaagctccgagaagaccggcggccaatcacagtccactttggacaggtgcgcccacctcgtccacatgttgttaagagaccaaagagcaacatcgcagtggaaggccggaggacgtctgtgccgagccctgagcagccgcagccgtatcggacactcagggagtcagacagcgcggaaggcgacgaggcagagagtccagagcagcaagtgcggaagtccacaggccctgtcccagctccccctgaccgggctgccagcatcgaccttctggaagacgtcttcagcaacctggacatggaggccgcactgcagccactgggccaggccaagagcttagaggaccttcgtgcccccaaagacctgagggagcagccagggacctttgactatcagaggctggatctgggcgggagtgagaggagccgcggggtgacagtggccttgaagcttacccacccgtacaacaagctctggagcctgggccaggacgacatggccatccccagcaagcccccagctgcctcccctgagaagccctcagccctgctcggaaactccctggccctgcctcgaaggccccagaaccgggacagcatcctgaaccccagtgacaaggaggaggtgcccacccctactctgggcagcatcaccatcccccggccccaaggcaggaagaccccagagctgggcatcgtgcctccaccgcccattccccgcccggccaagctccaggctgccggcgccgcacttggtgacgtctcagagcggctgcagacggatcgggacaggcgagctgccctgagtccagggctcctgcctggtgttgtcccccaaggccccactgaactgctccagccgctcagccctggccccggggctgcaggcacgagcagtgacgccctgctcgccctcctggacccgctcagcacagcctggtcaggcagcaccctcccgtcacgccccgccaccccgaatgtagccaccccattcaccccccaattcagcttcccccctgcagggacacccaccccattcccacagccaccactcaacccctttgtcccatccatgccagcagccccacccaccctgcccctggtctccacaccagccgggcctttcggggcccctccagcttccctggggccggcttttgcgtccggcctcctgctgtccagtgctggcttctgtgcccctcacaggtctcagcccaacctctccgccctctccatgcccaacctctttggccagatgcccatgggcacccacacgagccccctacagccgctgggtcccccagcagttgccccgtcgaggatccgaacgttgcccctggcccgctcaagtgccagggctgctgagaccaagcaggggctggccctgaggcctggagaccccccgcttctgcctcccaggccccctcaaggcctggagccaacactgcagccctctgctcctcaacaggccagagacccctttgaggatttgttacagaaaaccaagcaagacgtgagcccgagtccggccctggccccggccccagactcggtggagcagctcaggaagcagtgggagaccttcgagtgagccgggccctgagggtgggggatgcaccgaggcccgagggtccgtccactgctgcggttccgaggctcccccgccactctctctctgcccaggttctgctggtgggaagggatgggacccctctctgctgccccctcctcccctccacactgcccatctctgatgtctggccctggggaatggcaccagttccagcctgggaatcaacccagttcctgagtgcccatcccaccccgcggttgcctctcctcggcacccttgattgggttttgcactaaagaggtcagctgggccaatgatattgctccagaccgagtcctacccaccttcccccggaagtgtcccaagaggctccgaaggcctcccctccgagcccagctctcctgtctcctccacagccaggccctgcacgcccacctcctcggacacaggtgacagggttaccctccagtttgagctcatctgcacgagacacaggtagcttggggttgaagttaggactcctcctgggctggaggatttacctggtggggcacttccagactgtttctagcaatatacacacacgttctttcctgtgtcttcaccccaaaacttcagttgattctgacctgggaggatctggggaccagggggtcttgggctgccttgtgatacacagccccagccaccctgcacgggggctgcgagcaccagcaactttgatttatagaaggaaaatggaaacccccatctgagtattttgggaggagcccccagccctcatccagctctggcacgctgatacctccaggtactcccctcactgtcaaagctggggctcagcctcttgtcatctggagctttgtgggcaaagctgagaagctgcaacccagatttcaacccaaaaaggtcaagctgaatgcctcagactgatgtggaaggcagctggccttcctgggttggaacgaggcagtggccctgagccccttctccagggccaggtagaaaggacaaacttggtctctgcctcggggaagcaggaggagggctagaagccagtccctccccacctgcccagagctccaggccagcacagaaattcctgaggccaacgtcaccaaagttagattgaatgtttattatctttctttttcctttttaccttattgatttgatgaatcttgaaatggattcatttccataaaccaagttaaagtatggcccgaccatttaagaaaacaaccatctgagacacgcaggaaattgtgagcatttcgacccgagctctcatttcctatttgtgaagggtcagacacagtctacccaggggtgtctgggggacaagggggtctctggagatgtcacccagggagccccctctatgtctgagaggctgccactgctgcacatgctcagtgaggcttggcggccatcctggcacatggctcttcctgggtcaaccgtgacctgtctggctcaggaatgggctctggctgctgggggagccgtgtcactcctgggccatgggggcacctcctgggcacttaggtgtttcagcatagattccagtttcgcaccctgggcagacccccaggccccatccgggatagggcagaggaggtgctggcggccccagggaaggagggtgtgtaccccaaggccccctggctgtgctgaggggctggggtgagcgctccatgttcacatgagcactgctgcctcttcacttgtgggactttttgcaaacccaaggatgaactttgtgtgcattcaataaaatcatcttggggaagaggctggcatccccgtgtccttgaagcttttgggtcggggaggccccacacgggcccggagccatcctcaccacctgctcctgtagaggcaggggccaggcgcagagcagttagggaaggagtcaactccccgcacc

SEQ ID NO: 6347 - protein, 1009 aa, Homo sapiens; identical to SEQ ID NO: 650

SEQ ID NO: 6348 - DNA, 4797 bp, Homo sapiens
tgaaactccctagattttactgtataatgtcaatggactcattatttgtacaacagctgatgtatttaggacttgttgattcacttaattggtaactgtactacattcataacttcaacaactgaaaacaataggtcagtgtctgctgtttatgcataaatagtcacatcggagcaggatatgtctgaatggcagaatatgttagtctgaggaggaatctggcatgtgaatggctccattgcttgccatactgagatcctgaggtgcagaggcaattcccggaggactacagtgaccaggaagttctacagactttgaccaagttttgtttccccttctatgtggacagcctcacagttagccaagttggccagaacttcacattcgtgctcactgacattgacagcaaacagagattcgggttctgccgcttatcttcaggagcgaagagctgcttctgtatcttaaggaaaatcagtggaatgagcttcttgaaactctgcacaaacttcccatccctgacccaggagtgtctgtccatctcagcgtgcattcttattttactgtgcctgataccagagaacttcccagcatacctgagaatagaaatctgacagaatattttgtggctgtggatgttaacaacatgttgcatctgtacgccagtatgctgtacgaacgccggatactcatcatttgcagcaaactcagcactctgactgcctgcatccacgggtctgcggcgatgctctaccccatgtactggcagcacgtgtacatccccgtgctgccgccgcatctgctggactactgctgtgctcccatgccctacctcataggaatccatttaagtttaatggagaaagtcagaaacatggccctggatgatgtcgtgatcctgaatgtggacaccaacaccctggaaacccccttcgatgacctccagagcctcccaaacgacgtgatctcttccctgaagaacaggctgaaaaaggtctccacaaccactggggatggtgtggccagagcgttcctcaaggcccaggctgctttcttcggtagctaccgaaacgctctgaaaatcgagccgaaaggaagtggagcaattctgaatactgtaaagaccaaagcaaatccggccatgaagactgtctacaagttcgcaaaagatcatgcaaaaatgggaataaaagaggtgaaaaaccgcttgaagcaaaaggacattgccgagaatggctgcgcccccaccccagaagagcagctgccaaagactgcaccgtccccactggtggaggccaaggaccccaagctccgagaagaccggcggccaatcacagtccactttggacaggtgcgcccacctcgtccacatgttgttaagagaccaaagagcaacatcgcagtggaaggccggaggacgtctgtgccgagccctgagcacctggtaaagcccttgcgacactatgcggtcttcctctccgaagactcctctgatgatgaatgccagcgggaagagggcccgagctctggcttcaccgagagctttttcttctccgctccctttgaatggccgcagccgtatcggacactcagggagtcagacagcgcggaaggcgacgaggcagagagtccagagcagcaagtgcggaagtccacaggccctgtcccagctccccctgaccgggctgccagcatcgaccttctggaagacgtcttcagcaacctggacatggaggccgcactgcagccactgggccaggccaagagcttagaggaccttcgtgcccccaaagacctgagggagcagccagggacctttgactatcagaggctggatctgggcgggagtgagaggagccgcggggtgacagtggccttgaagcttacccacccgtacaacaagctctggagcctgggccaggacgacatggccatccccagcaagcccccagctgcctcccctgagaagccctcagccctgctcggaaactccctggccctgcctcgaaggccccagaaccgggacagcatcctgaaccccagtgacaaggaggaggtgcccacccctactctgggcagcatcaccatcccccggccccaaggcaggaagaccccagagctgggcatcgtgcctccaccgcccattccccgcccggccaagctccaggctgccggcgccgcacttggtgacgtctcagagcggctgcagacggatcgggacaggcgagctgccctgagtccagggctcctgcctggtgttgtcccccaaggccccactgaactgctccagccgctcagccctggccccggggctgcaggcacgagcagtgacgccctgctcgccctcctggacccgctcagcacagcctggtcaggcagcaccctcccgtcacgccccgccaccccgaatgtagccaccccattcaccccccaattcagcttcccccctgcagggacacccaccccattcccacagccaccactcaacccctttgtcccatccatgccagcagccccacccaccctgcccctggtctccacaccagccgggcctttcggggcccctccagcttccctggggccggcttttgcgtccggcctcctgctgtccagtgctggcttctgtgcccctcacaggtctcagcccaacctctccgccctctccatgcccaacctctttggccagatgcccatgggcacccacacgagccccctacagccgctgggtcccccagcagttgccccgtcgaggatccgaacgttgcccctggcccgctcaagtgccagggctgctgagaccaagcaggggctggccctgaggcctggagaccccccgcttctgcctcccaggccccctcaaggcctggagccaacactgcagccctctgctcctcaacaggccagagacccctttgaggatttgttacagaaaaccaagcaagacgtgagcccgagtccggccctggccccggccccagactcggtggagcagctcaggaagcagtgggagaccttcgagtgagccgggccctgagggtgggggatgcaccgaggcccgagggtccgtccactgctgcggttccgaggctcccccgccactctctctctgcccaggttctgctggtgggaagggatgggacccctctctgctgccccctcctcccctccacactgcccatctctgatgtctggccctggggaatggcaccagttccagcctgggaatcaacccagttcctgagtgcccatcccaccccgcggttgcctctcctcggcacccttgattgggttttgcactaaagaggtcagctgggccaatgatattgctccagaccgagtcctacccaccttcccccggaagtgtcccaagaggctccgaaggcctcccctccgagcccagctctcctgtctcctccacagccaggccctgcacgcccacctcctcggacacaggtgacagggttaccctccagtttgagctcatctgcacgagacacaggtagcttggggttgaagttaggactcctcctgggctggaggatttacctggtggggcacttccagactgtttctagcaatatacacacacgttctttcctgtgtcttcaccccaaaacttcagttgattctgacctgggaggatctggggaccagggggtcttgggctgccttgtgatacacagccccagccaccctgcacgggggctgcgagcaccagcaactttgatttatagaaggaaaatggaaacccccatctgagtattttgggaggagcccccagccctcatccagctctggcacgctgatacctccaggtactcccctcactgtcaaagctggggctcagcctcttgtcatctggagctttgtgggcaaagctgagaagctgcaacccagatttcaacccaaaaaggtcaagctgaatgcctcagactgatgtggaaggcagctggccttcctgggttggaacgaggcagtggccctgagccccttctccagggccaggtagaaaggacaaacttggtctctgcctcggggaagcaggaggagggctagaagccagtccctccccacctgcccagagctccaggccagcacagaaattcctgaggccaacgtcaccaaagttagattgaatgtttattatctttctttttcctttttaccttattgatttgatgaatcttgaaatggattcatttccataaaccaagttaaagtatggcccgaccatttaagaaaacaaccatctgagacacgcaggaaattgtgagcatttcgacccgagctctcatttcctatttgtgaagggtcagacacagtctacccaggggtgtctgggggacaagggggtctctggagatgtcacccagggagccccctctatgtctgagaggctgccactgctgcacatgctcagtgaggcttggcggccatcctggcacatggctcttcctgggtcaaccgtgacctgtctggctcaggaatgggctctggctgctgggggagccgtgtcactcctgggccatgggggcacctcctgggcacttaggtgtttcagcatagattccagtttcgcaccctgggcagacccccaggccccatccgggatagggcagaggaggtgctggcggccccagggaaggagggtgtgtaccccaaggccccctggctgtgctgaggggctggggtgagcgctccatgttcacatgagcactgctgcctcttcacttgtgggactttttgcaaacccaaggatgaactttgtgtgcattcaataaaatcatcttggggaag

SEQ ID NO: 6349 - protein, 791 aa, Homo sapiens; identical to SEQ ID NO: 6341

SEQ ID NO: 6350 - DNA, 2378 bp, Homo sapiens
ttcgccgggctggagcgagtacattaacccctggaggcggcggcggcggcgagggagcgagcctcgagcgggcgggccccagccatgccagcagccccacccaccctgcccctggtctccacaccagccgggcctttcggggcccctccagcttccctggggccggcttttgcgtccggcctcctgctgtccagtgctggcttctgtgcccctcacaggtctcagcccaacctctccgccctctccatgcccaacctctttggccagatgcccatgggcacccacacgagccccctacagccgctgggtcccccagcagttgccccgtcgaggatccgaacgttgcccctggcccgctcaagtgccagggctgctgagaccaagcaggggctggccctgaggcctggagaccccccgcttctgcctcccaggccccctcaaggcctggagccaacactgcagccctctgctcctcaacaggccagagacccctttgaggatttgttacagaaaaccaagcaagacgtgagcccgagtccggccctggccccggccccagactcggtggagcagctcaggaagcagtgggagaccttcgagtgagccgggccctgagggtgggggatgcaccgaggcccgagggtccgtccactgctgcggttccgaggctcccccgccactctctctctgcccaggttctgctggtgggaagggatgggacccctctctgctgccccctcctcccctccacactgcccatctctgatgtctggccctggggaatggcaccagttccagcctgggaatcaacccagttcctgagtgcccatcccaccccgcggttgcctctcctcggcacccttgattgggttttgcactaaagaggtcagctgggccaatgatattgctccagaccgagtcctacccaccttcccccggaagtgtcccaagaggctccgaaggcctcccctccgagcccagctctcctgtctcctccacagccaggccctgcacgcccacctcctcggacacaggtgacagggttaccctccagtttgagctcatctgcacgagacacaggtagcttggggttgaagttaggactcctcctgggctggaggatttacctggtggggcacttccagactgtttctagcaatatacacacacgttctttcctgtgtcttcaccccaaaacttcagttgattctgacctgggaggatctggggaccagggggtcttgggctgccttgtgatacacagccccagccaccctgcacgggggctgcgagcaccagcaactttgatttatagaaggaaaatggaaacccccatctgagtattttgggaggagcccccagccctcatccagctctggcacgctgatacctccaggtactcccctcactgtcaaagctggggctcagcctcttgtcatctggagctttgtgggcaaagctgagaagctgcaacccagatttcaacccaaaaaggtcaagctgaatgcctcagactgatgtggaaggcagctggccttcctgggttggaacgaggcagtggccctgagccccttctccagggccaggtagaaaggacaaacttggtctctgcctcggggaagcaggaggagggctagaagccagtccctccccacctgcccagagctccaggccagcacagaaattcctgaggccaacgtcaccaaagttagattgaatgtttattatctttctttttcctttttaccttattgatttgatgaatcttgaaatggattcatttccataaaccaagttaaagtatggcccgaccatttaagaaaacaaccatctgagacacgcaggaaattgtgagcatttcgacccgagctctcatttcctatttgtgaagggtcagacacagtctacccaggggtgtctgggggacaagggggtctctggagatgtcacccagggagccccctctatgtctgagaggctgccactgctgcacatgctcagtgaggcttggcggccatcctggcacatggctcttcctgggtcaaccgtgacctgtctggctcaggaatgggctctggctgctgggggagccgtgtcactcctgggccatgggggcacctcctgggcacttaggtgtttcagcatagattccagtttcgcaccctgggcagacccccaggccccatccgggatagggcagaggaggtgctggcggccccagggaaggagggtgtgtaccccaaggccccctggctgtgctgaggggctggggtgagcgctccatgttcacatgagcactgctgcctcttcacttgtgggactttttgcaaacccaaggatgaactttgtgtgcattcaataaaatcatcttggggaag

SEQ ID NO: 6351 - protein, 172 aa, Homo sapiens [sequence omitted]

SEQ ID NO: 6352 - DNA, 2260 bp, Homo sapiens
ttcgccgggctggagcgagtacattaacccctggaggcggcggcggcggcgagggagcgagcctcgagcgggcgggccccagcttctgtgcccctcacaggtctcagcccaacctctccgccctctccatgcccaacctctttggccagatgcccatgggcacccacacgagccccctacagccgctgggtcccccagcagttgccccgtcgaggatccgaacgttgcccctggcccgctcaagtgccagggctgctgagaccaagcaggggctggccctgaggcctggagaccccccgcttctgcctcccaggccccctcaaggcctggagccaacactgcagccctctgctcctcaacaggccagagacccctttgaggatttgttacagaaaaccaagcaagacgtgagcccgagtccggccctggccccggccccagactcggtggagcagctcaggaagcagtgggagaccttcgagtgagccgggccctgagggtgggggatgcaccgaggcccgagggtccgtccactgctgcggttccgaggctcccccgccactctctctctgcccaggttctgctggtgggaagggatgggacccctctctgctgccccctcctcccctccacactgcccatctctgatgtctggccctggggaatggcaccagttccagcctgggaatcaacccagttcctgagtgcccatcccaccccgcggttgcctctcctcggcacccttgattgggttttgcactaaagaggtcagctgggccaatgatattgctccagaccgagtcctacccaccttcccccggaagtgtcccaagaggctccgaaggcctcccctccgagcccagctctcctgtctcctccacagccaggccctgcacgcccacctcctcggacacaggtgacagggttaccctccagtttgagctcatctgcacgagacacaggtagcttggggttgaagttaggactcctcctgggctggaggatttacctggtggggcacttccagactgtttctagcaatatacacacacgttctttcctgtgtcttcaccccaaaacttcagttgattctgacctgggaggatctggggaccagggggtcttgggctgccttgtgatacacagccccagccaccctgcacgggggctgcgagcaccagcaactttgatttatagaaggaaaatggaaacccccatctgagtattttgggaggagcccccagccctcatccagctctggcacgctgatacctccaggtactcccctcactgtcaaagctggggctcagcctcttgtcatctggagctttgtgggcaaagctgagaagctgcaacccagatttcaacccaaaaaggtcaagctgaatgcctcagactgatgtggaaggcagctggccttcctgggttggaacgaggcagtggccctgagccccttctccagggccaggtagaaaggacaaacttggtctctgcctcggggaagcaggaggagggctagaagccagtccctccccacctgcccagagctccaggccagcacagaaattcctgaggccaacgtcaccaaagttagattgaatgtttattatctttctttttcctttttaccttattgatttgatgaatcttgaaatggattcatttccataaaccaagttaaagtatggcccgaccatttaagaaaacaaccatctgagacacgcaggaaattgtgagcatttcgacccgagctctcatttcctatttgtgaagggtcagacacagtctacccaggggtgtctgggggacaagggggtctctggagatgtcacccagggagccccctctatgtctgagaggctgccactgctgcacatgctcagtgaggcttggcggccatcctggcacatggctcttcctgggtcaaccgtgacctgtctggctcaggaatgggctctggctgctgggggagccgtgtcactcctgggccatgggggcacctcctgggcacttaggtgtttcagcatagattccagtttcgcaccctgggcagacccccaggccccatccgggatagggcagaggaggtgctggcggccccagggaaggagggtgtgtaccccaaggccccctggctgtgctgaggggctggggtgagcgctccatgttcacatgagcactgctgcctcttcacttgtgggactttttgcaaacccaaggatgaactttgtgtgcattcaataaaatcatcttggggaag

SEQ ID NO: 6353 - protein, 118 aa, Homo sapiens [sequence omitted]

SEQ ID NO: 6354 - DNA, 2137 bp, Homo sapiens
cgcgcgccgggcacgcgcgccggcgaccatggcgttcgccgggctggagcgagtacattaacccctggaggcggcggcggcggcgagggagcgagcctcgagcgggcgggccccagcctgagggaagggaggaaggggcggggagagcgccagagggaggccggtcggccgcgggcgggcgggcagcgcagcgccgagcggggcccgcgggcccatgaggaggcctggggaccatgggctccaggatcaagcagaatccagagaccacatttgaagtatatgttgaagtggcctatcccaggacaggtggcactctttcagatcctgaggtgcagaggcaattcccggaggactacagtgaccaggaagttctacagactttgaccaagttttgtttccccttctatgtggacagcctcacagttagccaagttggccagaacttcacattcgtgctcactgacattgacagcaaacagagattcgggttctgccgcttatcttcaggagcgaagagctgcttctgtatcttaagctatctcccctggttcgaggtattttataagctgcttaacatcctggcagattacacgacaaaaagacaggaaaatcagtggaatgagcttcttgaaactctgcacaaacttcccatccctgacccaggagtgtctgtccatctcagcgtgcattcttattttactgtgcctgataccagagaacttcccagcatacctgagaatagaaatctgacagaatattttgtggctgtggatgttaacaacatgttgcatctgtacgccagtatgctgtacgaacgccggatactcatcatttgcagcaaactcagcactctgactgcctgcatccacgggtctgcggcgatgctctaccccatgtactggcagcacgtgtacatccccgtgctgccgccgcatctgctggactactgctgtgctcccatgccctacctcataggaatccatttaagtttaatggagaaagtcagaaacatggccctggatgatgtcgtgatcctgaatgtggacaccaacaccctggaaacccccttcgatgacctccagagcctcccaaacgacgtgatctcttccctgaagaacaggctgaaaaaggtctccacaaccactggggatggtgtggccagagcgttcctcaaggcccaggctgctttcttcggtagctaccgaaacgctctgaaaatcgagccggaggagccgatcactttctgtgaggaagccttcgtgtcccactaccgctccggagccatgaggcagttcctgcagaacgccacacagctgcagctcttcaagcagtttattgatggtcgattagatcttctcaattccggcgaaggtttcagtgatgtttttgaagaggaaatcaacatgggcgagtacgctggcagtgacaaactgtaccatcagtggctctccactgtccggaaaggaagtggagcaattctgaatactgtaaagaccaaagcaaatccggccatgaagactgtctacaagttcgcaaaagatcatgcaaaaatgggaataaaagaggtgaaaaaccgcttgaagcaaaaggacattgccgagaatggctgcgcccccaccccagaagagcagctgccaaagactgcaccgtccccactggtggaggccaaggaccccaagctccgagaagaccggcggccaatcacagtccactttggacaggtgcgcccacctcgtccacatgttgttaagagaccaaagagcaacatcgcagtggaaggccggaggacgtctgtgccgagccctgagcaaaacaccattgcaacaccagctacactccacatcctacagaaaagcattacccattttgcggccaagttcccgacgagaggctggacctcttcatcacattgacttacgccgttgcttttccagactgggcagaggggctgacttcgcagtgtgtgccaaagagccggtgtctgataatcccattttcctgcttatcacctgaactgtgtcagtatcacttttagttttgttggttggttggtttgttgtttgtttaatatgccctgttttctacttctgttggaaaatatttggggttgaaataaaccagtgggagcatgggagcc

SEQ ID NO: 6355 - protein, 559 aa, Homo sapiens; identical to SEQ ID NO: 652

SEQ ID NO: 6356 - DNA, 2095 bp, Homo sapiens
ggcgcgcgccgggcacgcgcgccggcgaccatggcgttcgccgggctggagcgagtacattaacccctggaggcggcggcggcggcgagggagcgagcctcgagcgggcgggccccagcctgagggaagggaggaaggggcggggagagcgccagagggaggccggtcggccgcgggcgggcgggcagcgcagcgccgagcggggcccgcgggcccatgaggaggcctggggaccatgggctccaggatcaagcagaatccagagaccacatttgaagtatatgttgaagtggcctatcccaggacaggtggcactctttcaggaagttctacagactttgaccaagttttgtttccccttctatgtggacagcctcacagttagccaagttggccagaacttcacattcgtgctcactgacattgacagcaaacagagattcgggttctgccgcttatcttcaggagcgaagagctgcttctgtatcttaagctatctcccctggttcgaggtattttataagctgcttaacatcctggcagattacacgacaaaaagacaggaaaatcagtggaatgagcttcttgaaactctgcacaaacttcccatccctgacccaggagtgtctgtccatctcagcgtgcattcttattttactgtgcctgataccagagaacttcccagcatacctgagaatagaaatctgacagaatattttgtggctgtggatgttaacaacatgttgcatctgtacgccagtatgctgtacgaacgccggatactcatcatttgcagcaaactcagcactctgactgcctgcatccacgggtctgcggcgatgctctaccccatgtactggcagcacgtgtacatccccgtgctgccgccgcatctgctggactactgctgtgctcccatgccctacctcataggaatccatttaagtttaatggagaaagtcagaaacatggccctggatgatgtcgtgatcctgaatgtggacaccaacaccctggaaacccccttcgatgacctccagagcctcccaaacgacgtgatctcttccctgaagaacaggctgaaaaaggtctccacaaccactggggatggtgtggccagagcgttcctcaaggcccaggctgctttcttcggtagctaccgaaacgctctgaaaatcgagccggaggagccgatcactttctgtgaggaagccttcgtgtcccactaccgctccggagccatgaggcagttcctgcagaacgccacacagctgcagctcttcaagcagtttattgatggtcgattagatcttctcaattccggcgaaggtttcagtgatgtttttgaagaggaaatcaacatgggcgagtacgctggcagtgacaaactgtaccatcagtggctctccactgtccggaaaggaagtggagcaattctgaatactgtaaagaccaaagcaaatccggccatgaagactgtctacaagttcgcaaaagatcatgcaaaaatgggaataaaagaggtgaaaaaccgcttgaagcaaaaggacattgccgagaatggctgcgcccccaccccagaagagcagctgccaaagactgcaccgtccccactggtggaggccaaggaccccaagctccgagaagaccggcggccaatcacagtccactttggacaggtgcgcccacctcgtccacatgttgttaagagaccaaagagcaacatcgcagtggaaggccggaggacgtctgtgccgagccctgagcaaaacaccattgcaacaccagctacactccacatcctacagaaaagcattacccattttgcggccaagttcccgacgagaggctggacctcttcatcacattgacttacgccgttgcttttccagactgggcagaggggctgacttcgcagtgtgtgccaaagagccggtgtctgataatcccattttcctgcttatcacctgaactgtgtcagtatcacttttagttttgttggttggttggtttgttgtttgtttaatatgccctgttttctacttctgttggaaaatatttggggttgaaataaaccagtgggagcatgggagcc

SEQ ID NO: 6357 - protein, 529 aa, Homo sapiens
MLKWPIPGQVALFQEVLQTLTKFCFPFYVDSLTVSQVGQNFTFVLTDIDSKQRFGFCRLSSGAKSCFCILSYLPWFEVFYKLLNILADYTTKRQENQWNELLETLHKLPIPDPGVSVHLSVHSYFTVPDTRELPSIPENRNLTEYFVAVDVNNMLHLYASMLYERRILIICSKLSTLTACIHGSAAMLYPMYWQHVYIPVLPPHLLDYCCAPMPYLIGIHLSLMEKVRNMALDDVVILNVDTNTLETPFDDLQSLPNDVISSLKNRLKKVSTTTGDGVARAFLKAQAAFFGSYRNALKIEPEEPITFCEEAFVSHYRSGAMRQFLQNATQLQLFKQFIDGRLDLLNSGEGFSDVFEEEINMGEYAGSDKLYHQWLSTVRKGSGAILNTVKTKANPAMKTVYKFAKDHAKMGIKEVKNRLKQKDIAENGCAPTPEEQLPKTAPSPLVEAKDPKLREDRRPITVHFGQVRPPRPHVVKRPKSNIAVEGRRTSVPSPEQNTIATPATLHILQKSITHFAAKFPTRGWTSSSH

SEQ ID NO: 6358 - DNA, 2828 bp, Homo sapiens
ccggtcggccgcgggcgggcgggcagcgcagcgccgagcggggcccgcgggcccatgaggaggcctggggaccatgggctccaggatcaagcagaatccagagaccacatttgaagtatatgttgaagtggcctatcccaggacaggtggcactctttcagatcctgaggtgcagaggcaattcccggaggactacagtgaccagcctcacagttagccaagttggccagaacttcacattcgtgctcactgacattgacagcaaacagagattcgggttctgccgcttatcttcaggagcgaagagctgcttctgtatcttaagctatctcccctggttcgaggtattttataagctgcttaacatcctggcagattacacgacaaaaagacaggaaaatcagtggaatgagcttcttgaaactctgcacaaacttcccatccctgacccaggagtgtctgtccatctcagcgtgcattcttattttactgtgcctgataccagagaacttcccagcatacctgagaatagaaatctgacagaatattttgtggctgtggatgttaacaacatgttgcatctgtacgccagtatgctgtacgaacgccggatactcatcatttgcagcaaactcagcactctgactgcctgcatccacgggtctgcggcgatgctctaccccatgtactggcagcacgtgtacatccccgtgctgccgccgcatctgctggactactgctgtgctcccatgccctacctcataggaatccatttaagtttaatggagaaagtcagaaacatggccctggatgatgtcgtgatcctgaatgtggacaccaacaccctggaaacccccttcgatgacctccagagcctcccaaacgacgtgatctcttccctgaagaacaggctgaaaaaggtctccacaaccactggggatggtgtggccagagcgttcctcaaggcccaggctgctttcttcggtagctaccgaaacgctctgaaaatcgagccggaggagccgatcactttctgtgaggaagccttcgtgtcccactaccgctccggagccatgaggcagttcctgcagaacgccacacagctgcagctcttcaagcagtttattgatggtcgattagatcttctcaattccggcgaaggtttcagtgatgtttttgaagaggaaatcaacatgggcgagtacgctggcagtgacaaactgtaccatcagtggctctccactgtccggaaaggaagtggagcaattctgaatactgtaaagaccaaagcaaatccggccatgaagactgtctacaagttcgcaaaagatcatgcaaaaatgggaataaaagaggtgaaaaaccgcttgaagcaaaaggacattgccgagaatggctgcgcccccaccccagaagagcagctgccaaagactgcaccgtccccactggtggaggccaaggaccccaagctccgagaagaccggcggccaatcacagtccactttggacaggcgttgtgaatccccaaaaggagcaagacagaagacagcatttctcagatttgcctggctggggaacctccttttttcccttcacacaatgcgtctcccaggatggtgtttctcagcagacaccctgtgagatgccggccttccactgagatgatttcatctgccaagtgccaagactgggtggacatttttttaagtcctctctggaaacaaatgtaggcgatggactgggagggggagaggctggaggcagggaaacctgctgatggtaatggttgctaatgtctgttggtggcactgtgcaaagaacctgacgtccatcatctcgttgaatcttcctaacaggacactcgggtaggcagtgctgttacctgtacttcacagatgaggacagtaaggcttggaatggtcaaatcgtgggcctggagtaacccagggagtaaatgggagaactggggttctctccaaaactgtctgacccctagaggctgcctcccgagcgctctggtgcactgccacccagcaggaatggaaatagcccaagccagaggtgacaagcagtgaagacagtggggctggagaagatggttcccccgaagtagaaaggccaagcataagagaagcagtattgtggggagtggtgtaggagagctgggtgtctagacagggtagcagcctgtgcaccggtggagggggtgggctcccctctccctgatcacctcttcctcttgatgaatggtgtgaattgaggggtgggggggctgttcccctttcccccacacacttcctgtaagccaggaaggggaaaaaacatggtggccttgcccatccctaggcagcacccccaactcccgggtagctgtcagctgaagggtcaccaagcatgggtcagccctcacgcccagctaatggcataggatctgggaagccacggtgtcattctatcccatcgtgttctccatgtgccgccagggaaccctccaccaagtccctggacccgctttcccctcaggctgccccgacaggttccatgcagagcaccagggacccagggacaactgggacacaggccctgccctccaggagtagtggggcaggttcagaaaacaaattctaaggcagatttgagatctgaagtgtcactcccactcagtagagccctatatcagcactgtccaagaaaaacataatgggagcttcatacgggagtcacatgtggaattctgaatgtgaaacataaacaggtgaaattgattttaatataatgaacccaatatatccaaaatattatttcaacatgtaatcaatctaaaaatt

SEQ ID NO: 6359 - protein, 466 aa, Homo sapiens
MLKWPIPGQVALFQILRCRGNSRRTTVTSLTVSQVGQNFTFVLTDIDSKQRFGFCRLSSGAKSCFCILSYLPWFEVFYKLLNILADYTTKRQENQWNELLETLHKLPIPDPGVSVHLSVHSYFTVPDTRELPSIPENRNLTEYFVAVDVNNMLHLYASMLYERRILIICSKLSTLTACIHGSAAMLYPMYWQHVYIPVLPPHLLDYCCAPMPYLIGIHLSLMEKVRNMALDDVVILNVDTNTLETPFDDLQSLPNDVISSLKNRLKKVSTTTGDGVARAFLKAQAAFFGSYRNALKIEPEEPITFCEEAFVSHYRSGAMRQFLQNATQLQLFKQFIDGRLDLLNSGEGFSDVFEEEINMGEYAGSDKLYHQWLSTVRKGSGAILNTVKTKANPAMKTVYKFAKDHAKMGIKEVKNRLKQKDIAENGCAPTPEEQLPKTAPSPLVEAKDPKLREDRRPITVHFGQAL

SEQ ID NO: 6360 - DNA, 555 bp, Homo sapiens
actattctgttttgcttggattcactccctatctgctattacgacgatcctaatattcagaagtctcctaggatctttatcgctctccttgtttctgagagtcaaatcggggtttatggcctgcaaggatgagattcagcctcaggtaacatttacagagtgaatagtgcgcccagtgctgggctctgtgctttcatatctggatggtcaccggatctttttaaccaccttgaggtaggtgtgaatactatccccattttcacagaagaggacagagggactccaagaggtcaagtaacttgcccaagactggctgttctgtaaaatgggaataatatctatcttctaggaatgctgatggaattgtattatctctattaagatctttgacctacttgctctccatagagttccaaaaagcagtatgaattaagctcagatatgaaaatatggaagaaaaatggggcctttgtgctacagggaatcacactgaagtatttacattagagaacaagatttagttaagccttccctatttatcatttataaaggaaa

SEQ ID NO: 6361 - protein, 63 aa, Homo sapiens [sequence omitted]

SEQ ID NO: 6362 - DNA, 3368 bp, Homo sapiens
gagtccagcagtgtcctctgcagaaggggaagtgaaaacatttgttcacatggatagtggacctatgtgaggttctggctgtccatgataaagcactggttaagtagacatggggcaccaaaaataatatcttttatagcccccaaacagcgtttgtcttttgtctttttccagggcgcaaccatgtcgccatttcttcggattggcttgtccaactttgactgcgggtcctgccagtcttgtcagggcgaggctgttaacccttactgtgctgtgctcgtcaaagagtatgtcgaatcagagaacgggcagatgtatatccagaaaaagcctaccatgtacccaccctgggacagcacttttgatgcccatatcaacaagggaagagtcatgcagatcattgtgaaaggcaaaaacgtggacctcatctctgaaaccaccgtggagctctactcgctggctgagaggtgcaggaagaacaacgggaagacagaaatatggttagagctgaaacctcaaggccgaatgctaatgaatgcaagatactttctggaaatgagtgacacaaaggacatgaatgaatttgagacggaaggcttctttgctttgcatcagcgccggggtgccatcaagcaggcaaaggtccaccacgtcaagtgccacgagttcactgccaccttcttcccacagcccacattttgctctgtctgccacgagtttgtctggggcctgaacaaacagggctaccagtgccgacaatgcaatgcagcaattcacaagaagtgtattgataaagttatagcaaagtgcacaggatcagctatcaatagccgagaaaccatgttccacaaggagagattcaaaattgacatgccacacagatttaaagtctacaattacaagagcccgaccttctgtgaacactgtgggaccctgctgtggggactggcacggcaaggactcaagtgtgatgcatgtggcatgaatgtgcatcatagatgccagacaaaggtggccaacctttgtggcataaaccagaagctaatggctgaagcgctggccatgattgagagcactcaacaggctcgctgcttaagagatactgaacagatcttcagagaaggtccggttgaaattggtctcccatgctccatcaaaaatgaagcaaggccgccatgtttaccgacaccgggaaaaagagagcctcagggcatttcctgggagtctccgttggatgaggtggataaaatgtgccatcttccagaacctgaactgaacaaagaaagaccatctctgcagattaaactaaaaattgaggattttatcttgcacaaaatgttggggaaaggaagttttggcaaggtcttcctggcagaattcaagaaaaccaatcaatttttcgcaataaaggccttaaagaaagatgtggtcttgatggacgatgatgttgagtgcacgatggtagagaagagagttctttccttggcctgggagcatccgtttctgacgcacatgttttgtacattccagaccaaggaaaacctcttttttgtgatggagtacctcaacggaggggacttaatgtaccacatccaaagctgccacaagttcgacctttccagagcgacgttttatgctgctgaaatcattcttggtctgcagttccttcattccaaaggaatagtctacagggacctgaagctagataacatcctgttagacaaagatggacatatcaagatcgcggattttggaatgtgcaaggagaacatgttaggagatgccaagacgaataccttctgtgggacacctgactacatcgccccagagatcttgctgggtcagaaatacaaccactctgtggactggtggtccttcggggttctcctttatgaaatgctgattggtcagtcgcctttccacgggcaggatgaggaggagctcttccactccatccgcatggacaatcccttttacccacggtggctggagaaggaagcaaaggaccttctggtgaagctcttcgtgcgagaacctgagaagaggctgggcgtgaggggagacatccgccagcaccctttgtttcgggagatcaactgggaggaacttgaacggaaggagattgacccaccgttccggccgaaagtgaaatcaccatttgactgcagcaatttcgacaaagaattcttaaacgagaagccccggctgtcatttgccgacagagcactgatcaacagcatggaccagaatatgttcaggaacttttccttcatgaaccccgggatggagcggctgatatcctgaatcttgcccctccagagacaggaaagaatttgccttctccctgggaactggttcaagagacactgcttgggttcctttttcaacttggaaaaagaaagaaacactcaacaataaagactgagacccgttcgcccccatgtgacttttatctgtagcagaaaccaagtctacttcactaatgacgatgccgtgtgtctcgtctcctgacatgtctcacagacgctcctgaagttaggtcattactaaccatagttatttacttgaaagatgggtctccgcacttggaaaggtttcaagacttgatactgcaataaattatggctcttcacctgggcgccaactgctgatcaatgaaatgcttgttgaatcaggggcaaacggagtacagacgtctcaagactgaaacggccccattgcctggtctagtagcggatctcactcagccgcagacaagtaatcactaacccgttttattctattcctatctgtggatgtgtaaatggctggggggccagccctggataggtttttatgggaattctttacaataaacatagcttgtaacttgagatctacaaatccattcatcctgattgggcatgaaatccatggtcaagaggacaagtggaaagtgagagggaaggtttgctagacaccttcgcttgttatcttgtcaagatagaaaagatagtatcatttcacccttgccagtaaaaacctttccatccacccattctcagcagactccagtattggcacagtcactcactgccattctcacactataacaagaaaagaaatgaagtgcataagtctcctgggaaaagaaccttaaccccttctcgtgccatgactggtgatttcatgactcataagcccctccgtaggcatcattcaagatcaatggcccatgcatgctgtttgcagcagtcaattgagttgaattagaattccaaccatacattttaaaggtatttgtgctgtgtgtatattttgataaaatgttgtgacttcatggcaaacaggtggatgtgtaaaaatggaataaaaaaaaaaaaagagtc

SEQ ID NO: 6363 - protein, 739 aa, Homo sapiens
MIKHWLSRHGAPKIISFIAPKQRLSFVFFQGATMSPFLRIGLSNFDCGSCQSCQGEAVNPYCAVLVKEYVESENGQMYIQKKPTMYPPWDSTFDAHINKGRVMQIIVKGKNVDLISETTVELYSLAERCRKNNGKTEIWLELKPQGRMLMNARYFLEMSDTKDMNEFETEGFFALHQRRGAIKQAKVHHVKCHEFTATFFPQPTFCSVCHEFVWGLNKQGYQCRQCNAAIHKKCIDKVIAKCTGSAINSRETMFHKERFKIDMPHRFKVYNYKSPTFCEHCGTLLWGLARQGLKCDACGMNVHHRCQTKVANLCGINQKLMAEALAMIESTQQARCLRDTEQIFREGPVEIGLPCSIKNEARPPCLPTPGKREPQGISWESPLDEVDKMCHLPEPELNKERPSLQIKLKIEDFILHKMLGKGSFGKVFLAEFKKTNQFFAIKALKKDVVLMDDDVECTMVEKRVLSLAWEHPFLTHMFCTFQTKENLFFVMEYLNGGDLMYHIQSCHKFDLSRATFYAAEIILGLQFLHSKGIVYRDLKLDNILLDKDGHIKIADFGMCKENMLGDAKTNTFCGTPDYIAPEILLGQKYNHSVDWWSFGVLLYEMLIGQSPFHGQDEEELFHSIRMDNPFYPRWLEKEAKDLLVKLFVREPEKRLGVRGDIRQHPLFREINWEELERKEIDPPFRPKVKSPFDCSNFDKEFLNEKPRLSFADRALINSMDQNMFRNFSFMNPGMERLIS

SEQ ID NO: 6364 - DNA, 3324 bp, Homo sapiens
agtgcgccgggcccgccagccccgccagccccgccagccccgccagccccgccagtccccgcgcagtccccgcgcagtccccgcgcagtcccagcgccaccgggcagcagcggcgccgtgctcgctccagggcgcaaccatgtcgccatttcttcggattggcttgtccaactttgactgcgggtcctgccagtcttgtcagggcgaggctgttaacccttactgtgctgtgctcgtcaaagagtatgtcgaatcagagaacgggcagatgtatatccagaaaaagcctaccatgtacccaccctgggacagcacttttgatgcccatatcaacaagggaagagtcatgcagatcattgtgaaaggcaaaaacgtggacctcatctctgaaaccaccgtggagctctactcgctggctgagaggtgcaggaagaacaacgggaagacagaaatatggttagagctgaaacctcaaggccgaatgctaatgaatgcaagatactttctggaaatgagtgacacaaaggacatgaatgaatttgagacggaaggcttctttgctttgcatcagcgccggggtgccatcaagcaggcaaaggtccaccacgtcaagtgccacgagttcactgccaccttcttcccacagcccacattttgctctgtctgccacgagtttgtctggggcctgaacaaacagggctaccagtgccgacaatgcaatgcagcaattcacaagaagtgtattgataaagttatagcaaagtgcacaggatcagctatcaatagccgagaaaccatgttccacaaggagagattcaaaattgacatgccacacagatttaaagtctacaattacaagagcccgaccttctgtgaacactgtgggaccctgctgtggggactggcacggcaaggactcaagtgtgatgcatgtggcatgaatgtgcatcatagatgccagacaaaggtggccaacctttgtggcataaaccagaagctaatggctgaagcgctggccatgattgagagcactcaacaggctcgctgcttaagagatactgaacagatcttcagagaaggtccggttgaaattggtctcccatgctccatcaaaaatgaagcaaggccgccatgtttaccgacaccgggaaaaagagagcctcagggcatttcctgggagtctccgttggatgaggtggataaaatgtgccatcttccagaacctgaactgaacaaagaaagaccatctctgcagattaaactaaaaattgaggattttatcttgcacaaaatgttggggaaaggaagttttggcaaggtcttcctggcagaattcaagaaaaccaatcaatttttcgcaataaaggccttaaagaaagatgtggtcttgatggacgatgatgttgagtgcacgatggtagagaagagagttctttccttggcctgggagcatccgtttctgacgcacatgttttgtacattccagaccaaggaaaacctcttttttgtgatggagtacctcaacggaggggacttaatgtaccacatccaaagctgccacaagttcgacctttccagagcgacgttttatgctgctgaaatcattcttggtctgcagttccttcattccaaaggaatagtctacagggacctgaagctagataacatcctgttagacaaagatggacatatcaagatcgcggattttggaatgtgcaaggagaacatgttaggagatgccaagacgaataccttctgtgggacacctgactacatcgccccagagatcttgctgggtcagaaatacaaccactctgtggactggtggtccttcggggttctcctttatgaaatgctgattggtcagtcgcctttccacgggcaggatgaggaggagctcttccactccatccgcatggacaatcccttttacccacggtggctggagaaggaagcaaaggaccttctggtgaagctcttcgtgcgagaacctgagaagaggctgggcgtgaggggagacatccgccagcaccctttgtttcgggagatcaactgggaggaacttgaacggaaggagattgacccaccgttccggccgaaagtgaaatcaccatttgactgcagcaatttcgacaaagaattcttaaacgagaagccccggctgtcatttgccgacagagcactgatcaacagcatggaccagaatatgttcaggaacttttccttcatgaaccccgggatggagcggctgatatcctgaatcttgcccctccagagacaggaaagaatttgccttctccctgggaactggttcaagagacactgcttgggttcctttttcaacttggaaaaagaaagaaacactcaacaataaagactgagacccgttcgcccccatgtgacttttatctgtagcagaaaccaagtctacttcactaatgacgatgccgtgtgtctcgtctcctgacatgtctcacagacgctcctgaagttaggtcattactaaccatagttatttacttgaaagatgggtctccgcacttggaaaggtttcaagacttgatactgcaataaattatggctcttcacctgggcgccaactgctgatcaatgaaatgcttgttgaatcaggggcaaacggagtacagacgtctcaagactgaaacggccccattgcctggtctagtagcggatctcactcagccgcagacaagtaatcactaacccgttttattctattcctatctgtggatgtgtaaatggctggggggccagccctggataggtttttatgggaattctttacaataaacatagcttgtaacttgagatctacaaatccattcatcctgattgggcatgaaatccatggtcaagaggacaagtggaaagtgagagggaaggtttgctagacaccttcgcttgttatcttgtcaagatagaaaagatagtatcatttcacccttgccagtaaaaacctttccatccacccattctcagcagactccagtattggcacagtcactcactgccattctcacactataacaagaaaagaaatgaagtgcataagtctcctgggaaaagaaccttaaccccttctcgtgccatgactggtgatttcatgactcataagcccctccgtaggcatcattcaagatcaatggcccatgcatgctgtttgcagcagtcaattgagttgaattagaattccaaccatacattttaaaggtatttgtgctgtgtgtatattttgataaaatgttgtgacttcatggcaaacaggtggatgtgtaaaaatggaataaaaaaaaaaaaagagtc

SEQ ID NO: 6365 - protein, 706 aa, Homo sapiens; identical to SEQ ID NO: 654

SEQ ID NO: 6366 - DNA, 692 bp, Homo sapiens
agtgcgccgggcccgccagccccgccagccccgccagccccgccagccccgccagtccccgcgcagtccccgcgcagtccccgcgcagtcccagcgccaccgggcagcagcggcgccgtgctcgctccagggcgcaaccatgtcgccatttcttcggattggcttgtccaactttgactgcgggtcctgccagtcttgtcagggcgaggctgttaacccttactgtgctgtgctcgtcaaagagtatgtcgaatcagagaacgggcagatgtatatccagaaaaagcctaccatgtacccaccctgggacagcacttttgatgcccatatcaacaagggaagagtcatgcagatcattgtgaaaggcaaaaacgtggacctcatctctgaaaccaccgtggagctctactcgctggctgagaggtgcaggaagaacaacgggaagacagaaatatggacacaaaggacatgaatgaatttgagacggaaggcttctttgctttgcatcagcgccggggtgccatcaagcaggcaaaggtccaccacgtcaagtgccacgagttcactgccaccttcttcccacagcccacattttgctctgtctgccacgagtttgtctggggcctgaacaaacagggctaccagtgccgacaatgcaatgcagcaattcacaagaagtgtattgataaagt

SEQ ID NO: 6367 - protein, 110 aa, Homo sapiens
MSPFLRIGLSNFDCGSCQSCQGEAVNPYCAVLVKEYVESENGQMYIQKKPTMYPPWDSTFDAHINKGRVMQIIVKGKNVDLISETTVELYSLAERCRKNNGKTEIWTQRT

SEQ ID NO: 6368 - DNA, 588 bp, Homo sapiens
agccccgccagccccgccagtccccgcgcagtccccgcgcagtccccgcgcagtcccagcgccaccgggcagcagcggcgccgtgctcgctccagggcgcaaccatgtcgccatttcttcggattggcttgtccaactttgactgcgggtcctgccagtcttgtcagggcgaggctgttaacccttactgtgctgtgctcgtcaaagagtatgtcgaatcagagaacgggcagatgtatatccagaaaaagcctaccatgtacccaccctgggacagcacttttgatgcccatatcaacaagggaagagtcatgcagatcattgtgaaaggcaaaaacgtggacctcatctctgaaaccaccgtggagctctactcgctggctgagaggtgcaggaagaacaacgggaagacagaaatatgggtaacgttgcataaagtgtatgcacataagggataagcatgatggtagccgatgactggctcagaactcccatgtcaatctgagggtgtgattacactggcctcgggtcaccaggctccctaccacttcctactggtgatttgataatggcgatggttattcttta

SEQ ID NO: 6369 - protein, 117 aa, Homo sapiens
MSPFLRIGLSNFDCGSCQSCQGEAVNPYCAVLVKEYVESENGQMYIQKKPTMYPPWDSTFDAHINKGRVMQIIVKGKNVDLISETTVELYSLAERCRKNNGKTEIWVTLHKVYAHKG

SEQ ID NO: 6370 - DNA, 2047 bp, Homo sapiens
gttcatgtgtcttaattcttgattcagaaaagctatcaactgtattctccatatctcaaagttaacgtgtccaaaataaaatgtctcatcttctcatgccatctagttcttcccgcagtgctcccatcttgtgaatggggatggcctcctaccatgggttggggccccaaaccttgaggccgccctgctcctccttttccctcccctcatcttcagtggcttggtacatcccatcaagagatatcggaatccctgcacgctgccagggtccttctgctggtgccctccgaccatcaactggaagagtgaagtcgcccccagtagtctctcttcttctgcacttgctccttacagtcctctcaacacagggaccagggtaccccctttctaggtgtaaataagtctgctctgcactcaaagctgaagacagcacgtagacccctcgggcggtgtcctacctgaactccaagttctcaccatggcctgtggacagccccatgggcacacccacctcgtctgtcttctctaccccttgctcaactccacgcagcccatccgccttcccagaacgtgcttggcagctccgacctcacacccatgtttcggccgggaacgttcacctgccattgtctgtgtgactcagtcctctcctcgtgcaggtctttactcaacgtcatttcacagagacccttcaggaccagcaaagccctccctgccgccccacccagcactccccacctccctcctctgcttagtttgtttcatgggagtcacctggtgtatttcatattatattcttctgctttcttgtctgtctcgtgcatctggacctctgcacaaaggatgggttttgtctctttggctgactgcagtgtcctaagacacttagtgcctagtagctctagtaactgtttgttgaatgaatgaatgagtgaatggatgcatagtcactaaatcagaaatcgtggatactgtaatcatagaacattaggtcataaataccaaggatcctgaggaagaagaagaaagaatatctatgatttggacagccatttttccaattgtggaacattgtttagcatttcaaataatgaaaataaacacatatagaaggcttactatgtgctgggcattgttctgttttatacatattaactcgtttaatctgtgcaatgcacgtaggagtttatggagtttcctcataccttatctcattcagttcccaaaataataccagcagattgtgggtgattacaacattttcaaggattcttccccagggcagctgcttgtgggagagctgaggtctagaaaggaggagttgagagcaggaaaggaaccaagcctgaccccacccccatgccagcattttgatttatggaaccctgggagaagagtttctccaaaatgatacttcatggcctccagcagatccccctcaaagaaaccaacctgggaatgaccctctgtgtggagatcaaggaggaaagaggcaagtgagcctttcttttctcctgctcgtggacttagagtaagagtgtctgggacatccaggtatatactatttccatttttccttttgacatcttcgatgatcaagatacctgctaaggatttgttcagaaatcagaattagttgtaaggcagttgcctgaacaactgaaagcgtaatgaccccacagagagcactaaggcaacagaaagtacggcgaggtgggattattaggttggtgcaaaagtaattgtggtttttgccaatacttttaatggcaaagtttttttaaaaagtatttttagtagaggcagggtttagccatgttgatcaggctggtcttgaactcctgacctcaggtgatccgcctgtcttggcctcccaaaattctgggattacaggcatgagccaccatgcccagcctttttttaaatttccattacttttaatggcaaaaactgcaaattactttcacaccaaattaataggatatttgatgagttttaatataattatcgtttttaccacaattgaccttcccctactcttaccctc

SEQ ID NO: 6371 - protein, 133 aa, Homo sapiens
MACGQPHGHTHLVCLLYPLLNSTQPIRLPRTCLAAPTSHPCFGRERSPAIVCVTQSSPRAGLYSTSFHRDPSGPAKPSLPPHPALPTSLLCLVCFMGVTWCISYYILLLSCLSRASGPLHKGWVLSLWLTAVS

SEQ ID NO: 6372 - DNA, 813 bp, Homo sapiens
ctggattcctgaaccaagatattatgcaagatgataaatgttcatggctggattaagctgctgcatcttggacagccatagatctatggctgtttacactctgtagatttggtgcatgattatttagtaggtcagatattgcagttcagttatctcataaacagctggttttatattcttttcccctgtgtaacttatgctgctgccttcatttcaatctatatactttcttttcttttttttttttttgaggctggagtgcagtgatgcaatctcggcttactgaaacctccgtctccagggttcaagcgattctcctgcctcagcctcatgagtagctgggctgggattacagaggtgcatcaccacgcccggctgtttaatctgcacacttcctatgtggcttaaatccatattgtcttagggtagttcctttctcatcccccaatttcctcctctaacgcatatcatggaagtagccataatctaagattagttgcttatattaattattcaaaacttcttcaacctttccgtagatgaaggttaaactagtctttagattttttgaagatattagtgattggcttcggctaccaaacactttaatttcaatcagcacatcattaggacgccaatgaagcagcactgatcctgagtcaggaaagaactcccggctttcacaaaaaccattcaaagcagcctcctctgctcatctctcccgctgcccccatcagaaaatccataaccacaacctttcccagcctttaagctgcctctggagagtcagggaagccaatggcatcattgttc

SEQ ID NO: 6373 - protein, 33 aa, Homo sapiens
MKVKLVFRFFEDISDWLRLPNTLISISTSLGRQ

SEQ ID NO: 6374 - DNA, 430 bp, Homo sapiens
gggaacaaaaagaatcagggagacttttaccctcgaagagttttcagactgaggagctatgctgtctacagactccaagacagggtcaacagtggggtgagatcaacgaacgctgctgttgttatttatgatatggagctggatttcatgttgactgaagtgtggaatatatacaaaatacagccggagtgcagtggctcacacctgtaaccccagcactttgggaggccgaggtgggtggatcacctgagaacatttttgggaagacaagactcttttcccctggtgtcagaagtaaagacctacagatataccagcagtctctcagcatcggtagcctcattagggagctactgaatagcagctaatggtcttctgtagaacataagttgaaacaatactagatagaatgattattacaaaaacaacc

SEQ ID NO: 6375 - protein, 69 aa, Homo sapiens
SVEYIQNTAGVQWLTPVTPALWEAEVGGSPENIFGKTRLFSPGVRSKDLQIYQQSLSIGSLIRELLNSS

SEQ ID NO: 6376 - DNA, 6128 bp, Homo sapiens
ggagagggctgcgcgcttctcgccaagcaagcgggaggcgcactggggccgccgccgttcccgcgctcctccctctcctctgcacccactgtcacgctacccgcccgcgggggagcctcgagagcctccaggtgaattgaaagtcgtttccgggggaggacggagagggtgctgcagtcctggcatgccctgaaactgcaagtcgggcagaaacgacccggcggaggagcagggcgcgcagcgccctgcgcagcatccccgggctgccagaagaggccaccactcggctggcagccgcgagcggcggccgaacctcggccccagactcgggcccccggcacgctcgcccgggagataccccttccccctcttgcgcatttcgcagctgcgctggtgtggggcatgagagcgaggtggctccaggtctccgcggagcagctgccagtgggagagcgaggagaggcgagggggcggcagcctcggcccgaaacggagatcctggggtcctaaatttgtggccgattgcactgtgtcctggagacggagtggaaccacagcccagagcccctgggaatcatccctgaaagactgcattacttctccatggagtcttcctcctcctgcttattttctttttggaacaaggcaaaggcaatctgcatgtaacatcaccagaagatgcagaatgccgcagaaccaaggaacgcctttctaatggaaacagtcgtggttcagtttccaagtcttcccgcaatatcccaaggagacacaccctaggggggccccgaagttccaaggaaatactgggaatgcaaacatctgagatggatcggaagagagaagcgttcctagaacatctgaagcagaagtacccccaccacgcctctgcaatcatgggtcaccaagagaggctgagagaccagacaaggagccccaaactgtctcacagtcctcaaccacccagtctgggtgacccggtcgagcatttatcagagacgtccgctgattctttggaagccatgtctgagggggatgctccaacccctttttccagaggcagccggactcgtgcgagccttcctgtggtgaggtcaaccaaccagacgaaagaaagatctctgggggttctctatctccagtatggagatgaaaccaagcagctcaggatgccgaatgaaatcacaagtgcagacacaatccgtgctctcttcgtaagtgcctttccacagcagctcaccatgaaaatgctggaatcgcccagtgtcgccatttacatcaaagatgaaagcagaaatgtctattatgaattaaatgatgtaaggaacattcaagacagatcactcctcaaagtgtacaacaaggatcctgcacatgcgtttaatcacacaccaaaaactatgaatggagacatgaggatgcagagagaacttgtttatgcaagaggagatggccctggggcccctcgccccggatctactgctcatccaccccatgcgattccaaattccccaccgtctactccagtgccccattccatgcccccctccccgtccagaattccttatgggggcacccgctccatggttgttcctggcaatgccaccatccccagggacagaatctccagcctgccagtctccagacccatctctccaagcccaagcgccattttagaaagaagagatgtcaagcctgatgaagacatgagtggcaaaaacattgcaatgtacagaaatgagggtttctatgctgatccttacctttatcacgagggacggatgagcatagcctcatcccatggtggacacccactggatgtccccgaccacatcattgcatatcaccgcaccgccatccggtcagcgagtgcttattgtaacccctcaatgcaagcggaaatgcatatggaacaatcactgtacagacagaaatcaaggaaatatccggatagccatttgcctacactgggctccaaaacaccccctgcctctcctcacagagtcagtgacctgaggatgatagacatgcacgctcactataatgcccacggcccccctcacaccatgcagccagaccgggcctctccgagccgccaggcctttaaaaaggagccaggcaccttggtgtatatagaaaagccacggagcgctgcaggattatccagccttgtagacctcggccctcctctaatggagaagcaagtttttgcctacagcacggcgacaatacccaaagacagagagaccagagagaggatgcaagccatggagaaacagattgccagtttaactggccttgttcagtctgcgctttttaaagggcccattacaagttatagcaaagatgcgtctagcgagaaaatgatgaaaaccacagccaacaggaaccacacagatagtgcaggaacgccccatgtgtctggtgggaagatgctcagtgctctggagtccacggtgcctcccagccagcctccacctgtgggcacctcagccatccacatgagcctgcttgagatgaggcggagcgtggcggaactcaggctccagctccagcagatgcggcagctccagctgcagaaccaggagttgctgagggcaatgatgaagaaggccgagctggaaatcagtggcaaagtgatggaaacaatgaagagactggaggatcccgtgcagcgacagcgcgtcctagtggagcaagagagacaaaaatatcttcatgaggaagagaagatcgtcaagaagttgtgcgagttggaagactttgttgaagacttgaagaaggactccacggcagccagccgattggttactctgaaagacgtggaagacggggctttcctcctgcgtcaagtgggagaggctgtagctaccctgaaaggagaatttccaaccttacaaaacaagatgcgagccatcctgcgcatagaagtggaggccgtgcggtttctgaaggaggagccacacaagctggacagtctcctgaagcgtgtgcgcagcatgacagacgtcctgaccatgctgcggagacatgtcactgatgggctcctgaaaggcacggacgcagcccaagccgcacagtacatggctatggaaaaggccacagccgcagaagtcctgaagagtcaggaggaggcagcccacacctccggccagcccttccacagcacaggtgcccctggcgatgcgaagtcggaagtggtgcctttgtccggcatgatggttcgccacgcgcagagctcccctgtggtcatccagccctcccagcactccgtggccctgctgaaccctgctcagaacttgcctcacgtggccagctccccagccgtcccccaggaagcaacctccactctgcagatgtcgcaggctccgcagtccccacagatacccatgaatgggtctgccatgcagagcttgttcattgaagaaatccacagtgtgagtgccaagaacagggcagtgtctatcgagaaagcagaaaagaaatgggaggaaaaaaggcaaaatctggatcactataatgggaaagagtttgagaagctcctagaagaagctcaggccaatatcatgaagtcaataccaaatctggagatgccgccagccacaggcccactgccaaggggagatgccccagtggacaaggtggaactttcagaagattctccaaattcggaacaggacttggaaaagctggggggaaagtcgccccctcctcctccgccacctcctcgtcgaagctacctgccaggatcgggactcaccaccacgaggtcaggcgatgtggtctacaccggcagaaaggagaacatcaccgctaaggcaagcagtgaagatgctggaccaagcccacagaccagagctacaaaatatccagcagaggagcctgcttcagcctggaccccatccccaccgcctgtcaccacctcctcctcaaaggatgaggaggaagaagaagaagaaggagacaaaataatggcagaactccagggctccagcggggccccacagacgagcaggatgcctgtccccatgagtgccaagaacagacccggaaccctggacaaacccggcaagcagtccaaactgcaggatccccgccaatatcgtcaggctaatggaagtgctaagaaatctggtggggactttaagcctacttccccctccttacctgcttctaagattccagccctttctcccagctctgggaaaagcagttctctgccctcttctagtggtgacagctctaacctccctaatccacctgctactaaaccatcgattgcttctaaccctctcagcccccaaacaggaccacctgctcactctgcctccctcatcccttctgtctctaatggctctttgaagtttcagagcctcactcatacaggtaaaggtcaccatctttcattctcaccgcagagtcaaaatggccgagcaccccctcctttgtcattttcctcctcccctccttctcctgcctcctccgtctcactgaatcaaggtgccaagggcaccaggaccatccatactcccagcctcaccagctacaaggcacagaatggaagttcaagcaaagccaccccatccacagcaaaagaaacctcttaaaggtcaaatcctattaggcacaagtcggagttacatttaaaaaaaattaacagtctacaacaactgttttcacaagagaatgtaacatattgctgtatcgtttgaggcttaatgctaaatatgtgctaaatactggattaatagatttcagtaaagctcgttcgttttgtttggttttctttttacctagttgctatagtgtctacagtctatactcaatacctataaaatgcagtaagcatgtgttacagaaagaggttctggtgggagagaaaggtgcgtgtgagacaggagaattgtcttaagcatataaaacatgtatgattccagaattttagtatgttttgtataaaactatttttcattacggagactagaagtgaacagagaattacacaagtgtgactatacaaattgtaaaacagatactataatatttccttttattttagtgttatttagctttattacagatttctatttttgtcaaaacttcatggttcctttcaagatcttttttgccaaaacattttgatactatagcattgtacatttgaaagtagtgttctagactataaaaccaatgaacttctacatgagccctacagacaggcatgtgtagaaggcaatttatcaaacctattgcactgccatgaaaagtgtgtataataatttgctagcccaagcaagctagttttctttgcttgcttcttttctttcttttttccttccttttttttttttttttcttttttaacatgttgagattctctagttgttttctttggcgtatctaaccccttcttttgttttctgagacctggtaacccacgctcttgcattgtggattttaaaatgtatactctgtacggttctgtaaaccgaaaaacttttgtaaatatataaatatacatagacataaaaatactgtatgtgacagcacatagagtagttttcccacaccaaagttaatttttatgcatgctttaaaagtatatatcgggaccggcagaaatggaagtatccatacatttttaaaaagcaacaagtttgcacagctagagtgtttttgtaaataaatgtatttgtataacacagtcatgtaatatacagaactataagcagagactttgcaaaactaaataaagggctgcatgcttattattttttgtaccttgtcactataactacttcctagtcaaagaacgaaatgtaactgttaccgagttaaatgtttttccgctttgagggatgtaaccacatccactcagaggacactacttttctgaaagctctggggtgactaatgatgagttcctaataaattaattgcaagtgtggtgccttggatgtggcctgttggctcgctttcttctctgtggcttatcaaggtgtagatgacagaaagcaaacctggatacagagtttccaccctcagttcctggaggggctcttattattttctctctttttaaaaaacttccagtagaagtaaagtggaaataaaatgtctttatcacttgg

SEQ ID NO: 6377 - protein, 1264 aa, Homo sapiens
MQTSEMDRKREAFLEHLKQKYPHHASAIMGHQERLRDQTRSPKLSHSPQPPSLGDPVEHLSETSADSLEAMSEGDAPTPFSRGSRTRASLPVVRSTNQTKERSLGVLYLQYGDETKQLRMPNEITSADTIRALFVSAFPQQLTMKMLESPSVAIYIKDESRNVYYELNDVRNIQDRSLLKVYNKDPAHAFNHTPKTMNGDMRMQRELVYARGDGPGAPRPGSTAHPPHAIPNSPPSTPVPHSMPPSPSRIPYGGTRSMVVPGNATIPRDRISSLPVSRPISPSPSAILERRDVKPDEDMSGKNIAMYRNEGFYADPYLYHEGRMSIASSHGGHPLDVPDHIIAYHRTAIRSASAYCNPSMQAEMHMEQSLYRQKSRKYPDSHLPTLGSKTPPASPHRVSDLRMIDMHAHYNAHGPPHTMQPDRASPSRQAFKKEPGTLVYIEKPRSAAGLSSLVDLGPPLMEKQVFAYSTATIPKDRETRERMQAMEKQIASLTGLVQSALFKGPITSYSKDASSEKMMKTTANRNHTDSAGTPHVSGGKMLSALESTVPPSQPPPVGTSAIHMSLLEMRRSVAELRLQLQQMRQLQLQNQELLRAMMKKAELEISGKVMETMKRLEDPVQRQRVLVEQERQKYLHEEEKIVKKLCELEDFVEDLKKDSTAASRLVTLKDVEDGAFLLRQVGEAVATLKGEFPTLQNKMRAILRIEVEAVRFLKEEPHKLDSLLKRVRSMTDVLTMLRRHVTDGLLKGTDAAQAAQYMAMEKATAAEVLKSQEEAAHTSGQPFHSTGAPGDAKSEVVPLSGMMVRHAQSSPVVIQPSQHSVALLNPAQNLPHVASSPAVPQEATSTLQMSQAPQSPQIPMNGSAMQSLFIEEIHSVSAKNRAVSIEKAEKKWEEKRQNLDHYNGKEFEKLLEEAQANIMKSIPNLEMPPATGPLPRGDAPVDKVELSEDSPNSEQDLEKLGGKSPPPPPPPPRRSYLPGSGLTTTRSGDVVYTGRKENITAKASSEDAGPSPQTRATKYPAEEPASAWTPSPPPVTTSSSKDEEEEEEEGDKIMAELQGSSGAPQTSRMPVPMSAKNRPGTLDKPGKQSKLQDPRQYRQANGSAKKSGGDFKPTSPSLPASKIPALSPSSGKSSSLPSSSGDSSNLPNPPATKPSIASNPLSPQTGPPAHSASLIPSVSNGSLKFQSLTHTGKGHHLSFSPQSQNGRAPPPLSFSSSPPSPASSVSLNQGAKGTRTIHTPSLTSYKAQNGSSSKATPSTAKETS

SEQ ID NO: 6378 - DNA, 559 bp, Homo sapiens
ctcttcagacatcctcacgttgctgtaaaacagcaccgggctgagtgaagagaaatgtcacaaggaatacaagaggacgccttcaaacagagatagcggagacagttacactctgaattagagtctagctttggagaggatttatttttcttttgttacttacatcctggatttgcttttttttttttaaaggcagctttgttttttactatttctagtaaagcatggacatttgaagaaataaatataaaaggaagatttctcaaagatttgtcctgttgagtaatgaagcataccctgaggacccagggagtagaactagatcagtctttctttttgagcaaaaaagcctaatttgaaattcaggattacttttaaaatatcactcaaaaacaaggcaaaggcaatctgcatgtaacatcaccagaagatgcagaatgccgcagaaccaaggaacgcctttctaatggaaacagtcgtggttcagtttccaagtcttcccgcaatatcccaaggagacacaccctaggggggccccgaagttccaaggaaatactgg

SEQ ID NO: 6379 - protein, 32 aa, Homo sapiens
MQNAAEPRNAFLMETVVVQFPSLPAISQGDTP

SEQ ID NO: 6380 - DNA, 3653 bp, Homo sapiens
ttttttaacttttaatttaagttcaggggtatgtgtgcagatttgttacataggtaaacttgtgtcatggggctttgttgtacagattgtttcatcacccaggtattattttattttcattttagttttttaaatttctttttagaggcggggtctcactgtgttttgcccaggctggtctcgaactcctcctggtctcaagcaatcctctcgcctctgcctccccaagtgttgggattataggcatgagctactgcactcagcccaccatttgttttaaaaagggtggatcctatttgtataaaaagccatgtgcattttctgtgtacttgtctacacattaatttccaggctgggcgtggtggctcacgcttgtaatcccagcactttgggaggccaaggggaggcagatcatgaggttaggagatcgaaaccatcctggctaacacggtgaaaccccgtctctactaaaaatacaaaaacaaaattagcagggtgttgtggcgggcgcctgtagtcccagctactcaggaggctgaggcaggagaatggcatgaacccgggaggtggagcttgcagtgagctgagattgcgccactgccctccagcctgggcaacaaagcaagactccatctcaaaaaaaaaaaaaaaaaaaaaaaaaaatgtccctcatacctaaaccttacctcttgctaatttgctgagggttcattttagataaaaggtgtttaggttttcatattatgtttgtaactgtatagctatgattcagtttcctaaatgaaaaaagaaactgttttaatgtacagactatttagatttgaaaagactgtgagagctttttcttttatagcaagacaagtcaagaatagaaggcacactgcgagagggatgtcttttgaaagaaaagaaacactactttttatattctcaaatcactgaagaaagctttagacataatttcaaacactagctcctgtttaattcagatgcacagaatgcattaaaaccacgagtgtagtggacgtgatttatacattctcttagcacaaatcagtacctatcttcactgtaattagacttttcttcctttctccttctcaaaagctacttttgaaaccttatgttttccctggacatattttctgtacttcataaaatagctcagttctgcaactaactgcaaatatttgcaaaagggaacaaatgtaaaataaacgtcccctaatgcagtgtttggtgaagaaacatatgtctgacattagttggttaacctgaaaaatagtaagaaacaactctacttaggggaaagggggtagaattgagcccgtactgtgcaaatcaagagaaagctataatttacgcaatttttattaaagagaatacaagtgctgtaggcttggggtggtgctaggtcatatttaagcctaattgagctttttctatatcattagaaaaatgggccaagtttcctatattatagggtaaatacaacattttcttcctgcaaatattaaataccactggctttttaagacgtaaacatccaaatctcaaatgtctttattcatgccaatgcaatacaataaaaatattccccatatacacttaaatcactgcaagtaagccttagaatccccacaagtattattacttactatatctcagaaactttcacacacattatttcaaatatagttctcccaaaaaaaccctgcggagagatacctgtaaaccaaggctgagactagcctagacagttcgttctttagacaacaggagtggagatttgaacccagctattgtgactcaagcaagcctagggcatgtttctgagatctctaaggtgtgcgctgtgaaaccggtggctcattttatgggttggatttccaaacacgactatcacaatcatgccaggaatcaatgactgacttcttgcctccgtggcctgaagttctcctctgcacctcctacctttttgccatttcagtgatgcaccaaagggtggagttgaagaacatcagttttgctgctgcttgttggcaatactctcaaaaaggcgtggggagggagaggtgtaactcacccctgaagtcaagcctggagattacttgtcaggaatgtcaaaagcatttgttaagcaaccttcttcctggcattttaagaagaaagccgcatacatagatcaaatcccttccttcagaaacctgtactctctgaacagagccttggaattcagcctagagaaagaatacttggtggttcatagaacttggttcacaaaagagtgcttgctgcccacgcattttgcacaatgactcccaaacacacagaatgcacattggcaacaattttacgcgtgtttccaaaagtgctgactggaattgaagggacacatttggcactttttttttttgaaatggggttgcactccagcctgggcgacagagtgagactatgtctcaaaaaaattaaattaaaattaaaattgagcctgatgtggtggcacatgcctgtagttccagctatgcaggaagttaagatgggaggatcccttgagcttgggagatcaaggctgcagtgagctgtgattgtaactactgcattctagcctaagaaacagaaagagacactgtctcaaaaaaaaaaaaaaaaaaaaaacaagaaaaaaaaagaaagaaaaaaacagatcagaggccctggcctggggtcagtttctccagaaaggcctgcacaatggagttttcatgtaaaaaatttcttacatcctgattttaaaaaatcagatgatcaggaaacattgagttccgattcctttgttacaacctccactaaagctaagtaacagctgctgtattaagatggggctccccctctccatcccacacctgcctcccttacatgcctaactcctgttgtaaatagggaccctaatctgatgtttttgtagtccctttcctaggggcactgtggggaggtggaaggaatttcacctttgttgttggacagacttagatttgagaactggttctactacttactgtttgtgtggtctgggacaagtcacttggtccaagtaagcttctgcatctgttaaaaaaaaaaaaaaaaaaaaaaaaggggcggggagctaagaattcctgcccagcaagttggtttgcagatcagaggcagtgtgtgagaagtacttaacccagcacctggcatatagtagatgttcaggacatcgtagcaggaataagggagacatctcacaaaacattttgtgagaaaggatcagtttctatctagtcaatgtcttaaacattcataggttgttcatggtgggagctgctcgaggaatcatcctagttttatggaggaggaatctgaagctggaggaattgtctccttcaagattacttagttaaaggcaaacaggttcatagccagtggctcttcaccaacccacaaaaaggcctcagattataattttgaagattaagtatatgaaagtgctatttgagtgattaagtgtaagcatcagatcattttgaactggtgagatggctcacacctggaattccagcactttgggaggcccaagagggaggattgtttgagcccaggagttcaagaccaacctgggcaacattgtgagagcctgtccctac

SEQ ID NO: 6381 - protein, 89 aa, Homo sapiens
MTPKHTECTLATILRVFPKVLTGIEGTHLALFFFEMGLHSSLGDRVRLCLKKIKLKLKLSLMWWHMPVVPAMQEVKMGGSLELGRSRLQ

SEQ ID NO: 6382 - DNA, 1555 bp, Homo sapiens
caccatttgttttaaaaagggtggatcctatttgtataaaaagccatgtgcattttctgtgtacttgtctacacattaatttccatttctggaatgatgtccaataaatcagagagagggactagaagactaatgaggacagaagcttttattcttaacacctatattttgctaccatttatattgtcatcatatgcatataacattttaacatttaaaaactagtttaaacagaaatggttgccctggaatgtggcctgtgttctttcaagggaggccagcagtttctacagtggctgagatggtaccttcatctcacacacctacgcaggagtgcatttgtgctttgatgtggttgtcccttgaagaaggaagcagttctctttttcttttttcccttttccattataggatcagtcacttcttggggcattagtagtctcatttccagtggcatcttcccttggcaaaaggaatcccagataggacctcatctttctaaacaaatgctgttttgggtcctaaccatcccatgtttgctttgaatatgtttaagttgcctggaattatcaacaaaagaattaaatttattgtaggtcagggcatcttttgactcattgtataaaacattcactttaaatgtataccgaaatgtcctttatgtaattttctttaaagactgccactgggtggaacccactgggcccagtgagaactacggaaaagagacccattcttgccctcattgttagtgtccacatccggatttacctaaaccccacccaggtggcatttgcatagtaatgaaaaaccggtattttctagctgtgaatcacacttcaaatcctgagcggctgactgtcaggggtgcgtcaggcctgcttgctgggagaatggacgagctggttgtggagcgggcgggtcccgccacccgtgggctcagcactggactgctcccagaacattaaaggtctggctgatgttccatgccacatctggacatgaagacccatgtctgcccttctgtagaagggccaaagaagaaaggaggcatcacatgtttctgctgtggggggcccttccgagcagcagacaggagcaaggtacaggagtggcctgattctggggtttccctgccccccctggggtccctaaactgctgtgtgatatgtttctaactatctggacagctcacccaagagtcagttgttcccagtcgcttcttgctgaggataagccaaaagagggccgggggccaatctggtttctttcaagtgaaattatgcttctcaagcagagaatgattgcccacagcagttaaaccttgtttaatggtaattaaattgcttttcttcactttgaaaaatctcttaattttctgtacaaaggcaggaagcatttttctttgattctacaggatgtttctaagtatggtgtaatcagttcatcttaccttgccgggctctgaaagaatgagtgtgtgggatcagatttagaaatgcctcaaaggttagaaagccgagtgctgccgattaactcaagctcagatgaccaa

SEQ ID NO: 6383 - protein, 59 aa, Homo sapiens
MCIFCVLVYTLISISGMMSNKSERGTRRLMRTEAFILNTYILLPFILSSYAYNILTFKN

SEQ ID NO: 6384 - DNA, 2113 bp, Homo sapiens
gatactggggaactataaatgtctccgtccaactctgttcaactctaatttttttttttttttgagacggagtcttactctgtcacccaggctggagtgcaatgacgtaatcttggctcacagcaacctctgcctcctgggttcaagtgattctcctgcctcagcctcccaagtagctgggattacaggagcccgccaccatgcccagctaatttttgtattttttagtagacacagggtttcaccatgttggccaggctggtctcgaactcctgacctcaagccatccacctccctcggcttcccagagtgctgggattacaggcatgagccatgacacccggcctgtaattttctttaaagactgccactgggtggaacccactgggcccagtgagaactacggaaaagagacccattcttgccctcattgttagtgtccacatccggatttacctaaaccccacccaggtggcatttgcatagtaatgaaaaaccggtattttctagctgtgaatcacacttcaaatcctgagcggctgactgtcaggggtgcgtcaggcctgcttgctgggagaatggacgagctggttgtggagcgggcgggtcccgccacccgtgggctcagcactggactgctcccagaacattaaaggtctggctgatgttccatgccacatctggacatgaagacccatgtctgcccttctgtagaagggccaaagaagaaaggaggcatcacatgtttctgctgtggggggcccttccgagcagcagacaggagcaagacaaggagccccaaactgtctcacagtcctcaaccacccagtctgggtgacccggtcgagcatttatcagagacgtccgctgattctttggaagccatgtctgagggggatgctccaacccctttttccagaggcagccggactcgtgcgagccttcctgtggtgaggtcaaccaaccagacgaaagaaagatctctgggggttctctatctccagtatggagatgaaaccaagcagctcaggatgccgaatgaaatcacaagtgcagacacaatccgtgctctcttcgtaagtgcctttccacagcagctcaccatgaaaatgctggaatcgcccagtgtcgccatttacatcaaagatgaaagcagaaatgtctattatgaattaaatgatgtaaggaacattcaagacagatcactcctcaaagtgtacaacaaggatcctgcacatgcgtttaatcacacaccaaaaactatgaatggagacatgaggatgcagagagaacttgtttatgcaagaggagatggccctggggcccctcgccccggatctactgctcatccaccccatgcgattccaaattccccaccgtctactccagtgccccattccatgcccccctccccgtccagaattccttatgggggcacccgctccatggttgttcctggcaatgccaccatccccagggacagaatctccagcctgccagtctccagacccatctctccaagcccaagcgccattttagaaagaagagatgtcaagcctgatgaagacatgagtggcaaaaacattgcaatgtacagaaatgagggtttctatgctgatccttacctttatcacgagggacggatgagcatagcctcatcccatggtggacacccactggatgtccccgaccacatcattgcatatcaccgcaccgccatccggtcagcgagtgcttattgtaacccctcaatgcaagcggaaatgcatatggaacaatcactgtacagacagaaatcaaggaaatatccggatagccatttgcctacactgggctccaaaacaccccctgcctctcctcacagagtcagtgacctgaggatgatagacatgcacgctcactataatgcccacggcccccctcacaccatgcagccagaccgggcctctccgagccgccaggcctttaaaaaggagccaggcaccttggtgtatatagaaaagccacggagcgctgcaggattatccagccttgtagacctcggccctcctctaatggagaagcaagtttttgcctacagcacggcgacaatacccaaagacagagagaccag

SEQ ID NO: 6385 - protein, 479 aa, Homo sapiens
MPHLDMKTHVCPSVEGPKKKGGITCFCCGGPFRAADRSKTRSPKLSHSPQPPSLGDPVEHLSETSADSLEAMSEGDAPTPFSRGSRTRASLPVVRSTNQTKERSLGVLYLQYGDETKQLRMPNEITSADTIRALFVSAFPQQLTMKMLESPSVAIYIKDESRNVYYELNDVRNIQDRSLLKVYNKDPAHAFNHTPKTMNGDMRMQRELVYARGDGPGAPRPGSTAHPPHAIPNSPPSTPVPHSMPPSPSRIPYGGTRSMVVPGNATIPRDRISSLPVSRPISPSPSAILERRDVKPDEDMSGKNIAMYRNEGFYADPYLYHEGRMSIASSHGGHPLDVPDHIIAYHRTAIRSASAYCNPSMQAEMHMEQSLYRQKSRKYPDSHLPTLGSKTPPASPHRVSDLRMIDMHAHYNAHGPPHTMQPDRASPSRQAFKKEPGTLVYIEKPRSAAGLSSLVDLGPPLMEKQVFAYSTATIPKDRE

SEQ ID NO: 6386 - DNA, 561 bp, Homo sapiens
cgataactgcatcaccatgcatgagaatggtgcagtaaaggctactcaacgggaagatgacgaggatgaagacctttatgatgatccacttccacttaatcttctactggatatggttgggtcccctgaccaggatctccaggaagctgcagctggttgtatatccaatatccgcaggctggctcttgctacagagaaggcaagatacacttgaaatttaaatggacattacaagctatcaaattctacatgacacaggacatgtcactcccatggccagaaagcctaaattgggaaacagttgttagcaaaccctttcaaccatctaaatgaaaacacacaaattgaaaatgcacagaatgtttttcatctgaaaattgcatggagacttttgtttctatttaatgttttcgagatatgacatgtgataagatggaaagccaataaacctgtgataagtttctaagaatatgagaatatacgtatatgatgtatttttagttcagtgatgcttttgtatttgtggcgattttaataaaaaggatatggccttcccaatgc

SEQ ID NO: 6387 - protein, 65 aa, Homo sapiens
MHENGAVKATQREDDEDEDLYDDPLPLNLLLDMVGSPDQDLQEAAAGCISNIRRLALATEKARYT

SEQ ID NO: 6388 - DNA, 3579 bp, Homo sapiens
gggcatacggtgcaacgggtccgcgggaatcttggatgcgcggaggtcccgagaccaggtgcgtgtgctaagctcaggtctgagcacggtggatcccatgggtgtggctctgaggaaattgacgcagtggactgctgccggacatggaactggaatcctcgaaatcacccctctaaatgaagcgatattgaaagaaattattgtgtttgtggagagttttatctataaacatcctcaagaggcaaaatttgtttttgtggaaccacttgaatggaacacaagtttggcgccctcagcatttgaatcaggttatgttgtcagtgaaacaacagtcaaatcagaagaagttgataaaaatggacagcctttgctatttctctctgtaccacaaattaaaattaggagctttgggcagctgtcacgcttgttacttattgccaaaactgggaagttgaaggaagcccaagcatgtgttgaagctaacagagaccccatagtaaaaatcctgggctctgattataatacaatgaaagaaaactcaattgcattaaatattcttggcaaaattaccagagatgatgatcctgaaagtgaaattaagatgaagattgctatgctgcttaagcaattggatctgcacctcctcaatcattctctaaaacatatttcattagaaataagtttaagtcccatgacggtgaagaaggatatagaactgctcaaacgtttctcaggaaaaggaaaccaaacagtcttggaatctattgaatatacctcagattatgaattttcaaatggatgtcgagccccaccgtggagacaaattcgtggggaaatttgttatgtgctggtgaaacctcacgatggtgagactctgtgcattacttgcagtgcaggaggagtatttttaaatggtggcaaaacagatgatgaaggggacgttaattatgagagaaaaggttcaatttataaaaaccttgtcacatttttaagagaaaaatcaccaaaattttcagaaaatatgtctaaattgggaattagcttcagtgaagaccagcaaaaggaaaaggatcagcttggcaaagcccccaagaaggaagaagcagctgccctccgcaaagacatttctggttcagacaaaaggtcactggagaagaaccaaattaatttttggaggaatcaaatgaccaagagatgggaaccaagcttaaactggaagaccactgttaattacaaaggcaaaggctcagcaaaagaaatccaagaggacaaacacacaggaaaacttgaaaaaccaagaccatctgtttcacacggaagagcacaattacttcggaagagtgctgaaaagattgaggaaactgttagcgatagctcctcagaaagtgaggaagatgaagaaccacctgaccatcgtcaggaagcaagtgcagatttgccatcagaatattggcaaattcagaagctggtgaaatatttaaagggaggaaatcaaacagctacagtgattgcgttgtgttcaatgagggatttcagcttagctcaagaaacctgccagttggccatcagagatgttggaggcctggaagtgctgataaatttgcttgaaaccgatgaagtcaaatgtaagattggttcattaaaaatactgaaggaaatcagtcataatcctcaaatcagacagaatattgttgaccttgggggcttaccaattatggtgaatatacttgattctccacacaagagtctaaaatgtttggcagccgagactatcgcgaatgttgccaagtttaaaagagcacggcgggtggtgaggcagcacgggggtatcaccaaactggttgctctactagactgtgcacatgattccacaaaacctgcccaatcgagtctgtatgaggccagagacgtggaagtggctcgctgtggggcactggccctgtggagctgcagtaagagtcatacgaataaagaagccatccgcaaagctgggggcattcctctgttggctcggctgctgaagacttctcatgaaaacatgctaattccagtggtggggacattgcaagagtgtgcatcagaggaaaactaccgggctgcaatcaaagcagaaaggatcattgaaaaccttgtcaagaacctaaatagtgagaatgagcagctgcaggagcactgcgccatggccatttaccagtgtgctgaagataaggaaacccgggacctcgttaggctgcacggaggacttaagcccttggccagtctactcaataacactgacaataaagagcggttagctgctgtcacaggggctatatggaaatgttccatcagcaaagagaatgttaccaagtttcgggaatacaaagccattgaaaccttggtgggacttctaacagatcagcctgaagaagtacttgtgaatgtggttggggccttgggagaatgctgccaagaacgtgaaaaccgagtcattgtccggaaatgtggtggcattcaaccacttgtgaacctccttgttggaataaaccaagctcttcttgtgaatgttacaaaagcagttggtgcttgtgcagtagaacctgaaagtatgatgataattgatcgcttagatggagttcgtttgttgtggtccctgctgaaaaatcctcacccagacgtgaaggccagcgcagcatgggcactctgtccatgcatcaaaaatgcaaaggatgctggggaaatggttcgttcctttgttggtggtttggaacttattgtcaatttactgaaatcagataacaaagaagttctggcaagtgtatgtgctgccattaccaacatagcaaaagatcaagaaaatttagctgttatcacagatcatggagttgttcctttattgtccaaactggcaaatacaaataacaataaattgagacatcatctagcagaagctatttcacgttgctgtatgtggggcaggaatagagtggccttcggtgagcacaaagcagtggctccactagtgcgttatctgaaatcaaatgacaccaacgtgcatcgggcgacagctcaggccttgtaccaactctcagaagacgccgataactgcatcaccatgcatgagaatggtgcagtaaagcttctactggatatggttgggtcccctgaccaggatctccaggaagctgcagctggttgtatatccaatatccgcaggctggctcttgctacagagaaggcaagatacacttgaaatttaaatggacattacaagctatcaaattctacatgacacaggacatgtcactcccatggccagaaagcctaaattgggaaacagttgttagcaaaccctttcaaccatctaaatgaaaacacacaaattgaaaatgcacagaatgtttttcatctgaaaattgcatggagacttttgtttctatttaatgttttcgagatatgacatgtgataagatggaaagccaataaacctgtgataagtttctaagaatatgagaatatacgtatatgatgtatttttagttcagtgatgcttttgtatttgtggcgattttaataaaaaggatatggccttcccaatgc

SEQ ID NO: 6389 - protein, 1044 aa, Homo sapiens
MGVALRKLTQWTAAGHGTGILEITPLNEAILKEIIVFVESFIYKHPQEAKFVFVEPLEWNTSLAPSAFESGYVVSETTVKSEEVDKNGQPLLFLSVPQIKIRSFGQLSRLLLIAKTGKLKEAQACVEANRDPIVKILGSDYNTMKENSIALNILGKITRDDDPESEIKMKIAMLLKQLDLHLLNHSLKHISLEISLSPMTVKKDIELLKRFSGKGNQTVLESIEYTSDYEFSNGCRAPPWRQIRGEICYVLVKPHDGETLCITCSAGGVFLNGGKTDDEGDVNYERKGSIYKNLVTFLREKSPKFSENMSKLGISFSEDQQKEKDQLGKAPKKEEAAALRKDISGSDKRSLEKNQINFWRNQMTKRWEPSLNWKTTVNYKGKGSAKEIQEDKHTGKLEKPRPSVSHGRAQLLRKSAEKIEETVSDSSSESEEDEEPPDHRQEASADLPSEYWQIQKLVKYLKGGNQTATVIALCSMRDFSLAQETCQLAIRDVGGLEVLINLLETDEVKCKIGSLKILKEISHNPQIRQNIVDLGGLPIMVNILDSPHKSLKCLAAETIANVAKFKRARRVVRQHGGITKLVALLDCAHDSTKPAQSSLYEARDVEVARCGALALWSCSKSHTNKEAIRKAGGIPLLARLLKTSHENMLIPVVGTLQECASEENYRAAIKAERIIENLVKNLNSENEQLQEHCAMAIYQCAEDKETRDLVRLHGGLKPLASLLNNTDNKERLAAVTGAIWKCSISKENVTKFREYKAIETLVGLLTDQPEEVLVNVVGALGECCQERENRVIVRKCGGIQPLVNLLVGINQALLVNVTKAVGACAVEPESMMIIDRLDGVRLLWSLLKNPHPDVKASAAWALCPCIKNAKDAGEMVRSFVGGLELIVNLLKSDNKEVLASVCAAITNIAKDQENLAVITDHGVVPLLSKLANTNNNKLRHHLAEAISRCCMWGRNRVAFGEHKAVAPLVRYLKSNDTNVHRATAQALYQLSEDADNCITMHENGAVKLLLDMVGSPDQDLQEAAAGCISNIRRLALATEKARYT

SEQ ID NO: 6390 - DNA, 545 bp, Homo sapiens
acagaatattgttgaccttgggggcttaccaattatggtgaatatacttgattctccacacaagagtctaaaatgtttggcagccgagactatcgcgaatgttgctctactagactgtgcacatgattccacaaaacctgcccaatcgagtctgtatgaggccagagacgtggaagtggctcgctgtggggcactggccctgtggagctgcagtaagagtcatacgaataaagaagccatccgcaaagctgggggcattcctctgttggctcggctgctgaagacttctcatgaaaacatgctaattccagtggtggggacattgcaagagtgtgcatcagaggaaaactaccgggctgcaatcaaagcagaaaggatcattgaaaaccttgtcaagaacctaaatagtgagaatgagcagctgcaaggatgctggggaaatggttcgttcctttgttggtggtttggaacttattgtcaatttactgaaatcagataacaaagaagttctggcaagtgtatgtgctgccattaccaacatagca

SEQ ID NO: 6391 - protein, 154 aa, Homo sapiens
MVNILDSPHKSLKCLAAETIANVALLDCAHDSTKPAQSSLYEARDVEVARCGALALWSCSKSHTNKEAIRKAGGIPLLARLLKTSHENMLIPVVGTLQECASEENYRAAIKAERIIENLVKNLNSENEQLQGCWGNGSFLCWWFGTYCQFTEIR

SEQ ID NO: 6392 - DNA, 5063 bp, Homo sapiens
aatggaactaacaggaaccacctgtgcacttccttttacaggaatgttcataaacagcaggttctcctaggctttgaacaaaatttagcttctccaaggccaaaagcctcattgtgaagagaaagaaagaaacggcttacaaaatatacagatcttggtagacaacgtggctgcaggctgttgaattggaattccctgtggctgtccgaaggcagggtgtccggagagcggtgggctgacctgttcctacaccttgcatcatgccagctttgtcaacgggatctgggagtgacactggtctgtatgagctgttggctgctctgccagcccagctgcagccacatgtggatagccaggaagacctgaccttcctctgggatatgtttggtgaaaaaagcctgcattcattggtaaagattcatgaaaaactacactactatgagaagcagagtccggtgcccattctccatggtgcggcggccttggccgatgatctggccgaagagcttcagaacaagccattaaacagtgagatcagagagctgttgaaactactgtcaaaacccaatgtgaaggctttgctctctgtacatgatactgtggctcagaagaattacgacccagtgttgcctcctatgcctgaagatattgacgatgaggaagactcagtaaaaataatccgtctggtcaaaaatagagaaccactgggagctaccattaagaaggatgaacagaccggggcgatcattgtggccagaatcatgagaggaggagctgcagatagaagtggtcttattcatgttggtgatgaacttagggaagtcaacgggataccagtggaggataaaaggcctgaggaaataatacagattttggctcagtctcagggagcaattacatttaagattatacccggcagcaaagaggagacaccatcaaaagaaggcaagatgtttatcaaagccctctttgactataatcctaatgaggataaggcaattccatgtaaggaagctgggctttctttcaaaaagggagatattcttcagattatgagccaagatgatgcaacttggtggcaagcgaaacacgaagctgatgccaaccccagggcaggcttgatcccctcaaagcatttccaggaaaggagattggctttgagacgaccagaaatattggttcagcccctgaaagtttccaacaggaaatcatctggttttagaaaaagttttcgtcttagtagaaaagataagaaaacaaataaatccatgtatgaatgcaagaagagtgatcagtacgacacagctgacgtacccacatacgaagaagtgacaccgtatcggcgacaaactaatgaaaaatacagactcgttgtcttggttggtcccgtgggagtagggctgaatgaactgaaacgaaagctgctgatcagtgacacccagcactatggcgtgacagtgccccataccaccagagcaagaagaagccaggagagtgatggtgttgaatacattttcatttccaagcatttgtttgagacagatgtacaaaataacaagtttattgaatatggagaatataaaaacaactactacggcacaagtatagactcagttcggtctgtccttgctaaaaacaaagtttgtttgttggatgttcagcctcatacagtgaagcatttaaggacactagaatttaagccctatgtgatatttataaagcctccatcaatagagcgtttgagagaaacaagaaaaaatgcaaagattatttcaagcagagatgaccaaggtgctgcaaaacccttcacagaagaagattttcaagaaatgattaaatctgcacagataatggaaagtcaatatggtcatctttttgacaaaattataataaatgatgacctcactgtggcattcaatgagctcaaaacaacttttgacaaattagagacagagacccattgggtgccagtgagctggttacattcataactaagagaaatttccataattgtctttttctatagagtgcatgatgaaatcaattacagttttggtagtagggtttttaaatctatatcactgtcatagatgtacaatcttggttcaagttgaatgctggttttgtttgtatctttttacagccttatttcaaacgccatgtgttagtataagatccgaaatcaaaatatgcacagtactgtattctaagcaaaacctcaaaccttctcgttgtcttcaataccgctctatctccaagatgaggctgaaattttcagagagacttagctagaggcttagtatgtatgggagttcagcgcttctgctggtctcaggtgtggctgctgctgtcgagtttgaatgttagctgttgaaggtatcaattcagcagccatgagcagctccagacagacaggtgagctctgctgtttctgggtggatcatcacagatttagccgggcaggcagtaaggtgtcctcttactattcaaaaagtgtagactttcttacatattcgcaatacgttcacagtgtgtgcattttaaaataattcttaaaggagtaactgaaattttaccttgagtgaatggccttcataatatagcttgagaagtccttttgagtacctgtcagtgactcaacaacatttaataagggaaagtagacttttaacagttattatatatgtaacgaaaagcctttcctttgggattaatataagtaagaatggtagccttgtggcaagaaatgattacaaaggatatttttatttgtaattcctcagaagacaatttatgaagtcacccaaaatgttattttagctggttttggatttttccaataaattagaagaaggatttctattctaaaacatgtaaaacctgttttacatattactgatacaattaaagattatttttcatctatgtgcaatagatcacccctctttaaattgctctaagatttattttagaaaacttttcatgtgatgttatttctttgtcatcaaaatgcttgttaacactgtccagacaccatcctaaccttgccattgttaaagaagtttaggaaagactcttatattgtaaatatttagatgggttctctcacttttctttgatactactgattttcagcaagtgaattatataattcaaaatgctagaaatgtctatccgttctataagagagcatatcctgccgttcttgcatgcagtgaagccctgcccgtcgaaaatcattgcatctgtgactttcaaagtggaaaaaaaaatgttatttttttgttgatttgtaaagagagtttaaatgtcatgtgaaaaaaaatagaatgtagtaaaattctatatatttatgaaatattttaaaggcatatttttttaaatatcaaacggggctattcataaaataaactgattgtatgtcaagatgtcctaatttaaaagagtagttttataaatcatggtcaacattccatgtaaatatttgagctttacaaagatagatccaagtgtgcgatctgtgcactgcacatttgatagcattattcactggttttccttcatacttgtcaagttcatattagaagcagagacaaaaaccactccaatggccttgacacatagtcacaccaaaatagataatcagactaagtattatataacaacgtgatccagacagtgagttctaagtgtattaattaaatagcaaaaaattttgtttttaaaaaatgaaagagggagggttgccaacctgaagtcttaagtagattgtttgggtagcatatttccttctttgaacattgtctgaaattttctataaatcaagacttcttgtacaaagaatgatgggacatatgtaataattcaggcaatcacctgagtaatttaggcagtccaaattctttaccctgaaatacccacattttaaaaaaattgcagataattgcttcagttatttactttggggacagagatatagtgtaaagtgggagaaactgagtccttttttggtggtggtaataataagatgttataaaaatataacattttaaaaaagaaaggtccagaccttaagcgcagagctagaacaatattttttaaataatggggggaaaagggggcactttggtaattttagaaatcaggtagtatacttttttttttttttttgagacagggtcttgccatgttgctcaggctggtcttgaactcctgggctcaagcaatcctcctgccttggcctcccaaagtgctgggattacaggcatgatccaccgtgcccagccggtagacgtggtcttaaaaacagtgtttacatggccatcttgatgcttagaaagataattgattaaaatttaataaggcagggccaactccgagagttcattgacaacggcagcaaaaaggccctgaattctgtactttcttcccccagcctccttctccagcaaggagaatagcactcctccctccagaagccagctccctaagttggagccactatgtaagagaagaggaacgttcactttttaaaattcatatatttaaaaatcaagaccaaaaagtaaattctgtactcctattattgactgtagtcaatcaaacataaaaaggtgaaagtaaaatttaattttttacccttattttactgaccaatatggaagttcttggtatctttaaggctgaccttcctggtattgtgtaatgattgaatgtatctaaactgtaataatttgaaactgacaaacataaccttctcagacttacaaaactatgttctttctaaagatacagatttttattattttattttgactaggaaggatttataaataaatgtaatgaaaaatctttgatcttaataaagtaccttcaaacagtgtgtgtacttacttgaaaattgtttttgcacttggatattctattttattatactactattgtgatctattccattatactatttcccatggtagaacaaattatattttctactgtgatatgaagtgatgtaattgaacttgccatgtctaaaattaaatttcatatttttttcaatcaaa

SEQ ID NO: 6393 - protein, 576 aa, Homo sapiens
MPALSTGSGSDTGLYELLAALPAQLQPHVDSQEDLTFLWDMFGEKSLHSLVKIHEKLHYYEKQSPVPILHGAAALADDLAEELQNKPLNSEIRELLKLLSKPNVKALLSVHDTVAQKNYDPVLPPMPEDIDDEEDSVKIIRLVKNREPLGATIKKDEQTGAIIVARIMRGGAADRSGLIHVGDELREVNGIPVEDKRPEEIIQILAQSQGAITFKIIPGSKEETPSKEGKMFIKALFDYNPNEDKAIPCKEAGLSFKKGDILQIMSQDDATWWQAKHEADANPRAGLIPSKHFQERRLALRRPEILVQPLKVSNRKSSGFRKSFRLSRKDKKTNKSMYECKKSDQYDTADVPTYEEVTPYRRQTNEKYRLVVLVGPVGVGLNELKRKLLISDTQHYGVTVPHTTRARRSQESDGVEYIFISKHLFETDVQNNKFIEYGEYKNNYYGTSIDSVRSVLAKNKVCLLDVQPHTVKHLRTLEFKPYVIFIKPPSIERLRETRKNAKIISSRDDQGAAKPFTEEDFQEMIKSAQIMESQYGHLFDKIIINDDLTVAFNELKTTFDKLETETHWVPVSWLHS

SEQ ID NO: 6394 - DNA, 4882 bp, Homo sapiens
aatggaactaacaggaaccacctgtgcacttccttttacaggaatgttcataaacagcaggttctcctaggctttgaacaaaatttagcttctccaaggccaaaagcctcattgtgaagagaaagaaagaaacggcttacaaaatatacagatcttggtagacaacgtggctgcaggctgttgaattggaattccctgtggctgtccgaaggcagggtgtccggagagcggtgggctgacctgttcctacaccttgcatcatgccagctttgtcaacgggatctgggagtgacactggtctgtatgagctgttggctgctctgccagcccagctgcagccacatgtggatagccaggaagacctgaccttcctctgggatatgtttggtgaaaaaagcctgcattcattggtaaagattcatgaaaaactacactactatgagaagcagagtccggtgcccattctccatggtgcggcggccttggccgatgatctggccgaagagcttcagaacaagccattaaacagtgagatcagagagctgttgaaactactgtcaaaacccaatgtgaaggctttgctctctgtacatgatactgtggctcagaagaattacgacccagtgttgcctcctatgcctgaagatattgacgatgaggaagactcagtaaaaataatccgtctggtcaaaaatagagaaccactgggagctaccattaagaaggatgaacagaccggggcgatcattgtggccagaatcatgagaggaggagctgcagatagaagtggtcttattcatgttggtgatgaacttagggaagtcaacgggataccagtggaggataaaaggcctgaggaaataatacagattttggctcagtctcagggagcaattacatttaagattatacccggcagcaaagaggagacaccatcaaaagaaggcaagatgtttatcaaagccctctttgactataatcctaatgaggataaggcaattccatgtaaggaagctgggctttctttcaaaaagggagatattcttcagattatgagccaagatgatgcaacttggtggcaagcgaaacacgaagctgatgccaaccccagggcaggcttgatcccctcaaagcatttccaggaaaggagattggctttgagacgaccagaaatattggttcagcccctgaaagtttccaacaggaaatcatctggttttagaaaaagttttcgtcttagtagaaaagataagaaaacaaataaatccatgtatgaatgcaagaagagtgatcagtacgacacagctgacgtacccacatacgaagaagtgacaccgtatcggcgacaaactaatgaaaaatacagactcgttgtcttggttggtcccgtgggagtagggctgaatgaactgaaacgaaagctgctgatcagtgacacccagcactatggcgtgacagtgccccataccaccagagcaagaagaagccaggagagtgatggtgttgaatacattttcatttccaagcatttgtttgagacagatgtacaaaataacaagtttattgaatatggagaatataaaaacaactactacggcacaagtatagactcagttcggtctgtccttgctaaaaacaaagtttgtttgttggatgttcagcctcatacagtgaagcatttaaggacactagaatttaagccctatgtgatatttataaagcctccatcaatagagcgtttgagagaaacaagaaaaaatgcaaagattatttcaagcagagatgaccaaggtgctgcaaaacccttcacagaagaagattttcaagaaatgattaaatctgcacagataatggaaagtcaatatggtcatctttttgacaaaattataataaatgatgacctcactgtggcattcaatgagctcaaaacaacttttgacaaattagagacagagacccattgggtgccagtgagctggttacattcataactaagagaaatttccataattgtctttttctatagagtgcatgatgaaatcaattacagttttggtagtagggtttttaaatctatatcactgtcatagatgtacaatcttggttcaagttgaatgctggttttgtttgtatctttttacagccttatttcaaacgccatgtgttagtataagatccgaaatcaaaatatgcacagtactgtattctaagcaaaacctcaaaccttctcgttgtcttcaataccgctctatctccaagatgaggctgaaattttcagagagacttagctagaggcttagtatgtatgggagttcagcgcttctgctggtctcaggtgtggctgctgctgtcgagtttgaatgttagctgttgaaggtatcaattcagcagccatgagcagctccagacagacaggtgagctctgctgtttctgggtggatcatcacagatttagccgggcaggcagtaaggtgtcctcttactattcaaaaagtgtagactttcttacatattcgcaatacgttcacagtgtgtgcattttaaaataattcttaaaggagtaactgaaattttaccttgagtgaatggccttcataatatagcttgagaagtccttttgagtacctgtcagtgactcaacaacatttaataagggaaagtagacttttaacagttattatatatgtaacgaaaagcctttcctttgggattaatataagtaagaatggtagccttgtggcaagaaatgattacaaaggatatttttatttgtaattcctcagaagacaatttatgaagtcacccaaaatgttattttagctggttttggatttttccaataaattagaagaaggatttctattctaaaacatgtaaaacctgttttacatattactgatacaattaaagattatttttcatctatgtgcaatagatcacccctctttaaattgctctaagatttattttagaaaacttttcatgtgatgttatttctttgtcatcaaaatgcttgttaacactgtccagacaccatcctaaccttgccattgttaaagaagtttaggaaagactcttatattgtaaatatttagatgggttctctcacttttctttgatactactgattttcagcaagtgaattatataattcaaaatgctagaaatgtctatccgttctataagagagcatatcctgccgttcttgcatgcagtgaagccctgcccgtcgaaaatcattgcatctgtgactttcaaagtggaaaaaaaaatgttatttttttgttgatttgtaaagagagtttaaatgtcatgtgaaaaaaaatagaatgtagtaaaattctatatatttatgaaatattttaaaggcatatttttttaaatatcaaacggggctattcataaaataaactgattgtatgtcaagatgtcctaatttaaaagagtagttttataaatcatggtcaacattccatgtaaatatttgagctttacaaagatagatccaagtgtgcgatctgtgcactgcacatttgatagcattattcactggttttccttcatacttgtcaagttcatattagaagcagagacaaaaaccactccaatggccttgacacatagtcacaccaaaatagataatcagactaagtattatataacaacgtgatccagacagtgagttctaagtgtattaattaaatagcaaaaaattttgtttttaaaaaatgaaagagggagggttgccaacctgaagtcttaagtagattgtttgggtagcatatttccttctttgaacattgtctgaaattttctataaatcaagacttcttgtacaaagaatgatgggacatatgtaataattcaggcaatcacctgagtaatttaggcagtccaaattctttaccctgaaatacccacattttaaaaaaattgcagataattgcttcagttatttactttggggacagagatatagtgtaaagtgggagaaactgagtccttttttggtggtggtaataataagatgttataaaaatataacattttaaaaaagaaaggtccagaccttaagcgcagagctagaacaatattttttaaataatggggggaaaagggggcactttggtaattttagaaatcaggtagtatacttttttttttttttttgagacagggtcttgccatgttgctcaggctggtcttgaactcctgggctcaagcaatcctcctgccttggcctcccaaagtgctgggattacaggcatgatccaccgtgcccagccggtagacgtggtcttaaaaacagtgtttacatggccatcttgatgcttagaaagataattgattaaaatttaataaggcagggccaactccgagagttcattgacaacggcagcaaaaaggccctgaattctgtactttcttcccccagcctccttctccagcaaggagaatagcactcctccctccagaagccagctccctaagttggagccactatgtaagagaagaggaacgttcactttttaaaattcatatatttaaaaatcaagaccaaaaagtaaattctgtactcctattattgactgtagtcaatcaaacataaaaaggtgaaagtaaaatttaattttttacccttattttactgaccaatatggaagttcttggtatctttaaggctgaccttcctggtattgtgtaatgattgaatgtatctaaactgtaataatttgaaactgacaaacataaccttctcagacttacaaaactatgttctttctaaagatacagatttttattattttattttgactaggaaggatttataaataaatgtaatgaaaaatctttgatcttaataaagtaccttcaaacagtg

SEQ ID NO: 6395 - protein, 576 aa, Homo sapiens; identical to SEQ ID NO: 6393

SEQ ID NO: 6396 - DNA, 2145 bp, Homo sapiens
acagtgccaatggaactaacaggaaccacctgtgcacttccttttacaggaatgttcataaacagcaggttctcctaggctttgaacaaaatttagcttctccaaggccaaaagcctcattgtgaagagaaagaaaggtatagcagtcttggcagttgctgaactgaattcctggctgatttccttactgcataaactcaactgctctcactgaggtcgtcattaagtcctgtgtgtgtttgggcaggccgacttgatttacagccagcactccactgcggaaacggcttacaaaatatacagatcttggtagacaacgtggctgcaggctgttgaattggaattccctgtggctgtccgaaggcagggtgtccggagagcggtgggctgacctgttcctacaccttgcatcatgccagctttgtcaacgggatctgggagtgacactggtctgtatgagctgttggctgctctgccagcccagctgcagccacatgtggatagccaggaagacctgaccttcctctgggatatgtttggtgaaaaaagcctgcattcattggtaaagattcatgaaaaactacactactatgagaagcagagtccggtgcccattctccatggtgcggcggccttggccgatgatctggccgaagagcttcagaacaagccattaaacagtgagatcagagagctgttgaaactactgtcaaaacccaatgtgaaggctttgctctctgtacatgatactgtggctcagaagaattacgacccagtgttgcctcctatgcctgaagatattgacgatgaggaagactcagtaaaaataatccgtctggtcaaaaatagagaaccactgggagctaccattaagaaggatgaacagaccggggcgatcattgtggccagaatcatgagaggaggagctgcagatagaagtggtcttattcatgttggtgatgaacttagggaagtcaacgggataccagtggaggataaaaggcctgaggaaataatacagattttggctcagtctcagggagcaattacatttaagattatacccggcagcaaagaggagacaccatcaaaagaaggcaagatgtttatcaaagccctctttgactataatcctaatgaggataaggcaattccatgtaaggaagctgggctttctttcaaaaagggagatattcttcagattatgagccaagatgatgcaacttggtggcaagcgaaacacgaagctgatgccaaccccagggcaggcttgatcccctcaaagcatttccaggaaaggagattggctttgagacgaccagaaatattggttcagcccctgaaagtttccaacaggaaatcatctggttttagaaaaagttttcgtcttagtagaaaagataagaaaacaaataaatccatgtatgaatgcaagaagagtgatcagtacgacacagctgacgtacccacatacgaagaagtgacaccgtatcggcgacaaactaatgaaaaatacagactcgttgtcttggttggtcccgtgggagtagggctgaatgaactgaaacgaaagctgctgatcagtgacacccagcactatggcgtgacagtgccccataccaccagagcaagaagaagccaggagagtgatggtgttgaatacattttcatttccaagcatttgtttgagacagatgtacaaaataacaagtttattgaatatggagaatataaaaacaactactacggcacaagtatagactcagttcggtctgtccttgctaaaaacaaagtttgtttgttggatgttcagcctcatacagtgaagcatttaaggacactagaatttaagccctatgtgatatttataaagcctccatcaatagagcgtttgagagaaacaagaaaaaatgcaaagattatttcaagcagagatgaccaaggtgctgcaaaacccttcacagaagaagattttcaagaaatgattaaatctgcacagataatggaaagtcaatatggtcatctttttgacaaaattataataaatgatgacctcactgtggcattcaatgagctcaaaacaacttttgacaaattagagacagagacccattgggtgccagtgagctggttacattcataact

SEQ ID NO: 6397 - protein, 576 aa, Homo sapiens; identical to SEQ ID NO: 6393

SEQ ID NO: 6398 - DNA, 697 bp, Homo sapiens
cgtgagacccttgcgcaaggtgctttccagctgtgcctggtgcagccggcgacccgcgagcgcagctgtgggcacgcccccacctcttcccacgccagagttttcccctctgctgggggcaccctccatttctgcatgggaatccccggggcacccaggcgggacgcgacccgaaagacacgccggagacccccaaccctggattacctgcggccttggcgctcccacgccggccgagcgctccagccgcggccccccgaaggttcggtgcgatgctggctgcaggcctgtgggagccgagcacgccgggccactgggatccggcggcggcagcggcagaagcaggaaccagggcgccggaccccagagcgtggcgcgcagtccagagcggagcggacgagtgagacccgcgtcgcccgcacgctcagaccgccctgctctgcccctgactcacggcgtctgagcctgcccaggggcggcgcagcggacgccagccaccgcctccccgacttttccatttcccctttctctccgtaaacagaaagagactgcccggttgcaggtcctcgagccgctgtgaagcagtcctcaagcggcagttatggcagtccataaaggctcgggcacagctggaagcacacgtgacacagatgttggaacaagtccagctagagacagatgaatatactcaacatct

SEQ ID NO: 6399 - protein, 133 aa, Homo sapiens
MGIPGAPRRDATRKTRRRPPTLDYLRPWRSHAGRALQPRPPEGSVRCWLQACGSRARRATGIRRRQRQKQEPGRRTPERGAQSRAERTSETRVARTLRPPCSAPDSRRLSLPRGGAADASHRLPDFSISPFSP

SEQ ID NO: 6400 - DNA, 354 bp, Homo sapiens
gagctggtgaaatggctggtctagcagggttctctcttgcttctggcttaatccagagcaggttcatctgttggggtaaattagaaggttttacttgaaaacgtatgtagagtttttaacaaggaggccaaaagggagagagcaactgaaaagaaagaaaaagtctgtggactccctgtatgtatgtatgtatgtatgtatgtatgtatgtatgtatgtatgatgtatttgagacaggttctggatctgtcgccctggctggactgcatgagctgagatcgtgtcattgtacttcagcctgggcgacaagagtgaaactccatttcaaaaataaaaaataaaataaaaataatt

SEQ ID NO: 6401 - protein, 53 aa, Homo sapiens
MYVCMYVCMYVCMYDVFETGSGSVALAGLHELRSCHCTSAWATRVKLHFKNKK

SEQ ID NO: 6402 - DNA, 1237 bp, Homo sapiens
gctccgcccgggcgcccagagggcaaatgaggggcggcggggtggcgggtgggggggagacgcggaatttcccagcgcgggggctctggcttaccctgcaaccgggcagtctctttctgtttacggagagaaaggggaaatggaaaagtcggggaggcggtggctggcgtccgctgcgccgcccctgggcaggctcagacgccgtgagtcaggggcagagcagggcggtctgagcgtgcgggcgacgcgggtctcactcgtccgctccgctctggactgcgcgccacgctctggggtccggcgccctggttcctgcttctgccgctgccgccgccggatcccagtggcccggcgtgctcggctcccacaggcctgcagccagcatcgcaccgaaccttcggggggccgcggctggagcgctcggccggcgtgggagcgccaaggccgcagatgcaatcttcttaccgcgaagaagccaggggaataggtagccacatcttgtttgcagataagaaaggaagctaacgcagtatctgcaaagccaggagtctgactcagtacttttctcactcatgcatacaaagcagctaaaaatgacacagcttatttaccatgcccctgacactgcactgagcactttatgagcttgaactctgttaatcctcacgaccacctcatgagactctccagaaagagcaacagtaatggagtacatgagcactggaagtgacaataaagaagagattgatttattaattaaacatttaaatgtgtctgatgtaatagacattatggaaaatctttatgcaagtgaagagccagcagtttatgaacccagtctaatgaccatgtgtcaagacagtaatcaaaacgatgagcgttctaagtctctgctgcttagtggccaagaggtaccatggttgtcatcagtcagatatggaactgtggaggatttgcttgcttttgcaaaccatatatccaacactgcaaagcatttttatggacaacgaccacaggaatctggaattttattaaacatggtacgtttctttccgatcagttgggtgctatgtgctcagctttcctactgcagcttcatttaatgcagagtggtgtttgaatttggcttagatgggctggcaggcatgattttaaaaaatgtaatcatcagtaagaagtacttccatgttaaagatgcaaaaaaaaaagtcttcattaaaatttctatttaaagatt

SEQ ID NO: 6403 - protein, 115 aa, Homo sapiens
MEKSGRRWLASAAPPLGRLRRRESGAEQGGLSVRATRVSLVRSALDCAPRSGVRRPGSCFCRCRRRIPVARRARLPQACSQHRTEPSGGRGWSARPAWERQGRRCNLLTAKKPGE

SEQ ID NO: 6404 - DNA, 2448 bp, Homo sapiens
gctccgcccgggcgcccagagggcaaatgaggggcggcggggtggcgggtgggggggagacgcggaatttcccagcgcgggggctctggcttaccctgcaaccgggcagtctctttctgtttacggagagaaaggggaaatggaaaagtcggggaggcggtggctggcgtccgctgcgccgcccctgggcaggctcagacgccgtgagtcaggggcagagcagggcggtctgagcgtgcgggcgacgcgggtctcactcgtccgctccgctctggactgcgcgccacgctctggggtccggcgccctggttcctgcttctgccgctgccgccgccggatcccagtggcccggcgtgctcggctcccacaggcctgcagccagcatcgcaccgaaccttcggggggccgcggctggagcgctcggccggcgtgggagcgccaaggccgcagatgcaatcttcttaccgcgaagaagccaggggaataggtagccacatcttgtttgcagataagaaaggaagctaacgcagtatctgcaaagccaggagtctgactcagtacttttctcactcatgcatacaaagcagctaaaaatgacacagcttatttaccatgcccctgacactgcactgagcactttatgagcttgaactctgttaatcctcacgaccacctcatgagactctccagaaagagcaacagtaatggagtacatgagcactggaagtgacaataaagaagagattgatttattaattaaacatttaaatgtgtctgatgtaatagacattatggaaaatctttatgcaagtgaagagccagcagtttatgaacccagtctaatgaccatgtgtcaagacagtaatcaaaacgatgagcgttctaagtctctgctgcttagtggccaagaggtaccatggttgtcatcagtcagatatggaactgtggaggatttgcttgcttttgcaaaccatatatccaacactgcaaagcatttttatggacaacgaccacaggaatctggaattttattaaacatggtacgtttctttccgatcagttgggtgctatgtgctcagctttcctactgcagcttcatttaatgcagagtggtgtttgaatttggcttagatgggctggcaggcatgattttaaaaaatgtaatcatcagtaagaagtacttccatgttaaagatgcaaaaaaaaaagtcttcattaaaatttctatttaaagattcttgatcatattttagtagtatttctacaaataggtaattaagaagaatgtattttggccgggtgcaggggctcacgcctgtaatccgcgcacttggagaggccgaggtgggtggatcacttgaggtcagcaattagagaccagtctggccaacatggtgaaaccccgtctctactaaaaatacaaaattagcctggcatggtggcgggtgcctgtaattccagctacctgggaggctgaggcacgagaatcccttgaacctgggaggtggaggttgtgatgagccgagatcacaccactgcactccagcctgtgtgactgagtgagactctgtctcaacaacaacaaagaagaatgtattttaatttaacagttcactaaaaagtttattcatcagttatgcagaaaagaaaggcttaatgagactccttcgtctgagaggggaataaacactttgtcactaattaatcttgaaggctgaattatttgttcctttcttgtcacatcttgaaatgttattaattcatttcttgcaaaaatgtagtatgtaggcagtaaatagctatccacagattcactctctttcattggcaaagtatgaatggcaagtgatatatttgcttaatcatcgcaagtatgcaaatcatgcaaaatattgtggcaacattttgttgccataatagtagatcaggtgatgtgtttaggtgtgcctgggattctgtcaggcttttagtatgtcagaggtgaacgtaggtgctggctaaaggtaacctaatatttttaaaaagaataatttgcaaaggagtaggtggtagcttgcaaaacatgcttattgatgaaagtgacgccctttcttttggtgtatctaaatggcaaaatggctaatgttgggggaaagtcggtgctgaatgagtgcggagtccagaaaaagtacttaattattttgcttttttgcataccacattcatttaattaaaaacaacagagtaatttaggtcaggtatgtagtgaattgttttgtcagaagccagtcatactcaaccatagctcacaatggagcaagataatattttgcattgttgtgtgactgctttggtctggctctatcaagctctatttaatagtcgactaagtactttaccttcagaatatttcttccttttataaatgagaaataatcatttgaactagaagccatatctgattttccc

SEQ ID NO: 6405 - protein, 115 aa, Homo sapiens; identical to SEQ ID NO: 6403

SEQ ID NO: 6406 - DNA, 3620 bp, Homo sapiens
gctccgcccgggcgcccagagggcaaatgaggggcggcggggtggcgggtgggggggagacgcggaatttcccagcgcgggggctctggcttaccctgcaaccgggcagtctctttctgtttacggagagaaaggggaaatggaaaagtcggggaggcggtggctggcgtccgctgcgccgcccctgggcaggctcagacgccgtgagtcaggggcagagcagggcggtctgagcgtgcgggcgacgcgggtctcactcgtccgctccgctctggactgcgcgccacgctctggggtccggcgccctggttcctgcttctgccgctgccgccgccggatcccagtggcccggcgtgctcggctcccacaggcctgcagccagcatcgcaccgaaccttcggggggccgcggctggagcgctcggccggcgtgggagcgccaaggccgcagatgcaatcttcttaccgcgaagaagccaggggaataggtagccacatcttgtttgcagataagaaaggaagctaacgcagtatctgcaaagccaggagtctgactcagtacttttctcactcatgcatacaaagcagctaaaaatgacacagcttatttaccatgcccctgacactgcactgagcactttatgagcttgaactctgttaatcctcacgaccacctcatgagactctccagaaagagcaacagtaatggagtacatgagcactggaagtgacaataaagaagagattgatttattaattaaacatttaaatgtgtctgatgtaatagacattatggaaaatctttatgcaagtgaagagccagcagtttatgaacccagtctaatgaccatgtgtcaagacagtaatcaaaacgatgagcgttctaagtctctgctgcttagtggccaagaggtaccatggttgtcatcagtcagatatggaactgtggaggatttgcttgcttttgcaaaccatatatccaacactgcaaagcatttttatggacaacgaccacaggaatctggaattttattaaacatggtcatcactccccaaaatggacgttaccaaatagattccgatgttctcctgatcccctggaagctgacttacaggaatattggttctgattttattcctcggggcgcctttggaaaggtatacttggcacaagatataaagacgaagaaaagaatggcgtgtaaactgatcccagtagatcaatttaagccatctgatgtggaaatccaggcttgcttccggcacgagaacatcgcagagctgtatggcgcagtcctgtggggtgaaactgtccatctctttatggaagcaggcgagggagggtctgttctggagaaactggagagctgtggaccaatgagagaatttgaaattatttgggtgacaaagcatgttctcaagggacttgattttctacactcaaagaaagtgatccatcatgatattaaacctagcaacattgttttcatgtccacaaaagctgttttggtggattttggcctaagtgttcaaatgaccgaagatgtctattttcctaaggacctccgaggaacagagatttacatgagcccagaggtcatcctgtgcaggggccattcaaccaaagcagacatctacagcctgggggccacgctcatccacatgcagacgggcaccccaccctgggtgaagcgctaccctcgctcagcctatccctcctacctgtacataatccacaagcaagcacctccactggaagacattgcagatgactgcagtccagggatgagagagctgatagaagcttccctggagagaaaccccaatcaccgcccaagagccgcagacctactaaaacatgaggccctgaacccgcccagagaggatcagccacgctgtcagagtctggactctgccctcttggagcgcaagaggctgctgagtaggaaggagctggaacttcctgagaacattgctgattcttcgtgcacaggaagcaccgaggaatctgagatgctcaagaggcaacgctctctctacatcgacctcggcgctctggctggctacttcaatcttgttcggggaccaccaacgcttgaatatggctgaaggatgccatgtttgctctaaattaagacagcattgatctcctggaggctggttctgctgcctctacacaggggccctgtacagtgaatggtgccattttcgaaggagcagtgtgacctcctgtgacccgtgaatgtgcctccaagcggccctgtgtgtttgacatgtgaagctatttgatatgcaccaggtctcaaggttctcatttctcaggtgacgtgattctaaggcaggaatttgagagttcacagaaggatcgtgtctgctgactgtttcattcactgtgcactttgctcaaaattttaaaaataccaatcacaaggataatagagtagcctaaaattactattcttggttcttatttaagtatggaatattcattttactcagaatagctgttttgtgtatattggtgtatattatataactctttgagcctttattggtaaattctggtatacattgaattcattataatttgggtgactagaacaacttgaagattgtagcaataagctggactagtgtcctaaaaatggctaactgatgaattagaagccatctgacagcaggccactagtgacagtttcttttgtgttcctatggaaacattttatactgtacatgctatgctgaagacattcaaaacgtgatgttttgaatgtggataaaactgtgtaaaccacataatttttgtacatcccaaaggatgagaatgtgacctttaagaaaaatgaaaacttttgtaaattattgatgattttgtaattcttatgactaaattttcttttaagcatttgtatattaaaatagcatactgtgtatgttttatatcaaatgccttcatgaatctttcatacatatatatatttgtaacattgtaaagtatgtgagtagtcttatgtaaagtatgtttttacattatgcaaataaaacccaatacttttgtccaatgtggttggtcaaatcaactgaataaattcagtattttgccttagttgttgtgaagcctgtgattctcagctgggactgaggatgggctataggagttgagttatagattggaaggaaatgtgtatcataagaaggcaaaaaataccaggagctttgcaaattgtattaatacactccttttctattgctcttgtatgaagctattgtcagctggaatggtttgcatcccccggtacattgaggtagaaaaaacaattgtggttgtgcctgtaatcccagcactttgggatgctgaagcgggaaaactggttgagcccaagagttcaagaccagcctggccaacatgatgaaatcccatctctacaaaaaatacaaaaatttgccaggtgtgatggtgcatgcctgtagtcccagctactcaggtggctgagatgtgaggatcacttaagcctgggaggcgaaggttgcagtgagccaagatcatgccacactacactccagcctggataacagagggaggccttgtccctgctaaaaataaaataataattgtgtgcc

SEQ ID NO: 6407 - protein, 467 aa, Homo sapiens; identical to SEQ ID NO: 658

SEQ ID NO: 6408 - DNA, 899 bp, Homo sapiens
gggcagagcagggcggtctgagcgtgcgggcgacgcgggtctcactcgtccgctccgctctggactgcgcgccacgctctggggtccggcgccctggttcctgcttctgccgctgccgccgccggatcccagtggcccggcgtgctcggctcccacaggcctgcagccagcatcgcaccgaaccttcggggggccgcggctggagcgctcggccggcgtgggagcgccaaggccgcagatgcaatcttcttaccgcgaagaagccaggggaataggtagccacatcttgtttgcagataagaaaggaagctaacgcagtatctgcaaagccaggagtctgactcagtacttttctcactcatgcatacaaagcagctaaaaatgacacagcttatttaccatgcccctgacactgcactgagcactttatgagcttgaactctgttaatcctcacgaccacctcatgaggtaggtgctgttattacttccattttacagatggggaaaattgaggtcgagagaggttacgttacttgctcaacgtcatgcaagcagtaaatgggagtgtggggggaggcaatgagatttgactccaagcagtctgagaccagaggaatgttggattgcaggatgctaaactgctttcctcagacacaattcatacgtcagaaaatgaccatcaagtaagtgaatgatgacactaaattgcatggttcttttgtcaaatgaaattcactgagaggcagatggctgggtcatgcgtgcaggtggctctgcagtggagcatttcctggagctttgaaatgaagctccagattgatcagacgtgcgtggctttagccctgagtgtcctgtgtgttaaaggcttgtgcttctcagaacttgaaatacctttcag

SEQ ID NO: 6409 - protein, 56 aa, Homo sapiens
MKFTERQMAGSCVQVALQWSISWSFEMKLQIDQTCVALALSVLCVKGLCFSELEIP

SEQ ID NO: 6410 - DNA, 3518 bp, Homo sapiens
ttcctgaaacttgacctattgccatcaaatttgtgtagattgaaatccatttttccagcttctggctttcagggcctgagttttatttgccaagttagctcctgcatttagtgaagaggttatttttctttaaagtcaccagaggcataaaaaagccatagcgattcttgcagggagggtgccacttcgggggaatagctgggttgtgtaaggttggaagccctaaagagccggtagcctaaggtcttcaaagatttctgagctgctcttgattcgtgtgtatgtttagtgaaagtttgttttcagtgcctgtagctgataccactgactctgtgagtaagagtaagctctctggatctcaggtttccctctgcaaagtgagctggactaaaggttatcttaggtccctttcaactctgcactgtcaacttgaattcatacacacagttgacacagaaccctcgttttctgaacaaaagcatataaaatcctgttgccaatccttgtatgtcagtttcccatgggtcttgaatgcaaatacaaatatcgtaaactaaatatttgtgttttctttcctagactctccagaaagagcaacagtaatggagtacatgagcactggaagtgacaataaagaagagattgatttattaattaaacatttaaatgtgtctgatgtaatagacattatggaaaatctttatgcaagtgaagagccagcagtttatgaacccagtctaatgaccatgtgtcaagacagtaatcaaaacgatgagcgttctaagtctctgctgcttagtggccaagaggtaccatggttgtcatcagtcagatatggaactgtggaggatttgcttgcttttgcaaaccatatatccaacactgcaaagcatttttatggacaacgaccacaggaatctggaattttattaaacatggtcatcactccccaaaatggacgttaccaaatagattccgatgttctcctgatcccctggaagctgacttacaggaatattggttctgattttattcctcggggcgcctttggaaaggtatacttggcacaagatataaagacgaagaaaagaatggcgtgtaaactgatcccagtagatcaatttaagccatctgatgtggaaatccaggcttgcttccggcacgagaacatcgcagagctgtatggcgcagtcctgtggggtgaaactgtccatctctttatggaagcaggcgagggagggtctgttctggagaaactggagagctgtggaccaatgagagaatttgaaattatttgggtgacaaagcatgttctcaagggacttgattttctacactcaaagaaagtgatccatcatgatattaaacctagcaacattgttttcatgtccacaaaagctgttttggtggattttggcctaagtgttcaaatgaccgaagatgtctattttcctaaggacctccgaggaacagagatttacatgagcccagaggtcatcctgtgcaggggccattcaaccaaagcagacatctacagcctgggggccacgctcatccacatgcagacgggcaccccaccctgggtgaagcgctaccctcgctcagcctatccctcctacctgtacataatccacaagcaagcacctccactggaagacattgcagatgactgcagtccagggatgagagagctgatagaagcttccctggagagaaaccccaatcaccgcccaagagccgcagacctactaaaacatgaggccctgaacccgcccagagaggatcagccacgctgtcagagtctggactctgccctcttggagcgcaagaggctgctgagtaggaaggagctggaacttcctgagaacattgctgattcttcgtgcacaggaagcaccgaggaatctgagatgctcaagaggcaacgctctctctacatcgacctcggcgctctggctggctacttcaatcttgttcggggaccaccaacgcttgaatatggctgaaggatgccatgtttgctctaaattaagacagcattgatctcctggaggctggttctgctgcctctacacaggggccctgtacagtgaatggtgccattttcgaaggagcagtgtgacctcctgtgacccgtgaatgtgcctccaagcggccctgtgtgtttgacatgtgaagctatttgatatgcaccaggtctcaaggttctcatttctcaggtgacgtgattctaaggcaggaatttgagagttcacagaaggatcgtgtctgctgactgtttcattcactgtgcactttgctcaaaattttaaaaataccaatcacaaggataatagagtagcctaaaattactattcttggttcttatttaagtatggaatattcattttactcagaatagctgttttgtgtatattggtgtatattatataactctttgagcctttattggtaaattctggtatacattgaattcattataatttgggtgactagaacaacttgaagattgtagcaataagctggactagtgtcctaaaaatggctaactgatgaattagaagccatctgacagcaggccactagtgacagtttcttttgtgttcctatggaaacattttatactgtacatgctatgctgaagacattcaaaacgtgatgttttgaatgtggataaaactgtgtaaaccacataatttttgtacatcccaaaggatgagaatgtgacctttaagaaaaatgaaaacttttgtaaattattgatgattttgtaattcttatgactaaattttcttttaagcatttgtatattaaaatagcatactgtgtatgttttatatcaaatgccttcatgaatctttcatacatatatatatttgtaacattgtaaagtatgtgagtagtcttatgtaaagtatgtttttacattatgcaaataaaacccaatacttttgtccaatgtggttggtcaaatcaactgaataaattcagtattttgccttagttgttgtgaagcctgtgattctcagctgggactgaggatgggctataggagttgagttatagattggaaggaaatgtgtatcataagaaggcaaaaaataccaggagctttgcaaattgtattaatacactccttttctattgctcttgtatgaagctattgtcagctggaatggtttgcatcccccggtacattgaggtagaaaaaacaattgtggttgtgcctgtaatcccagcactttgggatgctgaagcgggaaaactggttgagcccaagagttcaagaccagcctggccaacatgatgaaatcccatctctacaaaaaatacaaaaatttgccaggtgtgatggtgcatgcctgtagtcccagctactcaggtggctgagatgtgaggatcacttaagcctgggaggcgaaggttgcagtgagccaagatcatgccacactacactccagcctggataacagagggaggccttgtccctgctaaaaataaaataataattgtgtgcc

SEQ ID NO: 6411 - protein, 467 aa, Homo sapiens; identical to SEQ ID NO: 658

SEQ ID NO: 6412 - DNA, 594 bp, Homo sapiens
ggtgggaggatcaattgagcccaggactttgagacaagcttaggcatcatagcaagaccccatcttaataattatagaattagagttaactttataataagtttagcacttaaaaagcagtatgttatttaatccttacaacaacccagttgttgctattgttattcttattttacaatcaaggaaataagtttgcagagattaaaataaagtgtccagagtcactcagtgacagaccctggacttgaacccagttctttctaagtctaaccctaaggtctaactgctacataactttaaaaaattataatattacatacattattaaaatatattagtgatataactaatatcactgagttttggctcaatgacagtcttaactatggtcattaatatttatgaggactctaaaggcctctctttgagcctaggaattctataataaacctcaagtagtgagcataaatgtatcttatttaaagatgtaaaacagcactcatgtttaactcatctgtgaagcaaaaaacgacccagaaaagcctttctttcctgactctaaatgagattctgaaaaatgcgttcgcgggcttc

SEQ ID NO: 6413 - protein, 30 aa, Homo sapiens
MFNSSVKQKTTQKSLSFLTLNEILKNAFAG

SEQ ID NO: 6414 - DNA, 249 bp, Homo sapiens
atgtatgcaaggccacacaaggtgtatggaagagttgtggagccaaagagaactgtctcaacagaagattctcaaagaccaggtgcccacttagctgtgaaaaagatatttgttggtggcattaaagaagacactgaagaatatcacctaagagattattttgaacagtgtggaaaaattgaagtgattgaaatcatgactgaaacgaggcagcagcaagaaaaggggctttgtctttgtaacctttga

SEQ ID NO: 6415 - protein, 82 aa, Homo sapiens [sequence omitted]

SEQ ID NO: 6416 - DNA, 571 bp, Homo sapiens
aacttttactttcagttcaggggtacatgtgcaggtttgttacataggtaaacttgtgtcatggggtttgctgtacagatgatttcatcacccaggtattaagcctagtacccattagttatttctcctgatcctctccctccttccaccttccatcctctgataggaaccagtgtatgttgttcccctctatgtgcccatatgttcccatcatttagctcccacttataagcgagaacatgcagtatttaattttctcttcctgtgctagtttgctaaggatgatggcctccagctccatccatgtctctgcaaaagacatgatctcattcttttttatggctgcatggttgtccgtggtgtgtatgtaccacattttctttatccagtctaccattgatgggcatttagtagattccatgtctttgctattgtgaacagtgttttggcaagatgaatggatttaggagaaaactccaccgttcggagtcacacgcgaaggctggagctcagatgggtgagtagaggcaaagctcattggtaggggtgatgggattgtttgcagagagac

SEQ ID NO: 6417 - protein, 65 aa, Homo sapiens
MQYLIFSSCASLLRMMASSSIHVSAKDMISFFFMAAWLSVVCMYHIFFIQSTIDGHLVDSMSLLL

SEQ ID NO: 6418 - DNA, 541 bp, Homo sapiens
gcaacctgtgaagagaaatatttaagctaatgtgttccatcgtgctggtgagcactttcaaaggagtgcatgaaagatatcacagcctcacaaatgcagagaaaagcctcccttggccactgctgatcaggaagtgagactttgtcctccccacagtgctatacctagccggctggattatcttcctcatggccaaaaggagactagacatggaaggcaaattgcagttagatgaatttaaccagctttctctacaccgcatgaagccagcgactgtgagggctctgctacgcggctgagcgggctgtgcaggcattgccaaggtctcctcccttgttgacgttccctgctcgtcttcacgtgatcccatctcagggctctgccgtccacgccctcaccaagctggatcctggaagtcatgcaattccttcttccttacttctgtaaaccaaaaagtgtctgagacagatctcagtcaacttagaggtttattttgctgaggttgaggaaacactcaggaaaaaagaaacacgagttacaa

SEQ ID NO: 6419 - protein, 36 aa, Homo sapiens
MAKRRLDMEGKLQLDEFNQLSLHRMKPATVRALLRG

SEQ ID NO: 6420 - DNA, 4238 bp, Homo sapiens
gcggcggccggccggggaggcggcctcggcgcacagtaatggcagcgctgtgagcaggggaacgcgagctgacagccgccgccgccgccgcctccgcccaccttcctcgccggggcttcgtctttcactccttcgggctgcctccccctccccttgtcccctgccccttgccctgcttctgcagaagatttcaacactacacttgcacaatgtctttgaaaccaagagtagtagattttgatgaaacatggaacaaacttttgacgacaataaaagccgtggtcatgttggaatacgtcgaaagagcaacatggaatgaccgtttctcagatatctatgctttatgtgtggcctatcctgaaccccttggagaaagactttatacagaaactaagatttttttggaaaatcatgttcggcatttgcataagagagttttggagtcagaagaacaagtacttgttatgtatcataggtactgggaagaatacagcaagggtgcagactatatggactgcttatataggtatctcaacacccagtttattaaaaagaataaattaacagaagcggaccttcagtatggctatggtggtgtagatatgaatgaaccacttatggaaataggagagctagcattggatatgtggaggaaattgatggttgaaccacttcaggccatccttatccgaatgctgctccgagaaatcaaaaatgatcgtggtggagaagacccaaaccagaaagtaatccatggggttattaactcctttgttcatgttgaacagtataagaaaaaattccccttaaagttttatcaggaaatttttgagtctccctttctgactgaaacaggagagtattacaaacaagaagcttcaaatttattacaagaatcaaactgctcacagtatatggaaaaggttctaggtagattaaaagatgaagaaattcgatgtcgaaaatacctacatccaagttcatatactaaggtgattcatgaatgtcaacaacgaatggtagcagaccacttacagtttttacatgcagaatgtcataatataattcgacaagagaaaaaaaatgacatggcaaatatgtacgtcttactccgtgctgtgtccactggtttacctcatatgattcaggagctgcaaaaccacatccatgatgagggccttcgagcaaccagcaaccttactcaggaaaacatgccaacactatttgtggagtcagttttggaagtgcatggtaaatttgttcagcttatcaacactgttttgaatggtgatcagcattttatgagtgcgttggataaggcccttacgtcagttgtaaattacagagaacctaagtctgtttgcaaagcacctgaactgcttgctaagtactgtgacaacttactgaagaagtcagcgaaagggatgacagagaatgaagtggaagacaggctcacgagcttcatcacagtgttcaaatacattgatgacaaggacgtctttcaaaagttctacgcaagaatgctggcaaaacgtttaattcatgggttatccatgtctatggactctgaagaagccatgatcaacaaattaaagcaagcctgtggttatgagtttaccagcaagctacatcggatgtatacagatatgagtgtcagcgctgatctcaacaataagttcaacaattttatcaaaaaccaagacacagtaatagatttgggaattagttttcaaatatatgttctacaggctggtgcgtggcctcttactcaggctccttcatctacgtttgcaattccccaggaattagaaaaaagtgtacagatgtttgaattattttatagccaacatttcagtggaaggaaacttacatggttacattatctgtgtacaggtgaagttaaaatgaactatttgggcaaaccatatgtagccatggttacaacataccaaatggcagttcttcttgcctttaacaacagtgaaactgtcagttataaagagcttcaggacagcactcagatgaatgaaaaggaactgacaaaaacaatcaaatcattacttgatgtgaaaatgattaaccatgattcagaaaaggaagatattgatgcagaatcttcgttttcattaaatatgaactttagcagtaaaagaacaaaatttaaaattactacatcaatgcagaaagacacaccacaagaaatggagcagactagaagtgcagttgatgaggaccggaaaatgtatctccaagctgctatagttcgtatcatgaaagcacgaaaagtgcttcggcacaatgcccttattcaagaggtgattagccagtcaagagctaggtttaatcccagtatcagcatgattaagaagtgtattgaagttctgatagacaaacaatacatagaacgcagccaggcgtcggcagatgaatacagctacgtcgcgtgatgtcgctctcctccagcgtggtgtgagaagatcattgccatcaccatttggtgtgttcctgtgggaaaaagcaggactgtgcctccataatttggtcatttggcagcccctgttttctgctgtttacaacatcaccagtgccacgtcatgagcgtcaaagaaaatgcctagagatatttcaagctcatgtcattatgacatttcttaaaactttattaaaagaatgagtgaagtattgctgaaaagtggaaattcggttgggtaccatgctttttctccccttcacgtttgcagttgatgtgtctttttttttttttttaatgtatcttaaaggacataaaatttaaaaacttaaatattgtaatatgacagataacctaataattgtatctacattaaaatgacaaacatgatactgctgcttgtcaaataaaaaaaaaataaagaaatagaatgccttttttatgtggatggagtatcaggttgaccacaaaatatattgactcaaagcagctaatgcatctttagttgcgtttttatctgaatggtttaattcacttgtactcctatttaaatcctacatgaaaaatgtctagattattgttcttgactgcataggactgcattcagcataaagaatgctttatttttatggattagatatattggatctaaacattttgaatcttgaagatgtaattccatcagcagtttctggtggtgtgctactccacagacatcgcagagtgtgagcaggatgcttggtgacctcaagtctggcacagagagagcttttcattcaaaagttgtctttcttcggttgcataatccattaattctagcatagactagtaccctagctctgtggccttccctgagtcttaggaaatctatgataccaacatattccttctatatgcctcccctacctgttacccttacaaccctcctccaacagtttagatactagagtcactctcatcaatcacagatgtgcttagcaatgcataacctaaatacttttttaaaaaagaaaattgtacattgtactgggtgccacatatataaatcccattattttgtttattttatatatatatatatatataatatatatatatatatatctcaacagcagtgttaagagtactgcgatctattatcatatttattgtctatccacaccatcaccaccaccaccacacccctcctccctcaacatacaatttttctttattttaaaaaaaataagagacggggtttcgccatgtttcccaggctagtctggaacttctggcctcaagcaatcctatctctgtctcccaaagtgctgggattacaagcatgagccactgcatccatccaacacaaaatttttaaaatcggaatattttaaagcaaatcacacaaattatttcacttataatacttcagtaaggcctttaaaaaatccacagtgatattattactcctaacaaaaacaataattacttagtatcatctaatatgtggttcatatttaaatttgttgttttgagatgggtcttacaattggtttattcaattgcattttttctaactcgtgtctcaagtgttttaaaaatctactgaacttataatgacttatataatgtatttctcattttacctttcttccaaaagaggaaataatggcaaaccatataatattgtacattcactgtcaaaaagcaaacccttgttttgataacttgttgattgataaaagttttccaaattgattcctttttttcttaaatatttataaatgtt

SEQ ID NO: 6421 - protein, 745 aa, Homo sapiens; identical to SEQ ID NO: 660

SEQ ID NO: 6422 - DNA, 4264 bp, Homo sapiens
attgctttccgggtggcgggggggatttggcagcagcggaagaaggagaccggagggtgtgtgttgggcaaagccggaggcagaggaggacgattgttttacggatcccgtgatcggcccgtccttctcccctttccccccctccctaccgcccctgtcccgccggggagcggcggcggccttggactttgctgtctttcctcgcggagacagatttcaacactacacttgcacaatgtctttgaaaccaagagtagtagattttgatgaaacatggaacaaacttttgacgacaataaaagccgtggtcatgttggaatacgtcgaaagagcaacatggaatgaccgtttctcagatatctatgctttatgtgtggcctatcctgaaccccttggagaaagactttatacagaaactaagatttttttggaaaatcatgttcggcatttgcataagagagttttggagtcagaagaacaagtacttgttatgtatcataggtactgggaagaatacagcaagggtgcagactatatggactgcttatataggtatctcaacacccagtttattaaaaagaataaattaacagaagcggaccttcagtatggctatggtggtgtagatatgaatgaaccacttatggaaataggagagctagcattggatatgtggaggaaattgatggttgaaccacttcaggccatccttatccgaatgctgctccgagaaatcaaaaatgatcgtggtggagaagacccaaaccagaaagtaatccatggggttattaactcctttgttcatgttgaacagtataagaaaaaattccccttaaagttttatcaggaaatttttgagtctccctttctgactgaaacaggagagtattacaaacaagaagcttcaaatttattacaagaatcaaactgctcacagtatatggaaaaggttctaggtagattaaaagatgaagaaattcgatgtcgaaaatacctacatccaagttcatatactaaggtgattcatgaatgtcaacaacgaatggtagcagaccacttacagtttttacatgcagaatgtcataatataattcgacaagagaaaaaaaatgacatggcaaatatgtacgtcttactccgtgctgtgtccactggtttacctcatatgattcaggagctgcaaaaccacatccatgatgagggccttcgagcaaccagcaaccttactcaggaaaacatgccaacactatttgtggagtcagttttggaagtgcatggtaaatttgttcagcttatcaacactgttttgaatggtgatcagcattttatgagtgcgttggataaggcccttacgtcagttgtaaattacagagaacctaagtctgtttgcaaagcacctgaactgcttgctaagtactgtgacaacttactgaagaagtcagcgaaagggatgacagagaatgaagtggaagacaggctcacgagcttcatcacagtgttcaaatacattgatgacaaggacgtctttcaaaagttctacgcaagaatgctggcaaaacgtttaattcatgggttatccatgtctatggactctgaagaagccatgatcaacaaattaaagcaagcctgtggttatgagtttaccagcaagctacatcggatgtatacagatatgagtgtcagcgctgatctcaacaataagttcaacaattttatcaaaaaccaagacacagtaatagatttgggaattagttttcaaatatatgttctacaggctggtgcgtggcctcttactcaggctccttcatctacgtttgcaattccccaggaattagaaaaaagtgtacagatgtttgaattattttatagccaacatttcagtggaaggaaacttacatggttacattatctgtgtacaggtgaagttaaaatgaactatttgggcaaaccatatgtagccatggttacaacataccaaatggcagttcttcttgcctttaacaacagtgaaactgtcagttataaagagcttcaggacagcactcagatgaatgaaaaggaactgacaaaaacaatcaaatcattacttgatgtgaaaatgattaaccatgattcagaaaaggaagatattgatgcagaatcttcgttttcattaaatatgaactttagcagtaaaagaacaaaatttaaaattactacatcaatgcagaaagacacaccacaagaaatggagcagactagaagtgcagttgatgaggaccggaaaatgtatctccaagctgctatagttcgtatcatgaaagcacgaaaagtgcttcggcacaatgcccttattcaagaggtgattagccagtcaagagctaggtttaatcccagtatcagcatgattaagaagtgtattgaagttctgatagacaaacaatacatagaacgcagccaggcgtcggcagatgaatacagctacgtcgcgtgatgtcgctctcctccagcgtggtgtgagaagatcattgccatcaccatttggtgtgttcctgtgggaaaaagcaggactgtgcctccataatttggtcatttggcagcccctgttttctgctgtttacaacatcaccagtgccacgtcatgagcgtcaaagaaaatgcctagagatatttcaagctcatgtcattatgacatttcttaaaactttattaaaagaatgagtgaagtattgctgaaaagtggaaattcggttgggtaccatgctttttctccccttcacgtttgcagttgatgtgtctttttttttttttttaatgtatcttaaaggacataaaatttaaaaacttaaatattgtaatatgacagataacctaataattgtatctacattaaaatgacaaacatgatactgctgcttgtcaaataaaaaaaaaataaagaaatagaatgccttttttatgtggatggagtatcaggttgaccacaaaatatattgactcaaagcagctaatgcatctttagttgcgtttttatctgaatggtttaattcacttgtactcctatttaaatcctacatgaaaaatgtctagattattgttcttgactgcataggactgcattcagcataaagaatgctttatttttatggattagatatattggatctaaacattttgaatcttgaagatgtaattccatcagcagtttctggtggtgtgctactccacagacatcgcagagtgtgagcaggatgcttggtgacctcaagtctggcacagagagagcttttcattcaaaagttgtctttcttcggttgcataatccattaattctagcatagactagtaccctagctctgtggccttccctgagtcttaggaaatctatgataccaacatattccttctatatgcctcccctacctgttacccttacaaccctcctccaacagtttagatactagagtcactctcatcaatcacagatgtgcttagcaatgcataacctaaatacttttttaaaaaagaaaattgtacattgtactgggtgccacatatataaatcccattattttgtttattttatatatatatatatatataatatatatatatatatatctcaacagcagtgttaagagtactgcgatctattatcatatttattgtctatccacaccatcaccaccaccaccacacccctcctccctcaacatacaatttttctttattttaaaaaaaataagagacggggtttcgccatgtttcccaggctagtctggaacttctggcctcaagcaatcctatctctgtctcccaaagtgctgggattacaagcatgagccactgcatccatccaacacaaaatttttaaaatcggaatattttaaagcaaatcacacaaattatttcacttataatacttcagtaaggcctttaaaaaatccacagtgatattattactcctaacaaaaacaataattacttagtatcatctaatatgtggttcatatttaaatttgttgttttgagatgggtcttacaattggtttattcaattgcattttttctaactcgtgtctcaagtgttttaaaaatctactgaacttataatgacttatataatgtatttctcattttacctttcttccaaaagaggaaataatggcaaaccatataatattgtacattcactgtcaaaaagcaaacccttgttttgataacttgttgattgataaaagttttccaaattgattcctttttttcttaaatatttataaatgtt

SEQ ID NO: 6423 - protein, 745 aa, Homo sapiens; identical to SEQ ID NO: 660

SEQ ID NO: 6424 - DNA, 2906 bp, Homo sapiens
ggcggcggccggccggggaggcggcctcggcgcacagtaatggcagcgctgtgagcaggggaacgcgagctgacagccgccgccgccgccgcctccgcccaccttcctcgccggggcttcgtctttcactccttcgggctgcctccccctccccttgtcccctgccccttgccctgcttctgcagaagatttcaacactacacttgcacaatgtctttgaaaccaagagtagtagattttgatgaaacatggaacaaacttttgacgacaataaaagccgtggtcatgttggaatacgtcgaaagagcaacatggaatgaccgtttctcagatatctatgctttatgtgtggcctatcctgaaccccttggagaaagactttatacagaaactaagatttttttggaaaatcatgttcggcatttgcataagagagttttggagtcagaagaacaagtacttgttatgtatcataggtactgggaagaatacagcaagggtgcagactatatggactgcttatataggtatctcaacacccagtttattaaaaagaataaattaacagaagcggaccttcagtatggctatggtggtgtagatatgaatgaaccacttatggaaataggagagctagcattggatatgtggaggaaattgatggttgaaccacttcaggccatccttatccgaatgctgctccgagaaatcaaaaatgatcgtggtggagaagacccaaaccagaaagtaatccatggggttattaactcctttgttcatgttgaacagtataagaaaaaattccccttaaagttttatcaggaaatttttgagtctccctttctgactgaaacaggagagtattacaaacaagaagcttcaaatttattacaagaatcaaactgctcacagtatatggaaaaggttctaggtagattaaaagatgaagaaattcgatgtcgaaaatacctacatccaagttcatatactaaggtgattcatgaatgtcaacaacgaatggtagcagaccacttacagtttttacatgcagaatgtcataatataattcgacaagagaaaaaaaatgacatggcaaatatgtacgtcttactccgtgctgtgtccactggtttacctcatatgattcaggagctgcaaaaccacatccatgatgagggccttcgagcaaccagcaaccttactcaggaaaacatgccaacactatttgtggagtcagttttggaagtgcatggtaaatttgttcagcttatcaacactgttttgaatggtgatcagcattttatgagtgcgttggataaggcccttacgtcagttgtaaattacagagaacctaagtctgtttgcaaagcacctgaactgcttgctaagtactgtgacaacttactgaagaagtcagcgaaagggatgacagagaatgaagtggaagacaggctcacgagcttcatcacagtgttcaaatacattgatgacaaggacgtctttcaaaagttctacgcaagaatgctggcaaaacgtttaattcatgggttatccatgtctatggactctgaagaagccatgatcaacaaattaaagcaagcctgtggttatgagtttaccagcaagctacatcggatgtatacagatatgagtgtcagcgctgatctcaacaataagttcaacaattttatcaaaaaccaagacacagtaatagatttgggaattagttttcaaatatatgttctacaggctggtgcgtggcctcttactcaggctccttcatctacgtttgcaattccccaggaattagaaaaaagtgtacagatgtttgaattattttatagccaacatttcagtggaaggaaacttacatggttacattatctgtgtacaggtgaagttaaaatgaactatttgggcaaaccatatgtagccatggttacaacataccaaatggcagttcttcttgcctttaacaacagtgaaactgtcagttataaagagcttcaggacagcactcagatgaatgaaaaggaactgacaaaaacaatcaaatcattacttgatgtgaaaatgattaaccatgattcagaaaaggaagatattgatgcagaatcttcgttttcattaaatatgaactttagcagtaaaagaacaaaatttaaaattactacatcaatgcagaaagacacaccacaagaaatggagcagactagaagtgcagttgatgaggaccggaaaatgtatctccaagctgctatagttcgtatcatgaaagcacgaaaagtgcttcggcacaatgcccttattcaagaggtgattagccagtcaagagctaggtttaatcccagtatcagcatgattaagaagtgtattgaagttctgatagacaaacaatacatagaacgcagccaggcgtcggcagatgaatacagctacgtcgcgtgatgtcgctctcctccagcgtggtgtgagaagatcattgccatcaccatttggtgtgttcctgtgggaaaaagcaggactgtgcctccataatttggtcatttggcagcccctgttttctgctgtttacaacatcaccagtgccacgtcatgagcgtcaaagaaaatgcctagagatatttcaagctcatgtcattatgacatttcttaaaactttattaaaagaatgagtgaagtattgctgaaaagtggaaattcggttgggtaccatgctttttctccccttcacgtttgcagttgatgtgtctttttttttttttttaatgtatcttaaaggacataaaatttaaaaacttaaatattgtaatatgacagataacctaataattgtatctacattaaaatgacaaacatgatactgctgcttgtcaaataaaaaaaaaataaagaaatagaatgcc

SEQ ID NO: 6425 - protein, 745 aa, Homo sapiens; identical to SEQ ID NO: 660

SEQ ID NO: 6426 - DNA, 2931 bp, Homo sapiens
attgctttccgggtggcgggggggatttggcagcagcggaagaaggagaccggagggtgtgtgttgggcaaagccggaggcagaggaggacgattgttttacggatcccgtgatcggcccgtccttctcccctttccccccctccctaccgcccctgtcccgccggggagcggcggcggccttggactttgctgtctttcctcgcggagacagatttcaacactacacttgcacaatgtctttgaaaccaagagtagtagattttgatgaaacatggaacaaacttttgacgacaataaaagccgtggtcatgttggaatacgtcgaaagagcaacatggaatgaccgtttctcagatatctatgctttatgtgtggcctatcctgaaccccttggagaaagactttatacagaaactaagatttttttggaaaatcatgttcggcatttgcataagagagttttggagtcagaagaacaagtacttgttatgtatcataggtactgggaagaatacagcaagggtgcagactatatggactgcttatataggtatctcaacacccagtttattaaaaagaataaattaacagaagcggaccttcagtatggctatggtggtgtagatatgaatgaaccacttatggaaataggagagctagcattggatatgtggaggaaattgatggttgaaccacttcaggccatccttatccgaatgctgctccgagaaatcaaaaatgatcgtggtggagaagacccaaaccagaaagtaatccatggggttattaactcctttgttcatgttgaacagtataagaaaaaattccccttaaagttttatcaggaaatttttgagtctccctttctgactgaaacaggagagtattacaaacaagaagcttcaaatttattacaagaatcaaactgctcacagtatatggaaaaggttctaggtagattaaaagatgaagaaattcgatgtcgaaaatacctacatccaagttcatatactaaggtgattcatgaatgtcaacaacgaatggtagcagaccacttacagtttttacatgcagaatgtcataatataattcgacaagagaaaaaaaatgacatggcaaatatgtacgtcttactccgtgctgtgtccactggtttacctcatatgattcaggagctgcaaaaccacatccatgatgagggccttcgagcaaccagcaaccttactcaggaaaacatgccaacactatttgtggagtcagttttggaagtgcatggtaaatttgttcagcttatcaacactgttttgaatggtgatcagcattttatgagtgcgttggataaggcccttacgtcagttgtaaattacagagaacctaagtctgtttgcaaagcacctgaactgcttgctaagtactgtgacaacttactgaagaagtcagcgaaagggatgacagagaatgaagtggaagacaggctcacgagcttcatcacagtgttcaaatacattgatgacaaggacgtctttcaaaagttctacgcaagaatgctggcaaaacgtttaattcatgggttatccatgtctatggactctgaagaagccatgatcaacaaattaaagcaagcctgtggttatgagtttaccagcaagctacatcggatgtatacagatatgagtgtcagcgctgatctcaacaataagttcaacaattttatcaaaaaccaagacacagtaatagatttgggaattagttttcaaatatatgttctacaggctggtgcgtggcctcttactcaggctccttcatctacgtttgcaattccccaggaattagaaaaaagtgtacagatgtttgaattattttatagccaacatttcagtggaaggaaacttacatggttacattatctgtgtacaggtgaagttaaaatgaactatttgggcaaaccatatgtagccatggttacaacataccaaatggcagttcttcttgcctttaacaacagtgaaactgtcagttataaagagcttcaggacagcactcagatgaatgaaaaggaactgacaaaaacaatcaaatcattacttgatgtgaaaatgattaaccatgattcagaaaaggaagatattgatgcagaatcttcgttttcattaaatatgaactttagcagtaaaagaacaaaatttaaaattactacatcaatgcagaaagacacaccacaagaaatggagcagactagaagtgcagttgatgaggaccggaaaatgtatctccaagctgctatagttcgtatcatgaaagcacgaaaagtgcttcggcacaatgcccttattcaagaggtgattagccagtcaagagctaggtttaatcccagtatcagcatgattaagaagtgtattgaagttctgatagacaaacaatacatagaacgcagccaggcgtcggcagatgaatacagctacgtcgcgtgatgtcgctctcctccagcgtggtgtgagaagatcattgccatcaccatttggtgtgttcctgtgggaaaaagcaggactgtgcctccataatttggtcatttggcagcccctgttttctgctgtttacaacatcaccagtgccacgtcatgagcgtcaaagaaaatgcctagagatatttcaagctcatgtcattatgacatttcttaaaactttattaaaagaatgagtgaagtattgctgaaaagtggaaattcggttgggtaccatgctttttctccccttcacgtttgcagttgatgtgtctttttttttttttttaatgtatcttaaaggacataaaatttaaaaacttaaatattgtaatatgacagataacctaataattgtatctacattaaaatgacaaacatgatactgctgcttgtcaaataaaaaaaaaataaagaaatagaatgcc

SEQ ID NO: 6427 - protein, 745 aa, Homo sapiens; identical to SEQ ID NO: 660

SEQ ID NO: 6428 - DNA, 2832 bp, Homo sapiens
attgctttccgggtggcgggggggatttggcagcagcggaagaaggagaccggagggtgtgtgttgggcaaagccggaggcagaggaggacgattgttttacggatcccgtgatcggcccgtccttctcccctttccccccctccctaccgcccctgtcccgccggggagcggcggcggccttggactttgctgtctttcctcgcggagacagatttcaacactacacttgcacaatgtctttgaaaccaagagtagtagattttgatgaaacatggaacaaacttttgacgacaataaaagccgtggtcatgttggaatacgtcgaaagagcaacatggaatgaccgtttctcagatatctatgctttatgtgtggcctatcctgaaccccttggagaaagactttatacagaaactaagatttttttggaaaatcatgttcggcatttgcataagagagttttggagtcagaagaacaagtacttgttatgtatcataggtactgggaagaatacagcaagggtgcagactatatggactgcttatataggtatctcaacacccagtttattaaaaagaataaattaacagaagcggaccttcagtatggctatggtggtgtagatatgaatgaaccacttatggaaataggagagctagcattggatatgtggaggaaattgatggttgaaccacttcaggccatccttatccgaatgctgctccgagaaatcaaaaatgatcgtggtggagaagacccaaaccagaaagtaatccatggggttattaactcctttgttcatgttgaacagtataagaaaaaattccccttaaagttttatcaggaaatttttgagtctccctttctgactgaaacaggagagtattacaaacaagaagcttcaaatttattacaagaatcaaactgctcacagtatatggaaaaggttctaggtagattaaaagatgaagaaattcgatgtcgaaaatacctacatccaagttcatatactaaggtgattcatgaatgtcaacaacgaatggtagcagaccacttacagtttttacatgcagaatgtcataatataattcgacaagagaaaaaaaatgacatggcaaatatgtacgtcttactccgtgctgtgtccactggtttacctcatatgattcaggagctgcaaaaccacatccatgatgagggccttcgagcaaccagcaaccttactcaggaaaacatgccaacactatttgtggagtcagttttggaagtgcatggtaaatttgttcagcttatcaacactgttttgaatggtgatcagcattttatgagtgcgttggataaggcccttacgtcagttgtaaattacagagaacctaagtctgtttgcaaagcacctgaactgcttgctaagtactgtgacaacttactgaagaagtcagcgaaagggatgacagagaatgaagtggaagacaggctcacgagcttcatcacagtgttcaaatacattgatgacaaggacgtctttcaaaagttctacgcaagaatgctggcaaaacgtttaattcatgggttatccatgtctatggactctgaagaagccatgatcaacaaattaaagcaagcctgtggttatgagtttaccagcaagctacatcggatgtatacagatatgagtgtcagcgctgatctcaacaataagttcaacaattttatcaaaaaccaagacacagtaatagatttgggaattagttttcaaatatatgttctacaggctggtgcgtggcctcttactcaggctccttcatctacgtttgcaattccccaggaattagaaaaaagtgtacagatgtttgaattattttatagccaacatttcagtggaaggaaacttacatggttacattatctgtgtacaggtgaagttaaaatgaactatttgggcaaaccatatgtagccatggttacaacataccaaatggcagttcttcttgcctttaacaacagtgaaactgtcagttataaagagcttcaggacagcactcagatgaatgaaaaggaactgacaaaaacaatcaaatcattacttgatgtgaaaatgattaaccatgattcagaaaaggaagatattgatgcagaatcttcgttttcattaaatatgaactttagcagtaaaagaacaaaatttaaaattactacatcaatgcagaaagacacaccacaagatgcccttattcaagaggtgattagccagtcaagagctaggtttaatcccagtatcagcatgattaagaagtgtattgaagttctgatagacaaacaatacatagaacgcagccaggcgtcggcagatgaatacagctacgtcgcgtgatgtcgctctcctccagcgtggtgtgagaagatcattgccatcaccatttggtgtgttcctgtgggaaaaagcaggactgtgcctccataatttggtcatttggcagcccctgttttctgctgtttacaacatcaccagtgccacgtcatgagcgtcaaagaaaatgcctagagatatttcaagctcatgtcattatgacatttcttaaaactttattaaaagaatgagtgaagtattgctgaaaagtggaaattcggttgggtaccatgctttttctccccttcacgtttgcagttgatgtgtctttttttttttttttaatgtatcttaaaggacataaaatttaaaaacttaaatattgtaatatgacagataacctaataattgtatctacattaaaatgacaaacatgatactgctgcttgtcaaataaaaaaaaaataaagaaatagaatgcc

SEQ ID NO: 6429 - protein, 712 aa, Homo sapiens
MSLKPRVVDFDETWNKLLTTIKAVVMLEYVERATWNDRFSDIYALCVAYPEPLGERLYTETKIFLENHVRHLHKRVLESEEQVLVMYHRYWEEYSKGADYMDCLYRYLNTQFIKKNKLTEADLQYGYGGVDMNEPLMEIGELALDMWRKLMVEPLQAILIRMLLREIKNDRGGEDPNQKVIHGVINSFVHVEQYKKKFPLKFYQEIFESPFLTETGEYYKQEASNLLQESNCSQYMEKVLGRLKDEEIRCRKYLHPSSYTKVIHECQQRMVADHLQFLHAECHNIIRQEKKNDMANMYVLLRAVSTGLPHMIQELQNHIHDEGLRATSNLTQENMPTLFVESVLEVHGKFVQLINTVLNGDQHFMSALDKALTSVVNYREPKSVCKAPELLAKYCDNLLKKSAKGMTENEVEDRLTSFITVFKYIDDKDVFQKFYARMLAKRLIHGLSMSMDSEEAMINKLKQACGYEFTSKLHRMYTDMSVSADLNNKFNNFIKNQDTVIDLGISFQIYVLQAGAWPLTQAPSSTFAIPQELEKSVQMFELFYSQHFSGRKLTWLHYLCTGEVKMNYLGKPYVAMVTTYQMAVLLAFNNSETVSYKELQDSTQMNEKELTKTIKSLLDVKMINHDSEKEDIDAESSFSLNMNFSSKRTKFKITTSMQKDTPQDALIQEVISQSRARFNPSISMIKKCIEVLIDKQYIERSQASADEYSYVA

SEQ ID NO: 6430 - DNA, 779 bp, Homo sapiens
ggggcagctaaggaaaagataagcactttaggtagagaaaatagtaagggtaaaggcaagtgtatgaatcaggctgatgtgttcagtgatctctaagcagagagaagttcctagattatgatgtcacagtagggagtaccaggaggagaggaagcttgggtgccatgttgcagttgagcccaaactgaatgctgtctgtagaaggaaacaacaaactttgtactttatgtacagagtaacatggtcaactttttggcttaggtaggttatttttgtgtctttgataagggcaagatctgagattctgatcttgaagtcaagaactttgttttgtccactgtatcctcagagcttggaatggtgcctggcaaggaatttcaacactacacttgcacaatgtctttgaaaccaagagtagtagattttgatgaaacatggaacaaacttttgacgacaataaaagccgtggtcatgttggaatacgtcgaaagagcaacatggaatgaccgtttctcagatatctatgctttatgtgtggcctatcctgaaccccttggagaaagactttatacagaaactaagatttttttggaaaatcatgttcggcatttgcataagagagttttggagtcagaagaacaagtacttgttatgtatcataggtactgggaagaatacagcaagggtgcagactatatggactgcttatatagtggactttatcttgactttcccaagaagagtctgggaagtagcaaacgagattatagaaattctga

SEQ ID NO: 6431 - protein, 139 aa, Homo sapiens
MVPGKEFQHYTCTMSLKPRVVDFDETWNKLLTTIKAVVMLEYVERATWNDRFSDIYALCVAYPEPLGERLYTETKIFLENHVRHLHKRVLESEEQVLVMYHRYWEEYSKGADYMDCLYSGLYLDFPKKSLGSSKRDYRN

SEQ ID NO: 6432 - DNA, 675 bp, Homo sapiens
ggggcagctaaggaaaagataagcactttaggtagagaaaatagtaagggtaaaggcaagtgtatgaatcaggctgatgtgttcagtgatctctaagcagagagaagttcctagattatgatgtcacagtagggagtaccaggaggagaggaagcttgggtgccatgttgcagttgagcccaaactgaatgctgtctgtagaaggaaacaacaaactttgtactttatgtacagagtaacatggtcaactttttggcttagatttcaacactacacttgcacaatgtctttgaaaccaagagtagtagattttgatgaaacatggaacaaacttttgacgacaataaaagccgtggtcatgttggaatacgtcgaaagagcaacatggaatgaccgtttctcattcattatctttaccttggagacacttggtggtggtcatcgtactgataagatggcatagctttatcatggaacagtctggagtataaccaccaggaggtcctgacctctgtgttgctctggtgtcattgttcctgtggacaaatgagctgttacctccaaaatgccttgtcacagtagttggaggcagcatatgaaacacctagttcccagaatcataatctaataccgtgtctggccccaaagttataaatgggctttgccttaagtctt

SEQ ID NO: 6433 - protein, 78 aa, Homo sapiens
MYRVTWSTFWLRFQHYTCTMSLKPRVVDFDETWNKLLTTIKAVVMLEYVERATWNDRFSFIIFTLETLGGGHRTDKMA

SEQ ID NO: 6434 - DNA, 617 bp, Homo sapiens
accgcgtcctcccgccccgtcctcccctcccccacgccgggacggcctcccgggggaggccccgaggaaaaaaatccaggctcgaactccgccccctgccggccgccagcaggagtgaagcgccacaatccaacaatgaaatggaaccggggaggggcggcgggaaggttatagtgccatcatgtggatactttgttttcttcaaataaaatgtaacctttttataacagagactagaaaacccagccatcccaacacccaggatagaggcactctccattcctgattgttccaaggctcaagtggtcagaaatgactgggaagaagggagaaaaactcaggtggcaaaggacatggacgaaaacccatggcgacatggaaagaaaaccctgtgatatagagaggaaaagcacaggacagcttattggggagaatggaactcttctgtatcctgattgcggtgatggccacgcatggctgtaacactacacttgcacaatgtctttgaaaccaagagtagtagattttgatgaaacatggaacaaacttttgacgacaataaaagccgtggtcatgttggaatacgtcgaaagagcaacatggaatgaccgtttctc

SEQ ID NO: 6435 - protein, 34 aa, Homo sapiens
MWILCFLQIKCNLFITETRKPSHPNTQDRGTLHS

SEQ ID NO: 6436 - DNA, 510 bp, Homo sapiens
ctgccgaccccggaccaaaagtagcgctgcagccgaccgaaccgcgtcctcccgccccgtcctcccctcccccacgccgggacggcctcccgggggaggccccgaggaaaaaaatccaggctcgaactccgccccctgccggccgccagcaggagtgaagcgccacaatccaacaatgaaatggaaccggggaggggcggcgggaaggttatagtgccatcatgtggatactttgttttcttcaaataaaatgtaacctttttataacagagactagaaaacccagccatcccaacacccaggctgtgcaaagaaattggggccaaacgtttttttgccatgttctgaaaagaggcactctccattcctgattgttccaaggctcaagtggtcagaaatgactgggaagaagggagaaaaactcaggtggcaaaggacatggacgaaaacccatggcgacatggaaagaaaaccctgtgatatagagaggaaaagcacaggacagcttat

SEQ ID NO: 6437 - protein, 49 aa, Homo sapiens
MWILCFLQIKCNLFITETRKPSHPNTQAVQRNWGQTFFCHVLKRGTLHS

SEQ ID NO: 6438 - DNA, 788 bp, Homo sapiens
atccaatgacttgtcagccagagtaacggctgttgtcaggtcttcagggtctcgaggtcggtttcttcctaacgccgccaaccccaagctaaggtagacatgatcgccaaggcagctgattgtcccaaggaataagtatgagcaatgagcacagagggaaaatcatgaaacatctgaggaccatgagaactgctaaaacaatacgtagaactagctataccagagaaagtcaagtgaatggatcagacaataagaattgaaaataagcttaatagagcttcagagaaagaagggagaatgttggaaacacaaagcacaaacaagcatttgtgaattggatgttgacaaatattaatgaaataactcaatggatgggttgaatatagctggacagttcactcatgaaccggaagattagagcaaggaaggaactaagaaatggaaagcatgaaaggagagttaagaaatgtggaaggtagaagcataaatatttttctaatggaaattccagaaggggaaaaaaagaacatgtgaaagaattattgctgagaatttcccagaattgaagacatactttagaatgaaaaaggccaactctaactttgggatttctagcttcagagaaatgaaaatttagaatgaccaaggggagtgcacaggattttttgggcagtgaaactattctgcatgatactataatggtggatgcatgctattacacatttgtcaaaacccattgaatgtacatcactgagaatgaagcctaatgtatgcactttggatgatta

SEQ ID NO: 6439 - protein, 40 aa, Homo sapiens
MSNEHRGKIMKHLRTMRTAKTIRRTSYTRESQVNGSDNKN

SEQ ID NO: 6440 - DNA, 596 bp, Homo sapiens
atttcattgttggattgtggcgcttcactcctgctggcggccggcagggggcggagttcgagcctggatttttttcctcggggcctcccccgggaggccgtcccggcgtgggggaggggaggacggggcgggaggacgcggttcggtcggctgcagcgctacttttggtccggggtcggcagggaggccgcggctaccgcatcacagctgacgtgaggactacgtggggccgctgccggctccgggttgctgggcggcggcgccgctgctgagcggcggtcgggctcgccgtctccacctcctcgcgtccgtaatcagtgacgaggtccgctacgtaaatccctttgcggcggacaaatgaccatggaaacagttgaatcccagcatgatggaagtataacagcttctttgacagagagcaagtctgctcatgtgcagactcagactggccaaaattcaatccctgctttagctcagagcttctgctaatcaagaatatactatgaaaatcatcagagacctagcaactgttgagcttggttttggctgtcaggcccctgttctgctgatggattgaggtgaggtgcaggtacacc

SEQ ID NO: 6441 - protein, 43 aa, Homo sapiens
MTMETVESQHDGSITASLTESKSAHVQTQTGQNSIPALAQSFC

SEQ ID NO: 6442 - DNA, 731 bp, Homo sapiens
gtggcgcttcactcctgctggcggccggcagggggcggagttcgagcctggatttttttcctcggggcctcccccgggaggccgtcccggcgtgggggaggggaggacggggcgggaggacgcggttcggtcggctgcagcgctacttttggtccggggtcggcagggaggccgcggctaccgcatcacagctgacgtgaggactacgtggggccgctgccggctccgggttgctgggcggcggcgccgctgctgagcggcggtcgggctcgccgtctccacctcctcgcgtccgtaatcagtgacgaggtccgctacgtaaatccctttgcggcgggataaataaagaaaacaggaaaggaggaaagcattgattacaaatatcttaacaatgagcaaatgtgcaaggaaaaaatatattaagacaaatccaagacaaatgaccatggaaacagttgaatcccagcatgatggaagtataacagcttctttgacagagagcaagtctgctcatgtgcagactcagactggccaaaattcaatccctgctttagctcaggtaggcaataggcaggcaccgttgaaagtcaaaatatatggaaatgagaattaggtgcagattctgttttcttgccattgatcttaaattttccatgttccctggttatcagccattcttgcttatttgattgtgaagaaaagatacgtgttgtaattagccttgcatttta

SEQ ID NO: 6443 - protein, 73 aa, Homo sapiens
MSKCARKKYIKTNPRQMTMETVESQHDGSITASLTESKSAHVQTQTGQNSIPALAQVGNRQAPLKVKIYGNEN

SEQ ID NO: 6444 - DNA, 966 bp, Homo sapiens
gtggcgcttcactcctgctggcggccggcagggggcggagttcgagcctggatttttttcctcggggcctcccccgggaggccgtcccggcgtgggggaggggaggacggggcgggaggacgcggttcggtcggctgcagcgctacttttggtccggggtcggcagggaggccgcggctaccgcatcacagctgacgtgaggactacgtggggccgctgccggctccgggttgctgggcggcggcgccgctgctgagcggcggtcgggctcgccgtctccacctcctcgcgtccgtaatcagtgacgaggtccgctacgtaaatccctttgcggcggacaaatgaccatggaaacagttgaatcccagcatgatggaagtataacagcttctttgacagagagcaagtctgctcatgtgcagactcagactggccaaaattcaatccctgctttagctcagtgcacaatgtgtaaggagtccctcggaataaagcagccctggcatgccatcggggattgaagtaggaacgatttaacaagggatacttggaaatgttgtcatgtgcgagttgtaaattttcttttttaatctggtggaaaattggaatggcatttctctgttttgcccagctatgccaaaaatcttcttggtcccacataggcctaggaaggatgtagatggcaatcacaaaacaaacaaaaaatgagcaaacaaatagaagacctcaagcaacattttctcttgttaataggttagcaacctcatatttgtatattaaagagatctgcattatgttaggttgatttcatataatttcagctaagtagatctagtttaaggtcagtgttttattgaatcttgtattttagcttcagtatattaatttccttagctgagggactcctactgaaggagaaaagtgttcctgttaaaattttgaaataaaagtttctgttttactgta

SEQ ID NO: 6445 - protein, 59 aa, Homo sapiens
MTMETVESQHDGSITASLTESKSAHVQTQTGQNSIPALAQCTMCKESLGIKQPWHAIGD

SEQ ID NO: 6446 - DNA, 1149 bp, Homo sapiens
gtggcgcttcactcctgctggcggccggcagggggcggagttcgagcctggatttttttcctcggggcctcccccgggaggccgtcccggcgtgggggaggggaggacggggcgggaggacgcggttcggtcggctgcagcgctacttttggtccggggtcggcagggaggccgcggctaccgcatcacagctgacgtgaggactacgtggggccgctgccggctccgggttgctgggcggcggcgccgctgctgagcggcggtcgggctcgccgtctccacctcctcgcgtccgtaatcagtgacgaggtccgctacgtaaatccctttgcggcgggtagcagcaattgcagagacagatgaatctgcagaatcagaaggtgtaattgattctcataaacgtagagaaatcctttcacgaagaccctcttataggaaaatactgaatgaactgtcctctgatgtgcctggtgttcccaagattgaagaagagagatcagaggaagaaggaacaccacctagtattgctaccatggcagtaccaactagcatatatcagactagcacggggcaatacagtatgtatgctgcaattcgatatgatacagtgctagctttaagtcttctctagttatattgaagcaactcaggttttggcattaaattgttccattttaaaatgcatcattaatacctaaactgtatcatagaatgaaagtatatgttaaaaagtgagatctttgtattgacagctgtcatataattttgaaaagtaaaaattttgactgccgaatatagaagaaaattttggggtaaaaaggagaatttttcctatttacatgtttatattaatctctagtaaaacattgtttttgttgtctttatgatgcatgcgaacataaatgtctgtatttcattcttgttggcttttgttacccacaattacatactattcttactaatctgagagttttctaaagtatgttttcaatgtttcactactctctactctgttaatttgtgctacagtttttcctaaaagagaatggaaaaatgatttaattttttaaactgtagcaattggatagataattttatttgaaattttacacactgaaagctctaaataaacagatacattcacattca

SEQ ID NO: 6447 - protein, 55 aa, Homo sapiens
MNCPLMCLVFPRLKKRDQRKKEHHLVLLPWQYQLAYIRLARGNTVCMLQFDMIQC

SEQ ID NO: 6448 - DNA, 1273 bp, Homo sapiens
gtggcgcttcactcctgctggcggccggcagggggcggagttcgagcctggatttttttcctcggggcctcccccgggaggccgtcccggcgtgggggaggggaggacggggcgggaggacgcggttcggtcggctgcagcgctacttttggtccggggtcggcagggaggccgcggctaccgcatcacagctgacgtgaggactacgtggggccgctgccggctccgggttgctgggcggcggcgccgctgctgagcggcggtcgggctcgccgtctccacctcctcgcgtccgtaatcagtgacgaggtccgctacgtaaatccctttgcggcggacaaatgaccatggaaacagttgaatcccagcatgatggaagtataacagcttctttgacagagagcaagtctgctcatgtgcagactcagactggccaaaattcaatccctgctttagctcaggtagcagcaattgcagagacagatgaatctgcagaatcagaaggtgtaattgattctcataaacgtagagaaatcctttcacgaagaccctcttataggaaaatactgaatgaactgtcctctgatgtgcctggtgttcccaagattgaagaagagagatcagaggaagaaggaacaccacctagtattgctaccatggcagtaccaactagcatatatcagactagcacggggcaatacagtatgtatgctgcaattcgatatgatacagtgctagctttaagtcttctctagttatattgaagcaactcaggttttggcattaaattgttccattttaaaatgcatcattaatacctaaactgtatcatagaatgaaagtatatgttaaaaagtgagatctttgtattgacagctgtcatataattttgaaaagtaaaaattttgactgccgaatatagaagaaaattttggggtaaaaaggagaatttttcctatttacatgtttatattaatctctagtaaaacattgtttttgttgtctttatgatgcatgcgaacataaatgtctgtatttcattcttgttggcttttgttacccacaattacatactattcttactaatctgagagttttctaaagtatgttttcaatgtttcactactctctactctgttaatttgtgctacagtttttcctaaaagagaatggaaaaatgatttaattttttaaactgtagcaattggatagataattttatttgaaattttacacactgaaagctctaaataaacagatacattcacattca

SEQ ID NO: 6449 - protein, 137 aa, Homo sapiens; identical to SEQ ID NO: 664

SEQ ID NO: 6450 - DNA, 799 bp, Homo sapiens
gtggcgcttcactcctgctggcggccggcagggggcggagttcgagcctggatttttttcctcggggcctcccccgggaggccgtcccggcgtgggggaggggaggacggggcgggaggacgcggttcggtcggctgcagcgctacttttggtccggggtcggcagggaggccgcggctaccgcatcacagctgacgtgaggactacgtggggccgctgccggctccgggttgctgggcggcggcgccgctgctgagcggcggtcgggctcgccgtctccacctcctcgcgtccgtaatcagtgacgaggtccgctacgtaaatccctttgcggcggacaaatgaccatggaaacagttgaatcccagcatgatggaagtataacagcttctttgacagagagcaagtctgctcatgtgcagactcagactggccaaaattcaatccctgctttagctcaggtagcagcaattgcagagacagatgaatctgcagaatcagaaggtgtaattgattctcataaacgtagagaaatcctttcacgaagaccctcttataggaaaatactgaatgaactgtcctctgatgtgcctggtgttcccaagattgaagaagagagatcagaggaagaaggaacaccacctagtattgctaccatggcagtaccaactagcatatatcagactagcacggggcaatacattgctatagcccaaggtggaacaatccagatttctaacccaggatctgatggtgttcagggactgcaggcattaacaatgacaaattcaggagctcc

SEQ ID NO: 6451 - protein, 151 aa, Homo sapiens
MTMETVESQHDGSITASLTESKSAHVQTQTGQNSIPALAQVAAIAETDESAESEGVIDSHKRREILSRRPSYRKILNELSSDVPGVPKIEEERSEEEGTPPSIATMAVPTSIYQTSTGQYIAIAQGGTIQISNPGSDGVQGLQALTMTNSG

SEQ ID NO: 6452 - DNA, 1356 bp, Homo sapiens
gtggcgcttcactcctgctggcggccggcagggggcggagttcgagcctggatttttttcctcggggcctcccccgggaggccgtcccggcgtgggggaggggaggacggggcgggaggacgcggttcggtcggctgcagcgctacttttggtccggggtcggcagggaggccgcggctaccgcatcacagctgacgtgaggactacgtggggccgctgccggctccgggttgctgggcggcggcgccgctgctgagcggcggtcgggctcgccgtctccacctcctcgcgtccgtaatcagtgacgaggtccgctacgtaaatccctttgcggcgggtagcagcaattgcagagacagatgaatctgcagaatcagaaggtgtaattgattctcataaacgtagagaaatcctttcacgaagaccctcttataggaaaatactgaatgaactgtcctctgatgtgcctggtgttcccaagattgaagaagagagatcagaggaagaaggaacaccacctagtattgctaccatggcagtaccaactagcatatatcagactagcacggggcaatacactgccactggtgacatgccaacttaccagatccgagctcctactgctgctttgccacagggagtggtgatggctgcatcgcccggaagtttgcacagtccccagcagctggcagaagaagcaacacgcaaacgagagctgaggctaatgaaaaacagggaagctgcccgggagtgtcgcaggaagaagaaagaatatgtcaaatgtcttgaaaatcgtgtggctgtgcttgaaaaccaaaacaagactctcattgaggaactcaaggccctcaaagatctttattgccataaagtagagtaactgtctttgacttggaccttgtttactctaatcaaggcaggagatgcagcagtcctacttattgccatgtggacttgtgggaaggacacgtgtgacccttaagaatccagtttggattagtgtttgaaattgaattgggaatgttgttccaggatgtggaatgcagccgtgatcacacttaccgagcttactttgatctgtttgtcaatagcatgcaaaaaatgctttgtttgccctttgcttctgctttttttcagggaagctgccaaagaatgtcgacgtcgaaagaaagaatatgtaaaatgtctggagagccgagttgcagtgctggaagtccagaacaagaagcttatagaggaacttgaaaccttgaaagacatttgttctcccaaaacagattactagaaatatttaactatgaactgaaggcagcatgtatagttgcttttgaaggaatacaatatatagctggcaag

SEQ ID NO: 6453 - protein, 115 aa, Homo sapiens
MAVPTSIYQTSTGQYTATGDMPTYQIRAPTAALPQGVVMAASPGSLHSPQQLAEEATRKRELRLMKNREAARECRRKKKEYVKCLENRVAVLENQNKTLIEELKALKDLYCHKVE

SEQ ID NO: 6454 - DNA, 1115 bp, Homo sapiens
gtggcgcttcactcctgctggcggccggcagggggcggagttcgagcctggatttttttcctcggggcctcccccgggaggccgtcccggcgtgggggaggggaggacggggcgggaggacgcggttcggtcggctgcagcgctacttttggtccggggtcggcagggaggccgcggctaccgcatcacagctgacgtgaggactacgtggggccgctgccggctccgggttgctgggcggcggcgccgctgctgagcggcggtcgggctcgccgtctccacctcctcgcgtccgtaatcagtgacgaggtccgctacgtaaatccctttgcggcggctgccactggtgacatgccaacttaccagatccgagctcctactgctgctttgccacagggagtggtgatggctgcatcgcccggaagtttgcacagtccccagcagctggcagaagaagcaacacgcaaacgagagctgaggctaatgaaaaacagggaagctgcccgggagtgtcgcaggaagaagaaagaatatgtcaaatgtcttgaaaatcgtgtggctgtgcttgaaaaccaaaacaagactctcattgaggaactcaaggccctcaaagatctttattgccataaagtagagtaactgtctttgacttggaccttgtttactctaatcaaggcaggagatgcagcagtcctacttattgccatgtggacttgtgggaaggacacgtgtgacccttaagaatccagtttggattagtgtttgaaattgaattgggaatgttgttccaggatgtggaatgcagccgtgatcacacttaccgagcttactttgatctgtttgtcaatagcatgcaaaaaatgctttgtttgccctttgcttctgctttttttcagggaagctgccaaagaatgtcgacgtcgaaagaaagaatatgtaaaatgtctggagagccgagttgcagtgctggaagtccagaacaagaagcttatagaggaacttgaaaccttgaaagacatttgttctcccaaaacagattactagaaatatttaactatgaactgaaggcagcatgtatagttgcttttgaaggaatacaatatatagctggcaag

SEQ ID NO: 6455 - protein, 95 aa, Homo sapiens; identical to SEQ ID NO: 678

SEQ ID NO: 6456 - DNA, 954 bp, Homo sapiens
gtggcgcttcactcctgctggcggccggcagggggcggagttcgagcctggatttttttcctcggggcctcccccgggaggccgtcccggcgtgggggaggggaggacggggcgggaggacgcggttcggtcggctgcagcgctacttttggtccggggtcggcagggaggccgcggctaccgcatcacagctgacgtgaggactacgtggggccgctgccggctccgggttgctgggcggcggcgccgctgctgagcggcggtcgggctcgccgtctccacctcctcgcgtccgtaatcagtgacgaggtccgctacgtaaatccctttgcggcgggtagcagcaattgcagagacagatgaatctgcagaatcagaaggtgtaattgattctcataaacgtagagaaatcctttcacgaagaccctcttataggaaaatactgaatgaactgtcctctgatgtgcctggtgttcccaagattgaagaagagagatcagaggaagaaggaacaccacctagtattgctaccatggcagtaccaactagcatatatcagactagcacggggcaatacactgccactggtgacatgccaacttaccagatccgagctcctactgctgctttgccacagggagtggtgatggctgcatcgcccggaagtttgcacagtccccagcagctggcagaagaagcaacacgcaaacgagagctgaggctaatgaaaaacagggaagctgccaaagaatgtcgacgtcgaaagaaagaatatgtaaaatgtctggagagccgagttgcagtgctggaagtccagaacaagaagcttatagaggaacttgaaaccttgaaagacatttgttctcccaaaacagattactagaaatatttaactatgaactgaaggcagcatgtatagttgcttttgaaggaatacaatatatagctggcaag

SEQ ID NO: 6457 - protein, 116 aa, Homo sapiens
MAVPTSIYQTSTGQYTATGDMPTYQIRAPTAALPQGVVMAASPGSLHSPQQLAEEATRKRELRLMKNREAAKECRRRKKEYVKCLESRVAVLEVQNKKLIEELETLKDICSPKTDY

SEQ ID NO: 6458 - DNA, 1239 bp, Homo sapiens
gtggcgcttcactcctgctggcggccggcagggggcggagttcgagcctggatttttttcctcggggcctcccccgggaggccgtcccggcgtgggggaggggaggacggggcgggaggacgcggttcggtcggctgcagcgctacttttggtccggggtcggcagggaggccgcggctaccgcatcacagctgacgtgaggactacgtggggccgctgccggctccgggttgctgggcggcggcgccgctgctgagcggcggtcgggctcgccgtctccacctcctcgcgtccgtaatcagtgacgaggtccgctacgtaaatccctttgcggcggacaaatgaccatggaaacagttgaatcccagcatgatggaagtataacagcttctttgacagagagcaagtctgctcatgtgcagactcagactggccaaaattcaatccctgctttagctcagctgccactggtgacatgccaacttaccagatccgagctcctactgctgctttgccacagggagtggtgatggctgcatcgcccggaagtttgcacagtccccagcagctggcagaagaagcaacacgcaaacgagagctgaggctaatgaaaaacagggaagctgcccgggagtgtcgcaggaagaagaaagaatatgtcaaatgtcttgaaaatcgtgtggctgtgcttgaaaaccaaaacaagactctcattgaggaactcaaggccctcaaagatctttattgccataaagtagagtaactgtctttgacttggaccttgtttactctaatcaaggcaggagatgcagcagtcctacttattgccatgtggacttgtgggaaggacacgtgtgacccttaagaatccagtttggattagtgtttgaaattgaattgggaatgttgttccaggatgtggaatgcagccgtgatcacacttaccgagcttactttgatctgtttgtcaatagcatgcaaaaaatgctttgtttgccctttgcttctgctttttttcagggaagctgccaaagaatgtcgacgtcgaaagaaagaatatgtaaaatgtctggagagccgagttgcagtgctggaagtccagaacaagaagcttatagaggaacttgaaaccttgaaagacatttgttctcccaaaacagattactagaaatatttaactatgaactgaaggcagcatgtatagttgcttttgaaggaatacaatatatagctggcaag

SEQ ID NO: 6459 - protein, 95 aa, Homo sapiens; identical to SEQ ID NO: 678

SEQ ID NO: 6460 - DNA, 776 bp, Homo sapiens
gtggcgcttcactcctgctggcggccggcagggggcggagttcgagcctggatttttttcctcggggcctcccccgggaggccgtcccggcgtgggggaggggaggacggggcgggaggacgcggttcggtcggctgcagcgctacttttggtccggggtcggcagggaggccgcggctaccgcatcacagctgacgtgaggactacgtggggccgctgccggctccgggttgctgggcggcggcgccgctgctgagcggcggtcgggctcgccgtctccacctcctcgcgtccgtaatcagtgacgagggaagctgccaaagaatgtcgacgtcgaaagaaagaatatgtaaaatgtctggagagccgagttgcagtgctggaagtccagaacaagaagcttatagaggaacttgaaaccttgaaagacatttgttctcccaaaacagattactagaaatatttaactatgaactgaaggcagcatgtatagttgcttttgaaggaatacaatatatagctggcaagaatggtggcttcttttctttgtatcattcatcttcttctttaatcacttaacattcctaaaatgcttcactgtacgtagttaagtcgtagctataacttcaaattttttaaaagagacaaactgtaaaaaatgtgtgtattcttaaaatgcaatatttgtaaggcttgttccaatgccacatacttgcagctcccattctatgtgtcatcaatagtgtcctatgcaataaaattatttgcaggtcttt

SEQ ID NO: 6461 - protein, 38 aa, Homo sapiens
MCVFLKCNICKACSNATYLQLPFYVSSIVSYAIKLFAG

SEQ ID NO: 6462 - DNA, 1604 bp, Homo sapiens
gtggcgcttcactcctgctggcggccggcagggggcggagttcgagcctggatttttttcctcggggcctcccccgggaggccgtcccggcgtgggggaggggaggacggggcgggaggacgcggttcggtcggctgcagcgctacttttggtccggggtcggcagggaggccgcggctaccgcatcacagctgacgtgaggactacgtggggccgctgccggctccgggttgctgggcggcggcgccgctgctgagcggcggtcgggctcgccgtctccacctcctcgcgtccgtaatcagtgacgaggtccgctacgtaaatccctttgcggcgggtagcagcaattgcagagacagatgaatctgcagaatcagaaggtgtaattgattctcataaacgtagagaaatcctttcacgaagaccctcttataggaaaatactgaatgaactgtcctctgatgtgcctggtgttcccaagattgaagaagagagatcagaggaagaaggaacaccacctagtattgctaccatggcagtaccaactagcatatatcagactagcacggggcaatacactgccactggtgacatgccaacttaccagatccgagctcctactgctgctttgccacagggagtggtgatggctgcatcgcccggaagtttgcacagtccccagcagctggcagaagaagcaacacgcaaacgagagctgaggctaatgaaaaacagggaagctgcccgggagtgtcgcaggaagaagaaagaatatgtcaaatgtcttgaaaatcgtgtggctgtgcttgaaaaccaaaacaagactctcattgaggaactcaaggccctcaaagatctttattgccataaagtagagtaactgtctttgacttggaccttgtttactctaatcaaggcaggagatgcagcagtcctacttattgccatgtggacttgtgggaaggacacgtgtgacccttaagaatccagtttggattagtgtttgaaattgaattgggaatgttgttccaggatgtggaatgcagccgtgatcacacttaccgagcttactttgatctgtttgtcaatagcatgcaaaaaatgctttgtttgccctttgcttctgctttttttcagggaagctgccaaagaatgtcgacgtcgaaagaaagaatatgtaaaatgtctggagagccgagttgcagtgctggaagtccagaacaagaagcttatagaggaacttgaaaccttgaaagacatttgttctcccaaaacagattactagaaatatttaactatgaactgaaggcagcatgtatagttgcttttgaaggaatacaatatatagctggcaagaatggtggcttcttttctttgtatcattcatcttcttctttaatcacttaacattcctaaaatgcttcactgtacgtagttaagtcgtagctataacttcaaattttttaaaagagacaaactgtaaaaaatgtgtgtattcttaaaatgcaatatttgtaaggcttgttccaatgccacatacttgcagctcccattctatgtgtcatcaatagtgtcctatgcaataaaattatttgcaggtcttt

SEQ ID NO: 6463 - protein, 115 aa, Homo sapiens; identical to SEQ ID NO: 6453

SEQ ID NO: 6464 - DNA, 1202 bp, Homo sapiens
gtggcgcttcactcctgctggcggccggcagggggcggagttcgagcctggatttttttcctcggggcctcccccgggaggccgtcccggcgtgggggaggggaggacggggcgggaggacgcggttcggtcggctgcagcgctacttttggtccggggtcggcagggaggccgcggctaccgcatcacagctgacgtgaggactacgtggggccgctgccggctccgggttgctgggcggcggcgccgctgctgagcggcggtcgggctcgccgtctccacctcctcgcgtccgtaatcagtgacgaggtccgctacgtaaatccctttgcggcgggtagcagcaattgcagagacagatgaatctgcagaatcagaaggtgtaattgattctcataaacgtagagaaatcctttcacgaagaccctcttataggaaaatactgaatgaactgtcctctgatgtgcctggtgttcccaagattgaagaagagagatcagaggaagaaggaacaccacctagtattgctaccatggcagtaccaactagcatatatcagactagcacggggcaatacactgccactggtgacatgccaacttaccagatccgagctcctactgctgctttgccacagggagtggtgatggctgcatcgcccggaagtttgcacagtccccagcagctggcagaagaagcaacacgcaaacgagagctgaggctaatgaaaaacagggaagctgccaaagaatgtcgacgtcgaaagaaagaatatgtaaaatgtctggagagccgagttgcagtgctggaagtccagaacaagaagcttatagaggaacttgaaaccttgaaagacatttgttctcccaaaacagattactagaaatatttaactatgaactgaaggcagcatgtatagttgcttttgaaggaatacaatatatagctggcaagaatggtggcttcttttctttgtatcattcatcttcttctttaatcacttaacattcctaaaatgcttcactgtacgtagttaagtcgtagctataacttcaaattttttaaaagagacaaactgtaaaaaatgtgtgtattcttaaaatgcaatatttgtaaggcttgttccaatgccacatacttgcagctcccattctatgtgtcatcaatagtgtcctatgcaataaaattatttgcaggtcttt

SEQ ID NO: 6465 - protein, 116 aa, Homo sapiens; identical to SEQ ID NO: 6457

SEQ ID NO: 6466 - DNA, 1363 bp, Homo sapiens
gtggcgcttcactcctgctggcggccggcagggggcggagttcgagcctggatttttttcctcggggcctcccccgggaggccgtcccggcgtgggggaggggaggacggggcgggaggacgcggttcggtcggctgcagcgctacttttggtccggggtcggcagggaggccgcggctaccgcatcacagctgacgtgaggactacgtggggccgctgccggctccgggttgctgggcggcggcgccgctgctgagcggcggtcgggctcgccgtctccacctcctcgcgtccgtaatcagtgacgaggtccgctacgtaaatccctttgcggcggctgccactggtgacatgccaacttaccagatccgagctcctactgctgctttgccacagggagtggtgatggctgcatcgcccggaagtttgcacagtccccagcagctggcagaagaagcaacacgcaaacgagagctgaggctaatgaaaaacagggaagctgcccgggagtgtcgcaggaagaagaaagaatatgtcaaatgtcttgaaaatcgtgtggctgtgcttgaaaaccaaaacaagactctcattgaggaactcaaggccctcaaagatctttattgccataaagtagagtaactgtctttgacttggaccttgtttactctaatcaaggcaggagatgcagcagtcctacttattgccatgtggacttgtgggaaggacacgtgtgacccttaagaatccagtttggattagtgtttgaaattgaattgggaatgttgttccaggatgtggaatgcagccgtgatcacacttaccgagcttactttgatctgtttgtcaatagcatgcaaaaaatgctttgtttgccctttgcttctgctttttttcagggaagctgccaaagaatgtcgacgtcgaaagaaagaatatgtaaaatgtctggagagccgagttgcagtgctggaagtccagaacaagaagcttatagaggaacttgaaaccttgaaagacatttgttctcccaaaacagattactagaaatatttaactatgaactgaaggcagcatgtatagttgcttttgaaggaatacaatatatagctggcaagaatggtggcttcttttctttgtatcattcatcttcttctttaatcacttaacattcctaaaatgcttcactgtacgtagttaagtcgtagctataacttcaaattttttaaaagagacaaactgtaaaaaatgtgtgtattcttaaaatgcaatatttgtaaggcttgttccaatgccacatacttgcagctcccattctatgtgtcatcaatagtgtcctatgcaataaaattatttgcaggtcttt

SEQ ID NO: 6467 - protein, 95 aa, Homo sapiens; identical to SEQ ID NO: 678

SEQ ID NO: 6468 - DNA, 961 bp, Homo sapiens
gtggcgcttcactcctgctggcggccggcagggggcggagttcgagcctggatttttttcctcggggcctcccccgggaggccgtcccggcgtgggggaggggaggacggggcgggaggacgcggttcggtcggctgcagcgctacttttggtccggggtcggcagggaggccgcggctaccgcatcacagctgacgtgaggactacgtggggccgctgccggctccgggttgctgggcggcggcgccgctgctgagcggcggtcgggctcgccgtctccacctcctcgcgtccgtaatcagtgacgaggtccgctacgtaaatccctttgcggcggctgccactggtgacatgccaacttaccagatccgagctcctactgctgctttgccacagggagtggtgatggctgcatcgcccggaagtttgcacagtccccagcagctggcagaagaagcaacacgcaaacgagagctgaggctaatgaaaaacagggaagctgccaaagaatgtcgacgtcgaaagaaagaatatgtaaaatgtctggagagccgagttgcagtgctggaagtccagaacaagaagcttatagaggaacttgaaaccttgaaagacatttgttctcccaaaacagattactagaaatatttaactatgaactgaaggcagcatgtatagttgcttttgaaggaatacaatatatagctggcaagaatggtggcttcttttctttgtatcattcatcttcttctttaatcacttaacattcctaaaatgcttcactgtacgtagttaagtcgtagctataacttcaaattttttaaaagagacaaactgtaaaaaatgtgtgtattcttaaaatgcaatatttgtaaggcttgttccaatgccacatacttgcagctcccattctatgtgtcatcaatagtgtcctatgcaataaaattatttgcaggtcttt

SEQ ID NO: 6469 - protein, 96 aa, Homo sapiens; identical to SEQ ID NO: 684

SEQ ID NO: 6470 - DNA, 1487 bp, Homo sapiens
gtggcgcttcactcctgctggcggccggcagggggcggagttcgagcctggatttttttcctcggggcctcccccgggaggccgtcccggcgtgggggaggggaggacggggcgggaggacgcggttcggtcggctgcagcgctacttttggtccggggtcggcagggaggccgcggctaccgcatcacagctgacgtgaggactacgtggggccgctgccggctccgggttgctgggcggcggcgccgctgctgagcggcggtcgggctcgccgtctccacctcctcgcgtccgtaatcagtgacgaggtccgctacgtaaatccctttgcggcggacaaatgaccatggaaacagttgaatcccagcatgatggaagtataacagcttctttgacagagagcaagtctgctcatgtgcagactcagactggccaaaattcaatccctgctttagctcagctgccactggtgacatgccaacttaccagatccgagctcctactgctgctttgccacagggagtggtgatggctgcatcgcccggaagtttgcacagtccccagcagctggcagaagaagcaacacgcaaacgagagctgaggctaatgaaaaacagggaagctgcccgggagtgtcgcaggaagaagaaagaatatgtcaaatgtcttgaaaatcgtgtggctgtgcttgaaaaccaaaacaagactctcattgaggaactcaaggccctcaaagatctttattgccataaagtagagtaactgtctttgacttggaccttgtttactctaatcaaggcaggagatgcagcagtcctacttattgccatgtggacttgtgggaaggacacgtgtgacccttaagaatccagtttggattagtgtttgaaattgaattgggaatgttgttccaggatgtggaatgcagccgtgatcacacttaccgagcttactttgatctgtttgtcaatagcatgcaaaaaatgctttgtttgccctttgcttctgctttttttcagggaagctgccaaagaatgtcgacgtcgaaagaaagaatatgtaaaatgtctggagagccgagttgcagtgctggaagtccagaacaagaagcttatagaggaacttgaaaccttgaaagacatttgttctcccaaaacagattactagaaatatttaactatgaactgaaggcagcatgtatagttgcttttgaaggaatacaatatatagctggcaagaatggtggcttcttttctttgtatcattcatcttcttctttaatcacttaacattcctaaaatgcttcactgtacgtagttaagtcgtagctataacttcaaattttttaaaagagacaaactgtaaaaaatgtgtgtattcttaaaatgcaatatttgtaaggcttgttccaatgccacatacttgcagctcccattctatgtgtcatcaatagtgtcctatgcaataaaattatttgcaggtcttt

SEQ ID NO: 6471 - protein, 95 aa, Homo sapiens; identical to SEQ ID NO: 678

SEQ ID NO: 6472 - DNA, 1121 bp, Homo sapiens
gtggcgcttcactcctgctggcggccggcagggggcggagttcgagcctggatttttttcctcggggcctcccccgggaggccgtcccggcgtgggggaggggaggacggggcgggaggacgcggttcggtcggctgcagcgctacttttggtccggggtcggcagggaggccgcggctaccgcatcacagctgacgtgaggactacgtggggccgctgccggctccgggttgctgggcggcggcgccgctgctgagcggcggtcgggctcgccgtctccacctcctcgcgtccgtaatcagtgacgagggaagctgccaaagaatgtcgacgtcgaaagaaagaatatgtaaaatgtctggagagccgagttgcagtgctggaagtccagaacaagaagcttatagaggaacttgaaaccttgaaagacatttgttctcccaaaacagattactagaaatatttaactatgaactgaaggcagcatgtatagttgcttttgaaggaatacaatatatagctggcaagaatggtggcttcttttctttgtatcattcatcttcttctttaatcacttaacattcctaaaatgcttcactgtacgtagttaagtcgtagctataacttcaaattttttaaaagagacaaactgtaaaaaatgtgtgtattcttaaaatgcaatatttgtaaggcttgttccaatgccacatacttgcagctcccattctatgtgtcatcaatagtgtcctatgcaataaaattatttgcaggtctttaaatcattttaggaaaggatgatcaaaaataatgcatccagcagtacaataaaagtaaaccacaaaaaaatacctcaggaaagaatagaaagaaagtctatctaatgacatgcctatatgagaagaatagcctagatatgaatatatggcatttgcagatttttatattagttgctttgttaaaaaaaaaaagattgtattgctgtccttgaatgccatagtcaaagagagtttttaatagaaccatgttggttgcactttgtagtgtttggtgctcatttaaatatctgaacatttactacagtttttaactctactgtgtaatataaaagatcttgcagaagt

SEQ ID NO: 6473 - protein, 39 aa, Homo sapiens
MCVFLKCNICKACSNATYLQLPFYVSSIVSYAIKLFAGL

SEQ ID NO: 6474 - DNA, 1832 bp, Homo sapiens
gtggcgcttcactcctgctggcggccggcagggggcggagttcgagcctggatttttttcctcggggcctcccccgggaggccgtcccggcgtgggggaggggaggacggggcgggaggacgcggttcggtcggctgcagcgctacttttggtccggggtcggcagggaggccgcggctaccgcatcacagctgacgtgaggactacgtggggccgctgccggctccgggttgctgggcggcggcgccgctgctgagcggcggtcgggctcgccgtctccacctcctcgcgtccgtaatcagtgacgaggtccgctacgtaaatccctttgcggcggacaaatgaccatggaaacagttgaatcccagcatgatggaagtataacagcttctttgacagagagcaagtctgctcatgtgcagactcagactggccaaaattcaatccctgctttagctcagctgccactggtgacatgccaacttaccagatccgagctcctactgctgctttgccacagggagtggtgatggctgcatcgcccggaagtttgcacagtccccagcagctggcagaagaagcaacacgcaaacgagagctgaggctaatgaaaaacagggaagctgcccgggagtgtcgcaggaagaagaaagaatatgtcaaatgtcttgaaaatcgtgtggctgtgcttgaaaaccaaaacaagactctcattgaggaactcaaggccctcaaagatctttattgccataaagtagagtaactgtctttgacttggaccttgtttactctaatcaaggcaggagatgcagcagtcctacttattgccatgtggacttgtgggaaggacacgtgtgacccttaagaatccagtttggattagtgtttgaaattgaattgggaatgttgttccaggatgtggaatgcagccgtgatcacacttaccgagcttactttgatctgtttgtcaatagcatgcaaaaaatgctttgtttgccctttgcttctgctttttttcagggaagctgccaaagaatgtcgacgtcgaaagaaagaatatgtaaaatgtctggagagccgagttgcagtgctggaagtccagaacaagaagcttatagaggaacttgaaaccttgaaagacatttgttctcccaaaacagattactagaaatatttaactatgaactgaaggcagcatgtatagttgcttttgaaggaatacaatatatagctggcaagaatggtggcttcttttctttgtatcattcatcttcttctttaatcacttaacattcctaaaatgcttcactgtacgtagttaagtcgtagctataacttcaaattttttaaaagagacaaactgtaaaaaatgtgtgtattcttaaaatgcaatatttgtaaggcttgttccaatgccacatacttgcagctcccattctatgtgtcatcaatagtgtcctatgcaataaaattatttgcaggtctttaaatcattttaggaaaggatgatcaaaaataatgcatccagcagtacaataaaagtaaaccacaaaaaaatacctcaggaaagaatagaaagaaagtctatctaatgacatgcctatatgagaagaatagcctagatatgaatatatggcatttgcagatttttatattagttgctttgttaaaaaaaaaaagattgtattgctgtccttgaatgccatagtcaaagagagtttttaatagaaccatgttggttgcactttgtagtgtttggtgctcatttaaatatctgaacatttactacagtttttaactctactgtgtaatataaaagatcttgcagaagt

SEQ ID NO: 6475 - protein, 95 aa, Homo sapiens; identical to SEQ ID NO: 678

SEQ ID NO: 6476 - DNA, 1547 bp, Homo sapiens
gtggcgcttcactcctgctggcggccggcagggggcggagttcgagcctggatttttttcctcggggcctcccccgggaggccgtcccggcgtgggggaggggaggacggggcgggaggacgcggttcggtcggctgcagcgctacttttggtccggggtcggcagggaggccgcggctaccgcatcacagctgacgtgaggactacgtggggccgctgccggctccgggttgctgggcggcggcgccgctgctgagcggcggtcgggctcgccgtctccacctcctcgcgtccgtaatcagtgacgaggtccgctacgtaaatccctttgcggcgggtagcagcaattgcagagacagatgaatctgcagaatcagaaggtgtaattgattctcataaacgtagagaaatcctttcacgaagaccctcttataggaaaatactgaatgaactgtcctctgatgtgcctggtgttcccaagattgaagaagagagatcagaggaagaaggaacaccacctagtattgctaccatggcagtaccaactagcatatatcagactagcacggggcaatacactgccactggtgacatgccaacttaccagatccgagctcctactgctgctttgccacagggagtggtgatggctgcatcgcccggaagtttgcacagtccccagcagctggcagaagaagcaacacgcaaacgagagctgaggctaatgaaaaacagggaagctgccaaagaatgtcgacgtcgaaagaaagaatatgtaaaatgtctggagagccgagttgcagtgctggaagtccagaacaagaagcttatagaggaacttgaaaccttgaaagacatttgttctcccaaaacagattactagaaatatttaactatgaactgaaggcagcatgtatagttgcttttgaaggaatacaatatatagctggcaagaatggtggcttcttttctttgtatcattcatcttcttctttaatcacttaacattcctaaaatgcttcactgtacgtagttaagtcgtagctataacttcaaattttttaaaagagacaaactgtaaaaaatgtgtgtattcttaaaatgcaatatttgtaaggcttgttccaatgccacatacttgcagctcccattctatgtgtcatcaatagtgtcctatgcaataaaattatttgcaggtctttaaatcattttaggaaaggatgatcaaaaataatgcatccagcagtacaataaaagtaaaccacaaaaaaatacctcaggaaagaatagaaagaaagtctatctaatgacatgcctatatgagaagaatagcctagatatgaatatatggcatttgcagatttttatattagttgctttgttaaaaaaaaaaagattgtattgctgtccttgaatgccatagtcaaagagagtttttaatagaaccatgttggttgcactttgtagtgtttggtgctcatttaaatatctgaacatttactacagtttttaactctactgtgtaatataaaagatcttgcagaagt

SEQ ID NO: 6477 - protein, 116 aa, Homo sapiens; identical to SEQ ID NO: 6457

SEQ ID NO: 6478 - DNA, 1708 bp, Homo sapiens
gtggcgcttcactcctgctggcggccggcagggggcggagttcgagcctggatttttttcctcggggcctcccccgggaggccgtcccggcgtgggggaggggaggacggggcgggaggacgcggttcggtcggctgcagcgctacttttggtccggggtcggcagggaggccgcggctaccgcatcacagctgacgtgaggactacgtggggccgctgccggctccgggttgctgggcggcggcgccgctgctgagcggcggtcgggctcgccgtctccacctcctcgcgtccgtaatcagtgacgaggtccgctacgtaaatccctttgcggcggctgccactggtgacatgccaacttaccagatccgagctcctactgctgctttgccacagggagtggtgatggctgcatcgcccggaagtttgcacagtccccagcagctggcagaagaagcaacacgcaaacgagagctgaggctaatgaaaaacagggaagctgcccgggagtgtcgcaggaagaagaaagaatatgtcaaatgtcttgaaaatcgtgtggctgtgcttgaaaaccaaaacaagactctcattgaggaactcaaggccctcaaagatctttattgccataaagtagagtaactgtctttgacttggaccttgtttactctaatcaaggcaggagatgcagcagtcctacttattgccatgtggacttgtgggaaggacacgtgtgacccttaagaatccagtttggattagtgtttgaaattgaattgggaatgttgttccaggatgtggaatgcagccgtgatcacacttaccgagcttactttgatctgtttgtcaatagcatgcaaaaaatgctttgtttgccctttgcttctgctttttttcagggaagctgccaaagaatgtcgacgtcgaaagaaagaatatgtaaaatgtctggagagccgagttgcagtgctggaagtccagaacaagaagcttatagaggaacttgaaaccttgaaagacatttgttctcccaaaacagattactagaaatatttaactatgaactgaaggcagcatgtatagttgcttttgaaggaatacaatatatagctggcaagaatggtggcttcttttctttgtatcattcatcttcttctttaatcacttaacattcctaaaatgcttcactgtacgtagttaagtcgtagctataacttcaaattttttaaaagagacaaactgtaaaaaatgtgtgtattcttaaaatgcaatatttgtaaggcttgttccaatgccacatacttgcagctcccattctatgtgtcatcaatagtgtcctatgcaataaaattatttgcaggtctttaaatcattttaggaaaggatgatcaaaaataatgcatccagcagtacaataaaagtaaaccacaaaaaaatacctcaggaaagaatagaaagaaagtctatctaatgacatgcctatatgagaagaatagcctagatatgaatatatggcatttgcagatttttatattagttgctttgttaaaaaaaaaaagattgtattgctgtccttgaatgccatagtcaaagagagtttttaatagaaccatgttggttgcactttgtagtgtttggtgctcatttaaatatctgaacatttactacagtttttaactctactgtgtaatataaaagatcttgcagaagt

SEQ ID NO: 6479 - protein, 95 aa, Homo sapiens; identical to SEQ ID NO: 678

SEQ ID NO: 6480 - DNA, 1949 bp, Homo sapiens
gtggcgcttcactcctgctggcggccggcagggggcggagttcgagcctggatttttttcctcggggcctcccccgggaggccgtcccggcgtgggggaggggaggacggggcgggaggacgcggttcggtcggctgcagcgctacttttggtccggggtcggcagggaggccgcggctaccgcatcacagctgacgtgaggactacgtggggccgctgccggctccgggttgctgggcggcggcgccgctgctgagcggcggtcgggctcgccgtctccacctcctcgcgtccgtaatcagtgacgaggtccgctacgtaaatccctttgcggcgggtagcagcaattgcagagacagatgaatctgcagaatcagaaggtgtaattgattctcataaacgtagagaaatcctttcacgaagaccctcttataggaaaatactgaatgaactgtcctctgatgtgcctggtgttcccaagattgaagaagagagatcagaggaagaaggaacaccacctagtattgctaccatggcagtaccaactagcatatatcagactagcacggggcaatacactgccactggtgacatgccaacttaccagatccgagctcctactgctgctttgccacagggagtggtgatggctgcatcgcccggaagtttgcacagtccccagcagctggcagaagaagcaacacgcaaacgagagctgaggctaatgaaaaacagggaagctgcccgggagtgtcgcaggaagaagaaagaatatgtcaaatgtcttgaaaatcgtgtggctgtgcttgaaaaccaaaacaagactctcattgaggaactcaaggccctcaaagatctttattgccataaagtagagtaactgtctttgacttggaccttgtttactctaatcaaggcaggagatgcagcagtcctacttattgccatgtggacttgtgggaaggacacgtgtgacccttaagaatccagtttggattagtgtttgaaattgaattgggaatgttgttccaggatgtggaatgcagccgtgatcacacttaccgagcttactttgatctgtttgtcaatagcatgcaaaaaatgctttgtttgccctttgcttctgctttttttcagggaagctgccaaagaatgtcgacgtcgaaagaaagaatatgtaaaatgtctggagagccgagttgcagtgctggaagtccagaacaagaagcttatagaggaacttgaaaccttgaaagacatttgttctcccaaaacagattactagaaatatttaactatgaactgaaggcagcatgtatagttgcttttgaaggaatacaatatatagctggcaagaatggtggcttcttttctttgtatcattcatcttcttctttaatcacttaacattcctaaaatgcttcactgtacgtagttaagtcgtagctataacttcaaattttttaaaagagacaaactgtaaaaaatgtgtgtattcttaaaatgcaatatttgtaaggcttgttccaatgccacatacttgcagctcccattctatgtgtcatcaatagtgtcctatgcaataaaattatttgcaggtctttaaatcattttaggaaaggatgatcaaaaataatgcatccagcagtacaataaaagtaaaccacaaaaaaatacctcaggaaagaatagaaagaaagtctatctaatgacatgcctatatgagaagaatagcctagatatgaatatatggcatttgcagatttttatattagttgctttgttaaaaaaaaaaagattgtattgctgtccttgaatgccatagtcaaagagagtttttaatagaaccatgttggttgcactttgtagtgtttggtgctcatttaaatatctgaacatttactacagtttttaactctactgtgtaatataaaagatcttgcagaagt

SEQ ID NO: 6481 - protein, 115 aa, Homo sapiens; identical to SEQ ID NO: 6453

SEQ ID NO: 6482 - DNA, 1306 bp, Homo sapiens
gtggcgcttcactcctgctggcggccggcagggggcggagttcgagcctggatttttttcctcggggcctcccccgggaggccgtcccggcgtgggggaggggaggacggggcgggaggacgcggttcggtcggctgcagcgctacttttggtccggggtcggcagggaggccgcggctaccgcatcacagctgacgtgaggactacgtggggccgctgccggctccgggttgctgggcggcggcgccgctgctgagcggcggtcgggctcgccgtctccacctcctcgcgtccgtaatcagtgacgaggtccgctacgtaaatccctttgcggcggctgccactggtgacatgccaacttaccagatccgagctcctactgctgctttgccacagggagtggtgatggctgcatcgcccggaagtttgcacagtccccagcagctggcagaagaagcaacacgcaaacgagagctgaggctaatgaaaaacagggaagctgccaaagaatgtcgacgtcgaaagaaagaatatgtaaaatgtctggagagccgagttgcagtgctggaagtccagaacaagaagcttatagaggaacttgaaaccttgaaagacatttgttctcccaaaacagattactagaaatatttaactatgaactgaaggcagcatgtatagttgcttttgaaggaatacaatatatagctggcaagaatggtggcttcttttctttgtatcattcatcttcttctttaatcacttaacattcctaaaatgcttcactgtacgtagttaagtcgtagctataacttcaaattttttaaaagagacaaactgtaaaaaatgtgtgtattcttaaaatgcaatatttgtaaggcttgttccaatgccacatacttgcagctcccattctatgtgtcatcaatagtgtcctatgcaataaaattatttgcaggtctttaaatcattttaggaaaggatgatcaaaaataatgcatccagcagtacaataaaagtaaaccacaaaaaaatacctcaggaaagaatagaaagaaagtctatctaatgacatgcctatatgagaagaatagcctagatatgaatatatggcatttgcagatttttatattagttgctttgttaaaaaaaaaaagattgtattgctgtccttgaatgccatagtcaaagagagtttttaatagaaccatgttggttgcactttgtagtgtttggtgctcatttaaatatctgaacatttactacagtttttaactctactgtgtaatataaaagatcttgcagaagt

SEQ ID NO: 6483 - protein, 96 aa, Homo sapiens; identical to SEQ ID NO: 684

SEQ ID NO: 6484 - DNA, 1613 bp, Homo sapiens
gtggcgcttcactcctgctggcggccggcagggggcggagttcgagcctggatttttttcctcggggcctcccccgggaggccgtcccggcgtgggggaggggaggacggggcgggaggacgcggttcggtcggctgcagcgctacttttggtccggggtcggcagggaggccgcggctaccgcatcacagctgacgtgaggactacgtggggccgctgccggctccgggttgctgggcggcggcgccgctgctgagcggcggtcgggctcgccgtctccacctcctcgcgtccgtaatcagtgacgagggaagctgccaaagaatgtcgacgtcgaaagaaagaatatgtaaaatgtctggagagccgagttgcagtgctggaagtccagaacaagaagcttatagaggaacttgaaaccttgaaagacatttgttctcccaaaacagattactagaaatatttaactatgaactgaaggcagcatgtatagttgcttttgaaggaatacaatatatagctggcaagaatggtggcttcttttctttgtatcattcatcttcttctttaatcacttaacattcctaaaatgcttcactgtacgtagttaagtcgtagctataacttcaaattttttaaaagagacaaactgtaaaaaatgtgtgtattcttaaaatgcaatatttgtaaggcttgttccaatgccacatacttgcagctcccattctatgtgtcatcaatagtgtcctatgcaataaaattatttgcaggtctttaaatcattttaggaaaggatgatcaaaaataatgcatccagcagtacaataaaagtaaaccacaaaaaaatacctcaggaaagaatagaaagaaagtctatctaatgacatgcctatatgagaagaatagcctagatatgaatatatggcatttgcagatttttatattagttgctttgttaaaaaaaaaaagattgtattgctgtccttgaatgccatagtcaaagagagtttttaatagaaccatgttggttgcactttgtagtgtttggtgctcatttaaatatctgaacatttactacagtttttaactctactgtgtaatataaaagatcttgcagaagttcttagtgttggtttaatattacctaatgaaagtgatgacatattttttatatctggaatgagcctgttgggatcgcattgcataccttcggggtacaagtcagtttctacactgggtgctgatccttgcacgcgccctttctaccatctcacggtggggatggccgcagggctgtgcacccagaagaagatggctgttagcgtttcggccttcataatggcctgagactttctttctgtaggtggtctggagctgtccggctggtggccccctattttgccatttagcgaacaaccacaggaattttaaaaacaaaaacatcccaagattttttcatttcaaaatgcttcaaagtccacattagatcagatactccgctgtcggcacattcagctgaggttcattacaatcgagactgcaatgtgatctatgtttcatcttgtttttataataaaaagcttcagggaacaagcccaaagccctcaccacag

SEQ ID NO: 6485 - protein, 55 aa, Homo sapiens [sequence omitted]

SEQ ID NO: 6486 - DNA, 1798 bp, Homo sapiens
gtggcgcttcactcctgctggcggccggcagggggcggagttcgagcctggatttttttcctcggggcctcccccgggaggccgtcccggcgtgggggaggggaggacggggcgggaggacgcggttcggtcggctgcagcgctacttttggtccggggtcggcagggaggccgcggctaccgcatcacagctgacgtgaggactacgtggggccgctgccggctccgggttgctgggcggcggcgccgctgctgagcggcggtcgggctcgccgtctccacctcctcgcgtccgtaatcagtgacgaggtccgctacgtaaatccctttgcggcggctgccactggtgacatgccaacttaccagatccgagctcctactgctgctttgccacagggagtggtgatggctgcatcgcccggaagtttgcacagtccccagcagctggcagaagaagcaacacgcaaacgagagctgaggctaatgaaaaacagggaagctgccaaagaatgtcgacgtcgaaagaaagaatatgtaaaatgtctggagagccgagttgcagtgctggaagtccagaacaagaagcttatagaggaacttgaaaccttgaaagacatttgttctcccaaaacagattactagaaatatttaactatgaactgaaggcagcatgtatagttgcttttgaaggaatacaatatatagctggcaagaatggtggcttcttttctttgtatcattcatcttcttctttaatcacttaacattcctaaaatgcttcactgtacgtagttaagtcgtagctataacttcaaattttttaaaagagacaaactgtaaaaaatgtgtgtattcttaaaatgcaatatttgtaaggcttgttccaatgccacatacttgcagctcccattctatgtgtcatcaatagtgtcctatgcaataaaattatttgcaggtctttaaatcattttaggaaaggatgatcaaaaataatgcatccagcagtacaataaaagtaaaccacaaaaaaatacctcaggaaagaatagaaagaaagtctatctaatgacatgcctatatgagaagaatagcctagatatgaatatatggcatttgcagatttttatattagttgctttgttaaaaaaaaaaagattgtattgctgtccttgaatgccatagtcaaagagagtttttaatagaaccatgttggttgcactttgtagtgtttggtgctcatttaaatatctgaacatttactacagtttttaactctactgtgtaatataaaagatcttgcagaagttcttagtgttggtttaatattacctaatgaaagtgatgacatattttttatatctggaatgagcctgttgggatcgcattgcataccttcggggtacaagtcagtttctacactgggtgctgatccttgcacgcgccctttctaccatctcacggtggggatggccgcagggctgtgcacccagaagaagatggctgttagcgtttcggccttcataatggcctgagactttctttctgtaggtggtctggagctgtccggctggtggccccctattttgccatttagcgaacaaccacaggaattttaaaaacaaaaacatcccaagattttttcatttcaaaatgcttcaaagtccacattagatcagatactccgctgtcggcacattcagctgaggttcattacaatcgagactgcaatgtgatctatgtttcatcttgtttttataataaaaagcttcagggaacaagcccaaagccctcaccacag

SEQ ID NO: 6487 - protein, 96 aa, Homo sapiens; identical to SEQ ID NO: 684

SEQ ID NO: 6488 - DNA, 2324 bp, Homo sapiens
gtggcgcttcactcctgctggcggccggcagggggcggagttcgagcctggatttttttcctcggggcctcccccgggaggccgtcccggcgtgggggaggggaggacggggcgggaggacgcggttcggtcggctgcagcgctacttttggtccggggtcggcagggaggccgcggctaccgcatcacagctgacgtgaggactacgtggggccgctgccggctccgggttgctgggcggcggcgccgctgctgagcggcggtcgggctcgccgtctccacctcctcgcgtccgtaatcagtgacgaggtccgctacgtaaatccctttgcggcggacaaatgaccatggaaacagttgaatcccagcatgatggaagtataacagcttctttgacagagagcaagtctgctcatgtgcagactcagactggccaaaattcaatccctgctttagctcagctgccactggtgacatgccaacttaccagatccgagctcctactgctgctttgccacagggagtggtgatggctgcatcgcccggaagtttgcacagtccccagcagctggcagaagaagcaacacgcaaacgagagctgaggctaatgaaaaacagggaagctgcccgggagtgtcgcaggaagaagaaagaatatgtcaaatgtcttgaaaatcgtgtggctgtgcttgaaaaccaaaacaagactctcattgaggaactcaaggccctcaaagatctttattgccataaagtagagtaactgtctttgacttggaccttgtttactctaatcaaggcaggagatgcagcagtcctacttattgccatgtggacttgtgggaaggacacgtgtgacccttaagaatccagtttggattagtgtttgaaattgaattgggaatgttgttccaggatgtggaatgcagccgtgatcacacttaccgagcttactttgatctgtttgtcaatagcatgcaaaaaatgctttgtttgccctttgcttctgctttttttcagggaagctgccaaagaatgtcgacgtcgaaagaaagaatatgtaaaatgtctggagagccgagttgcagtgctggaagtccagaacaagaagcttatagaggaacttgaaaccttgaaagacatttgttctcccaaaacagattactagaaatatttaactatgaactgaaggcagcatgtatagttgcttttgaaggaatacaatatatagctggcaagaatggtggcttcttttctttgtatcattcatcttcttctttaatcacttaacattcctaaaatgcttcactgtacgtagttaagtcgtagctataacttcaaattttttaaaagagacaaactgtaaaaaatgtgtgtattcttaaaatgcaatatttgtaaggcttgttccaatgccacatacttgcagctcccattctatgtgtcatcaatagtgtcctatgcaataaaattatttgcaggtctttaaatcattttaggaaaggatgatcaaaaataatgcatccagcagtacaataaaagtaaaccacaaaaaaatacctcaggaaagaatagaaagaaagtctatctaatgacatgcctatatgagaagaatagcctagatatgaatatatggcatttgcagatttttatattagttgctttgttaaaaaaaaaaagattgtattgctgtccttgaatgccatagtcaaagagagtttttaatagaaccatgttggttgcactttgtagtgtttggtgctcatttaaatatctgaacatttactacagtttttaactctactgtgtaatataaaagatcttgcagaagttcttagtgttggtttaatattacctaatgaaagtgatgacatattttttatatctggaatgagcctgttgggatcgcattgcataccttcggggtacaagtcagtttctacactgggtgctgatccttgcacgcgccctttctaccatctcacggtggggatggccgcagggctgtgcacccagaagaagatggctgttagcgtttcggccttcataatggcctgagactttctttctgtaggtggtctggagctgtccggctggtggccccctattttgccatttagcgaacaaccacaggaattttaaaaacaaaaacatcccaagattttttcatttcaaaatgcttcaaagtccacattagatcagatactccgctgtcggcacattcagctgaggttcattacaatcgagactgcaatgtgatctatgtttcatcttgtttttataataaaaagcttcagggaacaagcccaaagccctcaccacag

SEQ ID NO: 6489 - protein, 95 aa, Homo sapiens; identical to SEQ ID NO: 678

SEQ ID NO: 6490 - DNA, 2200 bp, Homo sapiens
gtggcgcttcactcctgctggcggccggcagggggcggagttcgagcctggatttttttcctcggggcctcccccgggaggccgtcccggcgtgggggaggggaggacggggcgggaggacgcggttcggtcggctgcagcgctacttttggtccggggtcggcagggaggccgcggctaccgcatcacagctgacgtgaggactacgtggggccgctgccggctccgggttgctgggcggcggcgccgctgctgagcggcggtcgggctcgccgtctccacctcctcgcgtccgtaatcagtgacgaggtccgctacgtaaatccctttgcggcggctgccactggtgacatgccaacttaccagatccgagctcctactgctgctttgccacagggagtggtgatggctgcatcgcccggaagtttgcacagtccccagcagctggcagaagaagcaacacgcaaacgagagctgaggctaatgaaaaacagggaagctgcccgggagtgtcgcaggaagaagaaagaatatgtcaaatgtcttgaaaatcgtgtggctgtgcttgaaaaccaaaacaagactctcattgaggaactcaaggccctcaaagatctttattgccataaagtagagtaactgtctttgacttggaccttgtttactctaatcaaggcaggagatgcagcagtcctacttattgccatgtggacttgtgggaaggacacgtgtgacccttaagaatccagtttggattagtgtttgaaattgaattgggaatgttgttccaggatgtggaatgcagccgtgatcacacttaccgagcttactttgatctgtttgtcaatagcatgcaaaaaatgctttgtttgccctttgcttctgctttttttcagggaagctgccaaagaatgtcgacgtcgaaagaaagaatatgtaaaatgtctggagagccgagttgcagtgctggaagtccagaacaagaagcttatagaggaacttgaaaccttgaaagacatttgttctcccaaaacagattactagaaatatttaactatgaactgaaggcagcatgtatagttgcttttgaaggaatacaatatatagctggcaagaatggtggcttcttttctttgtatcattcatcttcttctttaatcacttaacattcctaaaatgcttcactgtacgtagttaagtcgtagctataacttcaaattttttaaaagagacaaactgtaaaaaatgtgtgtattcttaaaatgcaatatttgtaaggcttgttccaatgccacatacttgcagctcccattctatgtgtcatcaatagtgtcctatgcaataaaattatttgcaggtctttaaatcattttaggaaaggatgatcaaaaataatgcatccagcagtacaataaaagtaaaccacaaaaaaatacctcaggaaagaatagaaagaaagtctatctaatgacatgcctatatgagaagaatagcctagatatgaatatatggcatttgcagatttttatattagttgctttgttaaaaaaaaaaagattgtattgctgtccttgaatgccatagtcaaagagagtttttaatagaaccatgttggttgcactttgtagtgtttggtgctcatttaaatatctgaacatttactacagtttttaactctactgtgtaatataaaagatcttgcagaagttcttagtgttggtttaatattacctaatgaaagtgatgacatattttttatatctggaatgagcctgttgggatcgcattgcataccttcggggtacaagtcagtttctacactgggtgctgatccttgcacgcgccctttctaccatctcacggtggggatggccgcagggctgtgcacccagaagaagatggctgttagcgtttcggccttcataatggcctgagactttctttctgtaggtggtctggagctgtccggctggtggccccctattttgccatttagcgaacaaccacaggaattttaaaaacaaaaacatcccaagattttttcatttcaaaatgcttcaaagtccacattagatcagatactccgctgtcggcacattcagctgaggttcattacaatcgagactgcaatgtgatctatgtttcatcttgtttttataataaaaagcttcagggaacaagcccaaagccctcaccacag

SEQ ID NO: 6491 - protein, 95 aa, Homo sapiens; identical to SEQ ID NO: 678

SEQ ID NO: 6492 - DNA, 2699 bp, Homo sapiens
gtggcgcttcactcctgctggcggccggcagggggcggagttcgagcctggatttttttcctcggggcctcccccgggaggccgtcccggcgtgggggaggggaggacggggcgggaggacgcggttcggtcggctgcagcgctacttttggtccggggtcggcagggaggccgcggctaccgcatcacagctgacgtgaggactacgtggggccgctgccggctccgggttgctgggcggcggcgccgctgctgagcggcggtcgggctcgccgtctccacctcctcgcgtccgtaatcagtgacgaggtccgctacgtaaatccctttgcggcgggataaataaagaaaacaggaaaggaggaaagcattgattacaaatatcttaacaatgagcaaatgtgcaaggaaaaaatatattaagacaaatccaagacaaatgaccatggaaacagttgaatcccagcatgatggaagtataacagcttctttgacagagagcaagtctgctcatgtgcagactcagactggccaaaattcaatccctgctttagctcaggtagcagcaattgcagagacagatgaatctgcagaatcagaaggtgtaattgattctcataaacgtagagaaatcctttcacgaagaccctcttataggaaaatactgaatgaactgtcctctgatgtgcctggtgttcccaagattgaagaagagagatcagaggaagaaggaacaccacctagtattgctaccatggcagtaccaactagcatatatcagactagcacggggcaatacaatgaggaaactgaacttgccccaagtcacatggctgctgccactggtgacatgccaacttaccagatccgagctcctactgctgctttgccacagggagtggtgatggctgcatcgcccggaagtttgcacagtccccagcagctggcagaagaagcaacacgcaaacgagagctgaggctaatgaaaaacagggaagctgcccgggagtgtcgcaggaagaagaaagaatatgtcaaatgtcttgaaaatcgtgtggctgtgcttgaaaaccaaaacaagactctcattgaggaactcaaggccctcaaagatctttattgccataaagtagagtaactgtctttgacttggaccttgtttactctaatcaaggcaggagatgcagcagtcctacttattgccatgtggacttgtgggaaggacacgtgtgacccttaagaatccagtttggattagtgtttgaaattgaattgggaatgttgttccaggatgtggaatgcagccgtgatcacacttaccgagcttactttgatctgtttgtcaatagcatgcaaaaaatgctttgtttgccctttgcttctgctttttttcagggaagctgccaaagaatgtcgacgtcgaaagaaagaatatgtaaaatgtctggagagccgagttgcagtgctggaagtccagaacaagaagcttatagaggaacttgaaaccttgaaagacatttgttctcccaaaacagattactagaaatatttaactatgaactgaaggcagcatgtatagttgcttttgaaggaatacaatatatagctggcaagaatggtggcttcttttctttgtatcattcatcttcttctttaatcacttaacattcctaaaatgcttcactgtacgtagttaagtcgtagctataacttcaaattttttaaaagagacaaactgtaaaaaatgtgtgtattcttaaaatgcaatatttgtaaggcttgttccaatgccacatacttgcagctcccattctatgtgtcatcaatagtgtcctatgcaataaaattatttgcaggtctttaaatcattttaggaaaggatgatcaaaaataatgcatccagcagtacaataaaagtaaaccacaaaaaaatacctcaggaaagaatagaaagaaagtctatctaatgacatgcctatatgagaagaatagcctagatatgaatatatggcatttgcagatttttatattagttgctttgttaaaaaaaaaaagattgtattgctgtccttgaatgccatagtcaaagagagtttttaatagaaccatgttggttgcactttgtagtgtttggtgctcatttaaatatctgaacatttactacagtttttaactctactgtgtaatataaaagatcttgcagaagttcttagtgttggtttaatattacctaatgaaagtgatgacatattttttatatctggaatgagcctgttgggatcgcattgcataccttcggggtacaagtcagtttctacactgggtgctgatccttgcacgcgccctttctaccatctcacggtggggatggccgcagggctgtgcacccagaagaagatggctgttagcgtttcggccttcataatggcctgagactttctttctgtaggtggtctggagctgtccggctggtggccccctattttgccatttagcgaacaaccacaggaattttaaaaacaaaaacatcccaagattttttcatttcaaaatgcttcaaagtccacattagatcagatactccgctgtcggcacattcagctgaggttcattacaatcgagactgcaatgtgatctatgtttcatcttgtttttataataaaaagcttcagggaacaagcccaaagccctcaccacag

SEQ ID NO: 6493 - protein, 248 aa, Homo sapiens; identical to SEQ ID NO: 702

SEQ ID NO: 6494 - DNA, 2039 bp, Homo sapiens
gtggcgcttcactcctgctggcggccggcagggggcggagttcgagcctggatttttttcctcggggcctcccccgggaggccgtcccggcgtgggggaggggaggacggggcgggaggacgcggttcggtcggctgcagcgctacttttggtccggggtcggcagggaggccgcggctaccgcatcacagctgacgtgaggactacgtggggccgctgccggctccgggttgctgggcggcggcgccgctgctgagcggcggtcgggctcgccgtctccacctcctcgcgtccgtaatcagtgacgaggtccgctacgtaaatccctttgcggcgggtagcagcaattgcagagacagatgaatctgcagaatcagaaggtgtaattgattctcataaacgtagagaaatcctttcacgaagaccctcttataggaaaatactgaatgaactgtcctctgatgtgcctggtgttcccaagattgaagaagagagatcagaggaagaaggaacaccacctagtattgctaccatggcagtaccaactagcatatatcagactagcacggggcaatacactgccactggtgacatgccaacttaccagatccgagctcctactgctgctttgccacagggagtggtgatggctgcatcgcccggaagtttgcacagtccccagcagctggcagaagaagcaacacgcaaacgagagctgaggctaatgaaaaacagggaagctgccaaagaatgtcgacgtcgaaagaaagaatatgtaaaatgtctggagagccgagttgcagtgctggaagtccagaacaagaagcttatagaggaacttgaaaccttgaaagacatttgttctcccaaaacagattactagaaatatttaactatgaactgaaggcagcatgtatagttgcttttgaaggaatacaatatatagctggcaagaatggtggcttcttttctttgtatcattcatcttcttctttaatcacttaacattcctaaaatgcttcactgtacgtagttaagtcgtagctataacttcaaattttttaaaagagacaaactgtaaaaaatgtgtgtattcttaaaatgcaatatttgtaaggcttgttccaatgccacatacttgcagctcccattctatgtgtcatcaatagtgtcctatgcaataaaattatttgcaggtctttaaatcattttaggaaaggatgatcaaaaataatgcatccagcagtacaataaaagtaaaccacaaaaaaatacctcaggaaagaatagaaagaaagtctatctaatgacatgcctatatgagaagaatagcctagatatgaatatatggcatttgcagatttttatattagttgctttgttaaaaaaaaaaagattgtattgctgtccttgaatgccatagtcaaagagagtttttaatagaaccatgttggttgcactttgtagtgtttggtgctcatttaaatatctgaacatttactacagtttttaactctactgtgtaatataaaagatcttgcagaagttcttagtgttggtttaatattacctaatgaaagtgatgacatattttttatatctggaatgagcctgttgggatcgcattgcataccttcggggtacaagtcagtttctacactgggtgctgatccttgcacgcgccctttctaccatctcacggtggggatggccgcagggctgtgcacccagaagaagatggctgttagcgtttcggccttcataatggcctgagactttctttctgtaggtggtctggagctgtccggctggtggccccctattttgccatttagcgaacaaccacaggaattttaaaaacaaaaacatcccaagattttttcatttcaaaatgcttcaaagtccacattagatcagatactccgctgtcggcacattcagctgaggttcattacaatcgagactgcaatgtgatctatgtttcatcttgtttttataataaaaagcttcagggaacaagcccaaagccctcaccacag

SEQ ID NO: 6495 - protein, 116 aa, Homo sapiens; identical to SEQ ID NO: 6457

SEQ ID NO: 6496 - DNA, 2441 bp, Homo sapiens
gtggcgcttcactcctgctggcggccggcagggggcggagttcgagcctggatttttttcctcggggcctcccccgggaggccgtcccggcgtgggggaggggaggacggggcgggaggacgcggttcggtcggctgcagcgctacttttggtccggggtcggcagggaggccgcggctaccgcatcacagctgacgtgaggactacgtggggccgctgccggctccgggttgctgggcggcggcgccgctgctgagcggcggtcgggctcgccgtctccacctcctcgcgtccgtaatcagtgacgaggtccgctacgtaaatccctttgcggcgggtagcagcaattgcagagacagatgaatctgcagaatcagaaggtgtaattgattctcataaacgtagagaaatcctttcacgaagaccctcttataggaaaatactgaatgaactgtcctctgatgtgcctggtgttcccaagattgaagaagagagatcagaggaagaaggaacaccacctagtattgctaccatggcagtaccaactagcatatatcagactagcacggggcaatacactgccactggtgacatgccaacttaccagatccgagctcctactgctgctttgccacagggagtggtgatggctgcatcgcccggaagtttgcacagtccccagcagctggcagaagaagcaacacgcaaacgagagctgaggctaatgaaaaacagggaagctgcccgggagtgtcgcaggaagaagaaagaatatgtcaaatgtcttgaaaatcgtgtggctgtgcttgaaaaccaaaacaagactctcattgaggaactcaaggccctcaaagatctttattgccataaagtagagtaactgtctttgacttggaccttgtttactctaatcaaggcaggagatgcagcagtcctacttattgccatgtggacttgtgggaaggacacgtgtgacccttaagaatccagtttggattagtgtttgaaattgaattgggaatgttgttccaggatgtggaatgcagccgtgatcacacttaccgagcttactttgatctgtttgtcaatagcatgcaaaaaatgctttgtttgccctttgcttctgctttttttcagggaagctgccaaagaatgtcgacgtcgaaagaaagaatatgtaaaatgtctggagagccgagttgcagtgctggaagtccagaacaagaagcttatagaggaacttgaaaccttgaaagacatttgttctcccaaaacagattactagaaatatttaactatgaactgaaggcagcatgtatagttgcttttgaaggaatacaatatatagctggcaagaatggtggcttcttttctttgtatcattcatcttcttctttaatcacttaacattcctaaaatgcttcactgtacgtagttaagtcgtagctataacttcaaattttttaaaagagacaaactgtaaaaaatgtgtgtattcttaaaatgcaatatttgtaaggcttgttccaatgccacatacttgcagctcccattctatgtgtcatcaatagtgtcctatgcaataaaattatttgcaggtctttaaatcattttaggaaaggatgatcaaaaataatgcatccagcagtacaataaaagtaaaccacaaaaaaatacctcaggaaagaatagaaagaaagtctatctaatgacatgcctatatgagaagaatagcctagatatgaatatatggcatttgcagatttttatattagttgctttgttaaaaaaaaaaagattgtattgctgtccttgaatgccatagtcaaagagagtttttaatagaaccatgttggttgcactttgtagtgtttggtgctcatttaaatatctgaacatttactacagtttttaactctactgtgtaatataaaagatcttgcagaagttcttagtgttggtttaatattacctaatgaaagtgatgacatattttttatatctggaatgagcctgttgggatcgcattgcataccttcggggtacaagtcagtttctacactgggtgctgatccttgcacgcgccctttctaccatctcacggtggggatggccgcagggctgtgcacccagaagaagatggctgttagcgtttcggccttcataatggcctgagactttctttctgtaggtggtctggagctgtccggctggtggccccctattttgccatttagcgaacaaccacaggaattttaaaaacaaaaacatcccaagattttttcatttcaaaatgcttcaaagtccacattagatcagatactccgctgtcggcacattcagctgaggttcattacaatcgagactgcaatgtgatctatgtttcatcttgtttttataataaaaagcttcagggaacaagcccaaagccctcaccacag

SEQ ID NO: 6497 - protein, 115 aa, Homo sapiens; identical to SEQ ID NO: 6453

SEQ ID NO: 6498 - DNA, 504 bp, Homo sapiens
atggccctaaaaaggcaagactcaggcagaagggaaaatgcgccttccgagagcggtcgcggctctgcccttcccactccggagactgcccgcgcccgggaccgaatgactcagctgcgaggccctccggcccaggttttgggggaaaacgggctgcgtccgctttcgtctaaactgcgctctccttggcccggccccggggtcccggcccgccgcccacggctccgctcggcctctgctgctccaccgcacccggctccgctccgcctcctgcctccacctccacctcctgcgccgcgtcgcccgctgctgggtctcggggccggagccgacgcaccacttacccgccgcaaagggatttacgtagcggacctcgtcactgattacggacgcgaggaggtggagacggcgagcccgaccgccgctcagcagcggcgccgccgcccagcaacccggagccggcagcggccccacgtagtcctcacgtcagctgtgatgcggtag

SEQ ID NO: 6499 - protein, 167 aa, Homo sapiens
MALKRQDSGRRENAPSESGRGSALPTPETARARDRMTQLRGPPAQVLGENGLRPLSSKLRSPWPGPGVPARRPRLRSASAAPPHPAPLRLLPPPPPPAPRRPLLGLGAGADAPLTRRKGIYVADLVTDYGREEVETASPTAAQQRRRRPATRSRQRPHVVLTSAVMR

SEQ ID NO: 6500 - DNA, 948 bp, Homo sapiens
cagtgacgaggtccgctacgtaaatccctttgcggcgggataaataaagaaaacaggaaaggaggaaagcattgattacaaatatcttaacaatgagcaaatgtgcaaggaaaaaatatattaagacaaatccaaggtagcagcaattgcagagacagatgaatctgcagaatcagaaggtgtaattgattctcataaacgtagagaaatcctttcacgaagaccctcttataggaaaatactgaatgaactgtcctctgatgtgcctggtgttcccaagattgaagaagagagatcagaggaagaaggaacaccacctagtattgctaccatggcagtaccaactagcatatatcagactagcacggggcaatacagtatgtatgctgcaattcgatatgatacagtgctagctttaagtcttctctagttatattgaagcaactcaggttttggcattaaattgttccattttaaaatgcatcattaatacctaaactgtatcatagaatgaaagtatatgttaaaaagtgagatctttgtattgacagctgtcatataattttgaaaagtaaaaattttgactgccgaatatagaagaaaattttggggtaaaaaggagaatttttcctatttacatgtttatattaatctctagtaaaacattgtttttgttgtctttatgatgcatgcgaacataaatgtctgtatttcattcttgttggcttttgttacccacaattacatactattcttactaatctgagagttttctaaagtatgttttcaatgtttcactactctctactctgttaatttgtgctacagtttttcctaaaagagaatggaaaaatgatttaattttttaaactgtagcaattggatagataattttatttgaaattttacacactgaaagctctaaataaacagatacattcacattca

SEQ ID NO: 6501 - protein, 55 aa, Homo sapiens; identical to SEQ ID NO: 6447

SEQ ID NO: 6502 - DNA, 1081 bp, Homo sapiens
ccgccccacgcccgcttcgtgcgctcagctgccccgggacccgcctgcctcctcgcgaacttgggacgagttggaaaatcctccctgagagagccgtgcggctcaggggagcggtttaactcggaaaaggaaaaggaatccagaaacaaatgaccatggaaacagttgaatcccagcatgatggaagtataacagcttctttgacagagagcaagtctgctcatgtgcagactcagactggccaaaattcaatccctgctttagctcaggtagcagcaattgcagagacagatgaatctgcagaatcagaaggtgtaattgattctcataaacgtagagaaatcctttcacgaagaccctcttataggaaaatactgaatgaactgtcctctgatgtgcctggtgttcccaagattgaagaagagagatcagaggaagaaggaacaccacctagtattgctaccatggcagtaccaactagcatatatcagactagcacggggcaatacagtatgtatgctgcaattcgatatgatacagtgctagctttaagtcttctctagttatattgaagcaactcaggttttggcattaaattgttccattttaaaatgcatcattaatacctaaactgtatcatagaatgaaagtatatgttaaaaagtgagatctttgtattgacagctgtcatataattttgaaaagtaaaaattttgactgccgaatatagaagaaaattttggggtaaaaaggagaatttttcctatttacatgtttatattaatctctagtaaaacattgtttttgttgtctttatgatgcatgcgaacataaatgtctgtatttcattcttgttggcttttgttacccacaattacatactattcttactaatctgagagttttctaaagtatgttttcaatgtttcactactctctactctgttaatttgtgctacagtttttcctaaaagagaatggaaaaatgatttaattttttaaactgtagcaattggatagataattttatttgaaattttacacactgaaagctctaaataaacagatacattcacattca

SEQ ID NO: 6503 - protein, 137 aa, Homo sapiens; identical to SEQ ID NO: 664

SEQ ID NO: 6504 - DNA, 627 bp, Homo sapiens
cgggacccgcctgcctcctcgcgaacttgggacgagttggaaaatcctccctgagagagccgtgcggctcaggggagcggtttaactcggaaaaggaaaaggaatccagaagataaataaagaaaacaggaaaggaggaaagcattgattacaaatatcttaacaatgagcaaatgtgcaaggaaaaaatatattaagacaaatccaagacaaatgaccatggaaacagttgaatcccagcatgatggaagtataacagcttctttgacagagagcaagtctgctcatgtgcagactcagactggccaaaattcaatccctgctttagctcaggtagcagcaattgcagagacagatgaatctgcagaatcagaaggtgtaattgattctcataaacgtagagaaatcctttcacgaagaccctcttataggaaaatactgaatgaactgtcctctgatgtgcctggtgttcccaagattgaagaagagagatcagaggaagaaggaacaccacctagtattgctaccatggcagtaccaactagcatatatcagactagcacggggcaatacattgctatagcccaaggtggaacaatccagatttctaacccaggatctgatggt

SEQ ID NO: 6505 - protein, 153 aa, Homo sapiens
MSKCARKKYIKTNPRQMTMETVESQHDGSITASLTESKSAHVQTQTGQNSIPALAQVAAIAETDESAESEGVIDSHKRREILSRRPSYRKILNELSSDVPGVPKIEEERSEEEGTPPSIATMAVPTSIYQTSTGQYIAIAQGGTIQISNPGSD

SEQ ID NO: 6506 - DNA, 2221 bp, Homo sapiens
gacccgcctgcctcctcgcgaacttgggacgagttggaaaatcctccctgagagagccgtgcggctcaggggagcggtttaactcggaaaaggaaaaggaatccagaagataaataaagaaaacaggaaaggaggaaagcattgattacaaatatcttaacaatgagcaaatgtgcaaggaaaaaatatattaagacaaatccaagacaaatgaccatggaaacagttgaatcccagcatgatggaagtataacagcttctttgacagagagcaagtctgctcatgtgcagactcagactggccaaaattcaatccctgctttagctcaggtagcagcaattgcagagacagatgaatctgcagaatcagaaggtgtaattgattctcataaacgtagagaaatcctttcacgaagaccctcttataggaaaatactgaatgaactgtcctctgatgtgcctggtgttcccaagattgaagaagagagatcagaggaagaaggaacaccacctagtattgctaccatggcagtaccaactagcatatatcagactagcacggggcaatacattgctatagcccaaggtggaacaatccagatttctaacccaggatctgatggtgttcagggactgcaggcattaacaatgacaaattcaggagctcctccaccaggtgctacaattgtacagtacgcagcacaatcagctgatggcacacagcagttctttgtcccaggcagccaggttgttgttcaagctgccactggtgacatgccaacttaccagatccgagctcctactgctgctttgccacagggagtggtgatggctgcatcgcccggaagtttgcacagtccccagcagctggcagaagaagcaacacgcaaacgagagctgaggctaatgaaaaacagggaagctgccaaagaatgtcgacgtcgaaagaaagaatatgtaaaatgtctggagagccgagttgcagtgctggaagtccagaacaagaagcttatagaggaacttgaaaccttgaaagacatttgttctcccaaaacagattactagaaatatttaactatgaactgaaggcagcatgtatagttgcttttgaaggaatacaatatatagctggcaagaatggtggcttcttttctttgtatcattcatcttcttctttaatcacttaacattcctaaaatgcttcactgtacgtagttaagtcgtagctataacttcaaattttttaaaagagacaaactgtaaaaaatgtgtgtattcttaaaatgcaatatttgtaaggcttgttccaatgccacatacttgcagctcccattctatgtgtcatcaatagtgtcctatgcaataaaattatttgcaggtctttaaatcattttaggaaaggatgatcaaaaataatgcatccagcagtacaataaaagtaaaccacaaaaaaatacctcaggaaagaatagaaagaaagtctatctaatgacatgcctatatgagaagaatagcctagatatgaatatatggcatttgcagatttttatattagttgctttgttaaaaaaaaaaagattgtattgctgtccttgaatgccatagtcaaagagagtttttaatagaaccatgttggttgcactttgtagtgtttggtgctcatttaaatatctgaacatttactacagtttttaactctactgtgtaatataaaagatcttgcagaagttcttagtgttggtttaatattacctaatgaaagtgatgacatattttttatatctggaatgagcctgttgggatcgcattgcataccttcggggtacaagtcagtttctacactgggtgctgatccttgcacgcgccctttctaccatctcacggtggggatggccgcagggctgtgcacccagaagaagatggctgttagcgtttcggccttcataatggcctgagactttctttctgtaggtggtctggagctgtccggctggtggccccctattttgccatttagcgaacaaccacaggaattttaaaaacaaaaacatcccaagattttttcatttcaaaatgcttcaaagtccacattagatcagatactccgctgtcggcacattcagctgaggttcattacaatcgagactgcaatgtgatctatgtttcatcttgtttttataataaaaagcttcagggaacaagcccaaagccctcaccacag

SEQ ID NO: 6507 - protein, 300 aa, Homo sapiens; identical to SEQ ID NO: 666

SEQ ID NO: 6508 - DNA, 1934 bp, Homo sapiens
gacccgcctgcctcctcgcgaacttgggacgagttggaaaatcctccctgagagagccgtgcggctcaggggagcggtttaactcggaaaaggaaaaggaatccagaaacaaatgaccatggaaacagttgaatcccagcatgatggaagtataacagcttctttgacagagagcaagtctgctcatgtgcagactcagactggccaaaattcaatccctgctttagctcaggtagcagcaattgcagagacagatgaatctgcagaatcagaaggtgtaattgattctcataaacgtagagaaatcctttcacgaagaccctcttataggaaaatactgaatgaactgtcctctgatgtgcctggtgttcccaagattgaagaagagagatcagaggaagaaggaacaccacctagtattgctaccatggcagtaccaactagcatatatcagactagcacggggcaatacactgccactggtgacatgccaacttaccagatccgagctcctactgctgctttgccacagggagtggtgatggctgcatcgcccggaagtttgcacagtccccagcagctggcagaagaagcaacacgcaaacgagagctgaggctaatgaaaaacagggaagctgccaaagaatgtcgacgtcgaaagaaagaatatgtaaaatgtctggagagccgagttgcagtgctggaagtccagaacaagaagcttatagaggaacttgaaaccttgaaagacatttgttctcccaaaacagattactagaaatatttaactatgaactgaaggcagcatgtatagttgcttttgaaggaatacaatatatagctggcaagaatggtggcttcttttctttgtatcattcatcttcttctttaatcacttaacattcctaaaatgcttcactgtacgtagttaagtcgtagctataacttcaaattttttaaaagagacaaactgtaaaaaatgtgtgtattcttaaaatgcaatatttgtaaggcttgttccaatgccacatacttgcagctcccattctatgtgtcatcaatagtgtcctatgcaataaaattatttgcaggtctttaaatcattttaggaaaggatgatcaaaaataatgcatccagcagtacaataaaagtaaaccacaaaaaaatacctcaggaaagaatagaaagaaagtctatctaatgacatgcctatatgagaagaatagcctagatatgaatatatggcatttgcagatttttatattagttgctttgttaaaaaaaaaaagattgtattgctgtccttgaatgccatagtcaaagagagtttttaatagaaccatgttggttgcactttgtagtgtttggtgctcatttaaatatctgaacatttactacagtttttaactctactgtgtaatataaaagatcttgcagaagttcttagtgttggtttaatattacctaatgaaagtgatgacatattttttatatctggaatgagcctgttgggatcgcattgcataccttcggggtacaagtcagtttctacactgggtgctgatccttgcacgcgccctttctaccatctcacggtggggatggccgcagggctgtgcacccagaagaagatggctgttagcgtttcggccttcataatggcctgagactttctttctgtaggtggtctggagctgtccggctggtggccccctattttgccatttagcgaacaaccacaggaattttaaaaacaaaaacatcccaagattttttcatttcaaaatgcttcaaagtccacattagatcagatactccgctgtcggcacattcagctgaggttcattacaatcgagactgcaatgtgatctatgtttcatcttgtttttataataaaaagcttcagggaacaagcccaaagccctcaccacag

SEQ ID NO: 6509 - protein, 221 aa, Homo sapiens; identical to SEQ ID NO: 704

SEQ ID NO: 6510 - DNA, 1870 bp, Homo sapiens
gataaataaagaaaacaggaaaggaggaaagcattgattacaaatatcttaacaatgagcaaatgtgcaaggaaaaaatatattaagacaaatccaagacaaatgaccatggaaacagttgaatcccagcatgatggaagtataacagcttctttgacagagagcaagtctgctcatgtgcagactcagactggccaaaattcaatccctgctttagctcaggtagcagcaattgcagagacagatgaatctgcagaatcagaaggtgtaattgattctcataaacgtagagaaatcctttcacgaagaccctcttataggaaaatactgaatgaactgtcctctgatgtgcctggtgttcccaagattgaagaagagagatcagaggaagaaggaacaccacctagtattgctaccatggcagtaccaactagcatatatcagactagcacggggcaatacaatgaggaaactgaacttgccccaagtcacatggctgctgccactggtgacatgccaacttaccagatccgagctcctactgctgctttgccacagggagtggtgatggctgcatcgcccggaagtttgcacagtccccagcagctggcagaagaagcaacacgcaaacgagagctgaggctaatgaaaaacagggaagctgcccgggagtgtcgcaggaagaagaaagaatatgtcaaatgtcttgaaaatcgtgtggctgtgcttgaaaaccaaaacaagactctcattgaggaactcaaggccctcaaagatctttattgccataaagtagagtaactgtctttgacttggaccttgtttactctaatcaaggcaggagatgcagcagtcctacttattgccatgtggacttgtgggaaggacacgtgtgacccttaagaatccagtttggattagtgtttgaaattgaattgggaatgttgttccaggatgtggaatgcagccgtgatcacacttaccgagcttactttgatctgtttgtcaatagcatgcaaaaaatgctttgtttgccctttgcttctgctttttttcagggaagctgccaaagaatgtcgacgtcgaaagaaagaatatgtaaaatgtctggagagccgagttgcagtgctggaagtccagaacaagaagcttatagaggaacttgaaaccttgaaagacatttgttctcccaaaacagattactagaaatatttaactatgaactgaaggcagcatgtatagttgcttttgaaggaatacaatatatagctggcaagaatggtggcttcttttctttgtatcattcatcttcttctttaatcacttaacattcctaaaatgcttcactgtacgtagttaagtcgtagctataacttcaaattttttaaaagagacaaactgtaaaaaatgtgtgtattcttaaaatgcaatatttgtaaggcttgttccaatgccacatacttgcagctcccattctatgtgtcatcaatagtgtcctatgcaataaaattatttgcaggtctttaaatcattttaggaaaggatgatcaaaaataatgcatccagcagtacaataaaagtaaaccacaaaaaaatacctcaggaaagaatagaaagaaagtctatctaatgacatgcctatatgagaagaatagcctagatatgaatatatggcatttgcagatttttatattagttgctttgttaaaaaaaaaaagattgtattgctgtccttgaatgccatagtcaaagagagtttttaatagaaccatgttggttgcactttgtagtgtttggtgctcatttaaatatctgaacatttactacagtttttaactctactgtgtaatataaaagatcttgcagaagt

SEQ ID NO: 6511 - protein, 248 aa, Homo sapiens; identical to SEQ ID NO: 702

SEQ ID NO: 6512 - DNA, 2515 bp, Homo sapiens
gataaataaagaaaacaggaaaggaggaaagcattgattacaaatatcttaacaatgagcaaatgtgcaaggaaaaaatatattaagacaaatccaagacaaatgaccatggaaacagttgaatcccagcatgatggaagtataacagcttctttgacagagagcaagtctgctcatgtgcagactcagactggccaaaattcaatccctgctttagctcaggtagcagcaattgcagagacagatgaatctgcagaatcagaaggtgtaattgattctcataaacgtagagaaatcctttcacgaagaccctcttataggaaaatactgaatgaactgtcctctgatgtgcctggtgttcccaagattgaagaagagagatcagaggaagaaggaacaccacctagtattgctaccatggcagtaccaactagcatatatcagactagcacggggcaatacattgctatagcccaaggtggaacaatccagatttctaacccaggatctgatggtgttcagggactgcaggcattaacaatgacaaattcaggagctcctccaccaggtgctacaattgtacagtacgcagcacaatcagctgatggcacacagcagttctttgtcccaggcagccaggttgttgttcaagctgccactggtgacatgccaacttaccagatccgagctcctactgctgctttgccacagggagtggtgatggctgcatcgcccggaagtttgcacagtccccagcagctggcagaagaagcaacacgcaaacgagagctgaggctaatgaaaaacagggaagctgcccgggagtgtcgcaggaagaagaaagaatatgtcaaatgtcttgaaaatcgtgtggctgtgcttgaaaaccaaaacaagactctcattgaggaactcaaggccctcaaagatctttattgccataaagtagagtaactgtctttgacttggaccttgtttactctaatcaaggcaggagatgcagcagtcctacttattgccatgtggacttgtgggaaggacacgtgtgacccttaagaatccagtttggattagtgtttgaaattgaattgggaatgttgttccaggatgtggaatgcagccgtgatcacacttaccgagcttactttgatctgtttgtcaatagcatgcaaaaaatgctttgtttgccctttgcttctgctttttttcagggaagctgccaaagaatgtcgacgtcgaaagaaagaatatgtaaaatgtctggagagccgagttgcagtgctggaagtccagaacaagaagcttatagaggaacttgaaaccttgaaagacatttgttctcccaaaacagattactagaaatatttaactatgaactgaaggcagcatgtatagttgcttttgaaggaatacaatatatagctggcaagaatggtggcttcttttctttgtatcattcatcttcttctttaatcacttaacattcctaaaatgcttcactgtacgtagttaagtcgtagctataacttcaaattttttaaaagagacaaactgtaaaaaatgtgtgtattcttaaaatgcaatatttgtaaggcttgttccaatgccacatacttgcagctcccattctatgtgtcatcaatagtgtcctatgcaataaaattatttgcaggtctttaaatcattttaggaaaggatgatcaaaaataatgcatccagcagtacaataaaagtaaaccacaaaaaaatacctcaggaaagaatagaaagaaagtctatctaatgacatgcctatatgagaagaatagcctagatatgaatatatggcatttgcagatttttatattagttgctttgttaaaaaaaaaaagattgtattgctgtccttgaatgccatagtcaaagagagtttttaatagaaccatgttggttgcactttgtagtgtttggtgctcatttaaatatctgaacatttactacagtttttaactctactgtgtaatataaaagatcttgcagaagttcttagtgttggtttaatattacctaatgaaagtgatgacatattttttatatctggaatgagcctgttgggatcgcattgcataccttcggggtacaagtcagtttctacactgggtgctgatccttgcacgcgccctttctaccatctcacggtggggatggccgcagggctgtgcacccagaagaagatggctgttagcgtttcggccttcataatggcctgagactttctttctgtaggtggtctggagctgtccggctggtggccccctattttgccatttagcgaacaaccacaggaattttaaaaacaaaaacatcccaagattttttcatttcaaaatgcttcaaagtccacattagatcagatactccgctgtcggcacattcagctgaggttcattacaatcgagactgcaatgtgatctatgtttcatcttgtttttataataaaaagcttcagggaacaagcccaaagccctcaccacag

SEQ ID NO: 6513 - protein, 299 aa, Homo sapiens; identical to SEQ ID NO: 698

SEQ ID NO: 6514 - DNA, 2326 bp, Homo sapiens
gataaataaagaaaacaggaaaggaggaaagcattgattacaaatatcttaacaatgagcaaatgtgcaaggaaaaaatatattaagacaaatccaagacaaatgaccatggaaacagttgaatcccagcatgatggaagtataacagcttctttgacagagagcaagtctgctcatgtgcagactcagactggccaaaattcaatccctgctttagctcaggtagcagcaattgcagagacagatgaatctgcagaatcagaaggtgtaattgattctcataaacgtagagaaatcctttcacgaagaccctcttataggaaaatactgaatgaactgtcctctgatgtgcctggtgttcccaagattgaagaagagagatcagaggaagaaggaacaccacctagtattgctaccatggcagtaccaactagcatatatcagactagcacggggcaatacactgccactggtgacatgccaacttaccagatccgagctcctactgctgctttgccacagggagtggtgatggctgcatcgcccggaagtttgcacagtccccagcagctggcagaagaagcaacacgcaaacgagagctgaggctaatgaaaaacagggaagctgcccgggagtgtcgcaggaagaagaaagaatatgtcaaatgtcttgaaaatcgtgtggctgtgcttgaaaaccaaaacaagactctcattgaggaactcaaggccctcaaagatctttattgccataaagtagagtaactgtctttgacttggaccttgtttactctaatcaaggcaggagatgcagcagtcctacttattgccatgtggacttgtgggaaggacacgtgtgacccttaagaatccagtttggattagtgtttgaaattgaattgggaatgttgttccaggatgtggaatgcagccgtgatcacacttaccgagcttactttgatctgtttgtcaatagcatgcaaaaaatgctttgtttgccctttgcttctgctttttttcagggaagctgccaaagaatgtcgacgtcgaaagaaagaatatgtaaaatgtctggagagccgagttgcagtgctggaagtccagaacaagaagcttatagaggaacttgaaaccttgaaagacatttgttctcccaaaacagattactagaaatatttaactatgaactgaaggcagcatgtatagttgcttttgaaggaatacaatatatagctggcaagaatggtggcttcttttctttgtatcattcatcttcttctttaatcacttaacattcctaaaatgcttcactgtacgtagttaagtcgtagctataacttcaaattttttaaaagagacaaactgtaaaaaatgtgtgtattcttaaaatgcaatatttgtaaggcttgttccaatgccacatacttgcagctcccattctatgtgtcatcaatagtgtcctatgcaataaaattatttgcaggtctttaaatcattttaggaaaggatgatcaaaaataatgcatccagcagtacaataaaagtaaaccacaaaaaaatacctcaggaaagaatagaaagaaagtctatctaatgacatgcctatatgagaagaatagcctagatatgaatatatggcatttgcagatttttatattagttgctttgttaaaaaaaaaaagattgtattgctgtccttgaatgccatagtcaaagagagtttttaatagaaccatgttggttgcactttgtagtgtttggtgctcatttaaatatctgaacatttactacagtttttaactctactgtgtaatataaaagatcttgcagaagttcttagtgttggtttaatattacctaatgaaagtgatgacatattttttatatctggaatgagcctgttgggatcgcattgcataccttcggggtacaagtcagtttctacactgggtgctgatccttgcacgcgccctttctaccatctcacggtggggatggccgcagggctgtgcacccagaagaagatggctgttagcgtttcggccttcataatggcctgagactttctttctgtaggtggtctggagctgtccggctggtggccccctattttgccatttagcgaacaaccacaggaattttaaaaacaaaaacatcccaagattttttcatttcaaaatgcttcaaagtccacattagatcagatactccgctgtcggcacattcagctgaggttcattacaatcgagactgcaatgtgatctatgtttcatcttgtttttataataaaaagcttcagggaacaagcccaaagccctcaccacag

SEQ ID NO: 6515 - protein, 236 aa, Homo sapiens; identical to SEQ ID NO: 700

SEQ ID NO: 6516 - DNA, 1475 bp, Homo sapiens
atgaccatggaaacagttgaatcccagcatgatggaagtataacagcttctttgacagagagcaagtctgctcatgtgcagactcagactggccaaaattcaatccctgctttagctcaggtttctgtggctggatcaggcaccagaagaggctccccagctgtaactctagtgcagttaccttcgggccaaactatacatgtccagggagtaattcagacaccacagccatgggttattcagtcatcagaaatacacaccgttcaggtagcagcaattgcagagacagatgaatctgcagaatcagaaggtgtaattgattctcataaacgtagagaaatcctttcacgaagaccctcttataggaaaatactgaatgaactgtcctctgatgtgcctggtgttcccaagattgaagaagagagatcagaggaagaaggaacaccacctagtattgctaccatggcagtaccaactagcatatatcagactagcacggggcaatacattgctatagcccaaggtggaacaatccagatttctaacccaggatctgatggtgttcagggactgcaggcattaacaatgacaaattcaggagctcctccaccaggtgctacaattgtacagtacgcagcacaatcagctgatggcacacagcagttctttgtcccaggcagccaggttgttgttcaagctgccactggtgacatgccaacttaccagatccgagctcctactgctgctttgccacagggagtggtgatggctgcatcgcccggaagtttgcacagtccccagcagctggcagaagaagcaacacgcaaacgagagctgaggctaatgaaaaacagggaagctgcccgggagtgtcgcaggaagaagaaagaatatgtcaaatgtcttgaaaatcgtgtggctgtgcttgaaaaccaaaacaagactctcattgaggaactcaaggccctcaaagatctttattgccataaagtagagtaactgtctttgacttggaccttgtttactctaatcaaggcaggagatgcagcagtcctacttattgccatgtggacttgtgggaaggacacgtgtgacccttaagaatccagtttggattagtgtttgaaattgaattgggaatgttgttccaggatgtggaatgcagccgtgatcacacttaccgagcttactttgatctgtttgtcaatagcatgcaaaaaatgctttgtttgccctttgcttctgctttttttcagggaagctgccaaagaatgtcgacgtcgaaagaaagaatatgtaaaatgtctggagagccgagttgcagtgctggaagtccagaacaagaagcttatagaggaacttgaaaccttgaaagacatttgttctcccaaaacagattactagaaatatttaactatgaactgaaggcagcatgtatagttgcttttgaaggaatacaatatatagctggcaag

SEQ ID NO: 6517 - protein, 332 aa, Homo sapiens
MTMETVESQHDGSITASLTESKSAHVQTQTGQNSIPALAQVSVAGSGTRRGSPAVTLVQLPSGQTIHVQGVIQTPQPWVIQSSEIHTVQVAAIAETDESAESEGVIDSHKRREILSRRPSYRKILNELSSDVPGVPKIEEERSEEEGTPPSIATMAVPTSIYQTSTGQYIAIAQGGTIQISNPGSDGVQGLQALTMTNSGAPPPGATIVQYAAQSADGTQQFFVPGSQVVVQAATGDMPTYQIRAPTAALPQGVVMAASPGSLHSPQQLAEEATRKRELRLMKNREAARECRRKKKEYVKCLENRVAVLENQNKTLIEELKALKDLYCHKVE

SEQ ID NO: 6518 - DNA, 1321 bp, Homo sapiens
atgaccatggaaacagttgaatcccagcatgatggaagtataacagcttctttgacagagagcaagtctgctcatgtgcagactcagactggccaaaattcaatccctgctttagctcaggtttctgtggctggatcaggcaccagaagaggctccccagctgtaactctagtgcagttaccttcgggccaaactatacatgtccagggagtaattcagacaccacagccatgggttattcagtcatcagaaatacacaccgttcaggtagcagcaattgcagagacagatgaatctgcagaatcagaaggtgtaattgattctcataaacgtagagaaatcctttcacgaagaccctcttataggaaaatactgaatgaactgtcctctgatgtgcctggtgttcccaagattgaagaagagagatcagaggaagaaggaacaccacctagtattgctaccatggcagtaccaactagcatatatcagactagcacggggcaatacattgctatagcccaaggtggaacaatccagatttctaacccaggatctgatggtgttcagggactgcaggcattaacaatgacaaattcaggagctcctccaccaggtgctacaattgtacagtacgcagcacaatcagctgatggcacacagcagttctttgtcccaggcagccaggttgttgttcaagctgccactggtgacatgccaacttaccagatccgagctcctactgctgctttgccacagggagtggtgatggctgcatcgcccggaagtttgcacagtccccagcagctggcagaagaagcaacacgcaaacgagagctgaggctaatgaaaaacagggaagctgccaaagaatgtcgacgtcgaaagaaagaatatgtaaaatgtctggagagccgagttgcagtgctggaagtccagaacaagaagcttatagaggaacttgaaaccttgaaagacatttgttctcccaaaacagattactagaaatatttaactatgaactgaaggcagcatgtatagttgcttttgaaggaatacaatatatagctggcaagaatggtggcttcttttctttgtatcattcatcttcttctttaatcacttaacattcctaaaatgcttcactgtacgtagttaagtcgtagctataacttcaaattttttaaaagagacaaactgtaaaaaatgtgtgtattcttaaaatgcaatatttgtaaggcttgttccaatgccacatacttgcagctcccattctatgtgtcatcaatagtgtcctatgcaataaaattatttgcaggtcttt

SEQ ID NO: 6519 - protein, 333 aa, Homo sapiens
MTMETVESQHDGSITASLTESKSAHVQTQTGQNSIPALAQVSVAGSGTRRGSPAVTLVQLPSGQTIHVQGVIQTPQPWVIQSSEIHTVQVAAIAETDESAESEGVIDSHKRREILSRRPSYRKILNELSSDVPGVPKIEEERSEEEGTPPSIATMAVPTSIYQTSTGQYIAIAQGGTIQISNPGSDGVQGLQALTMTNSGAPPPGATIVQYAAQSADGTQQFFVPGSQVVVQAATGDMPTYQIRAPTAALPQGVVMAASPGSLHSPQQLAEEATRKRELRLMKNREAAKECRRRKKEYVKCLESRVAVLEVQNKKLIEELETLKDICSPKTDY

SEQ ID NO: 6520 - DNA, 1723 bp, Homo sapiens
atgaccatggaaacagttgaatcccagcatgatggaagtataacagcttctttgacagagagcaagtctgctcatgtgcagactcagactggccaaaattcaatccctgctttagctcaggtttctgtggctggatcaggcaccagaagaggctccccagctgtaactctagtgcagttaccttcgggccaaactatacatgtccagggagtaattcagacaccacagccatgggttattcagtcatcagaaatacacaccgttcaggtagcagcaattgcagagacagatgaatctgcagaatcagaaggtgtaattgattctcataaacgtagagaaatcctttcacgaagaccctcttataggaaaatactgaatgaactgtcctctgatgtgcctggtgttcccaagattgaagaagagagatcagaggaagaaggaacaccacctagtattgctaccatggcagtaccaactagcatatatcagactagcacggggcaatacattgctatagcccaaggtggaacaatccagatttctaacccaggatctgatggtgttcagggactgcaggcattaacaatgacaaattcaggagctcctccaccaggtgctacaattgtacagtacgcagcacaatcagctgatggcacacagcagttctttgtcccaggcagccaggttgttgttcaagctgccactggtgacatgccaacttaccagatccgagctcctactgctgctttgccacagggagtggtgatggctgcatcgcccggaagtttgcacagtccccagcagctggcagaagaagcaacacgcaaacgagagctgaggctaatgaaaaacagggaagctgcccgggagtgtcgcaggaagaagaaagaatatgtcaaatgtcttgaaaatcgtgtggctgtgcttgaaaaccaaaacaagactctcattgaggaactcaaggccctcaaagatctttattgccataaagtagagtaactgtctttgacttggaccttgtttactctaatcaaggcaggagatgcagcagtcctacttattgccatgtggacttgtgggaaggacacgtgtgacccttaagaatccagtttggattagtgtttgaaattgaattgggaatgttgttccaggatgtggaatgcagccgtgatcacacttaccgagcttactttgatctgtttgtcaatagcatgcaaaaaatgctttgtttgccctttgcttctgctttttttcagggaagctgccaaagaatgtcgacgtcgaaagaaagaatatgtaaaatgtctggagagccgagttgcagtgctggaagtccagaacaagaagcttatagaggaacttgaaaccttgaaagacatttgttctcccaaaacagattactagaaatatttaactatgaactgaaggcagcatgtatagttgcttttgaaggaatacaatatatagctggcaagaatggtggcttcttttctttgtatcattcatcttcttctttaatcacttaacattcctaaaatgcttcactgtacgtagttaagtcgtagctataacttcaaattttttaaaagagacaaactgtaaaaaatgtgtgtattcttaaaatgcaatatttgtaaggcttgttccaatgccacatacttgcagctcccattctatgtgtcatcaatagtgtcctatgcaataaaattatttgcaggtcttt

SEQ ID NO: 6521 - protein, 332 aa, Homo sapiens; identical to SEQ ID NO: 6517

SEQ ID NO: 6522 - DNA, 2068 bp, Homo sapiens
atgaccatggaaacagttgaatcccagcatgatggaagtataacagcttctttgacagagagcaagtctgctcatgtgcagactcagactggccaaaattcaatccctgctttagctcaggtttctgtggctggatcaggcaccagaagaggctccccagctgtaactctagtgcagttaccttcgggccaaactatacatgtccagggagtaattcagacaccacagccatgggttattcagtcatcagaaatacacaccgttcaggtagcagcaattgcagagacagatgaatctgcagaatcagaaggtgtaattgattctcataaacgtagagaaatcctttcacgaagaccctcttataggaaaatactgaatgaactgtcctctgatgtgcctggtgttcccaagattgaagaagagagatcagaggaagaaggaacaccacctagtattgctaccatggcagtaccaactagcatatatcagactagcacggggcaatacattgctatagcccaaggtggaacaatccagatttctaacccaggatctgatggtgttcagggactgcaggcattaacaatgacaaattcaggagctcctccaccaggtgctacaattgtacagtacgcagcacaatcagctgatggcacacagcagttctttgtcccaggcagccaggttgttgttcaagctgccactggtgacatgccaacttaccagatccgagctcctactgctgctttgccacagggagtggtgatggctgcatcgcccggaagtttgcacagtccccagcagctggcagaagaagcaacacgcaaacgagagctgaggctaatgaaaaacagggaagctgcccgggagtgtcgcaggaagaagaaagaatatgtcaaatgtcttgaaaatcgtgtggctgtgcttgaaaaccaaaacaagactctcattgaggaactcaaggccctcaaagatctttattgccataaagtagagtaactgtctttgacttggaccttgtttactctaatcaaggcaggagatgcagcagtcctacttattgccatgtggacttgtgggaaggacacgtgtgacccttaagaatccagtttggattagtgtttgaaattgaattgggaatgttgttccaggatgtggaatgcagccgtgatcacacttaccgagcttactttgatctgtttgtcaatagcatgcaaaaaatgctttgtttgccctttgcttctgctttttttcagggaagctgccaaagaatgtcgacgtcgaaagaaagaatatgtaaaatgtctggagagccgagttgcagtgctggaagtccagaacaagaagcttatagaggaacttgaaaccttgaaagacatttgttctcccaaaacagattactagaaatatttaactatgaactgaaggcagcatgtatagttgcttttgaaggaatacaatatatagctggcaagaatggtggcttcttttctttgtatcattcatcttcttctttaatcacttaacattcctaaaatgcttcactgtacgtagttaagtcgtagctataacttcaaattttttaaaagagacaaactgtaaaaaatgtgtgtattcttaaaatgcaatatttgtaaggcttgttccaatgccacatacttgcagctcccattctatgtgtcatcaatagtgtcctatgcaataaaattatttgcaggtctttaaatcattttaggaaaggatgatcaaaaataatgcatccagcagtacaataaaagtaaaccacaaaaaaatacctcaggaaagaatagaaagaaagtctatctaatgacatgcctatatgagaagaatagcctagatatgaatatatggcatttgcagatttttatattagttgctttgttaaaaaaaaaaagattgtattgctgtccttgaatgccatagtcaaagagagtttttaatagaaccatgttggttgcactttgtagtgtttggtgctcatttaaatatctgaacatttactacagtttttaactctactgtgtaatataaaagatcttgcagaagt

SEQ ID NO: 6523 - protein, 332 aa, Homo sapiens; identical to SEQ ID NO: 6517

SEQ ID NO: 6524 - DNA, 1666 bp, Homo sapiens
atgaccatggaaacagttgaatcccagcatgatggaagtataacagcttctttgacagagagcaagtctgctcatgtgcagactcagactggccaaaattcaatccctgctttagctcaggtttctgtggctggatcaggcaccagaagaggctccccagctgtaactctagtgcagttaccttcgggccaaactatacatgtccagggagtaattcagacaccacagccatgggttattcagtcatcagaaatacacaccgttcaggtagcagcaattgcagagacagatgaatctgcagaatcagaaggtgtaattgattctcataaacgtagagaaatcctttcacgaagaccctcttataggaaaatactgaatgaactgtcctctgatgtgcctggtgttcccaagattgaagaagagagatcagaggaagaaggaacaccacctagtattgctaccatggcagtaccaactagcatatatcagactagcacggggcaatacattgctatagcccaaggtggaacaatccagatttctaacccaggatctgatggtgttcagggactgcaggcattaacaatgacaaattcaggagctcctccaccaggtgctacaattgtacagtacgcagcacaatcagctgatggcacacagcagttctttgtcccaggcagccaggttgttgttcaagctgccactggtgacatgccaacttaccagatccgagctcctactgctgctttgccacagggagtggtgatggctgcatcgcccggaagtttgcacagtccccagcagctggcagaagaagcaacacgcaaacgagagctgaggctaatgaaaaacagggaagctgccaaagaatgtcgacgtcgaaagaaagaatatgtaaaatgtctggagagccgagttgcagtgctggaagtccagaacaagaagcttatagaggaacttgaaaccttgaaagacatttgttctcccaaaacagattactagaaatatttaactatgaactgaaggcagcatgtatagttgcttttgaaggaatacaatatatagctggcaagaatggtggcttcttttctttgtatcattcatcttcttctttaatcacttaacattcctaaaatgcttcactgtacgtagttaagtcgtagctataacttcaaattttttaaaagagacaaactgtaaaaaatgtgtgtattcttaaaatgcaatatttgtaaggcttgttccaatgccacatacttgcagctcccattctatgtgtcatcaatagtgtcctatgcaataaaattatttgcaggtctttaaatcattttaggaaaggatgatcaaaaataatgcatccagcagtacaataaaagtaaaccacaaaaaaatacctcaggaaagaatagaaagaaagtctatctaatgacatgcctatatgagaagaatagcctagatatgaatatatggcatttgcagatttttatattagttgctttgttaaaaaaaaaaagattgtattgctgtccttgaatgccatagtcaaagagagtttttaatagaaccatgttggttgcactttgtagtgtttggtgctcatttaaatatctgaacatttactacagtttttaactctactgtgtaatataaaagatcttgcagaagt

SEQ ID NO: 6525 - protein, 333 aa, Homo sapiens; identical to SEQ ID NO: 6519

SEQ ID NO: 6526 - DNA, 2560 bp, Homo sapiens
atgaccatggaaacagttgaatcccagcatgatggaagtataacagcttctttgacagagagcaagtctgctcatgtgcagactcagactggccaaaattcaatccctgctttagctcaggtttctgtggctggatcaggcaccagaagaggctccccagctgtaactctagtgcagttaccttcgggccaaactatacatgtccagggagtaattcagacaccacagccatgggttattcagtcatcagaaatacacaccgttcaggtagcagcaattgcagagacagatgaatctgcagaatcagaaggtgtaattgattctcataaacgtagagaaatcctttcacgaagaccctcttataggaaaatactgaatgaactgtcctctgatgtgcctggtgttcccaagattgaagaagagagatcagaggaagaaggaacaccacctagtattgctaccatggcagtaccaactagcatatatcagactagcacggggcaatacattgctatagcccaaggtggaacaatccagatttctaacccaggatctgatggtgttcagggactgcaggcattaacaatgacaaattcaggagctcctccaccaggtgctacaattgtacagtacgcagcacaatcagctgatggcacacagcagttctttgtcccaggcagccaggttgttgttcaagctgccactggtgacatgccaacttaccagatccgagctcctactgctgctttgccacagggagtggtgatggctgcatcgcccggaagtttgcacagtccccagcagctggcagaagaagcaacacgcaaacgagagctgaggctaatgaaaaacagggaagctgcccgggagtgtcgcaggaagaagaaagaatatgtcaaatgtcttgaaaatcgtgtggctgtgcttgaaaaccaaaacaagactctcattgaggaactcaaggccctcaaagatctttattgccataaagtagagtaactgtctttgacttggaccttgtttactctaatcaaggcaggagatgcagcagtcctacttattgccatgtggacttgtgggaaggacacgtgtgacccttaagaatccagtttggattagtgtttgaaattgaattgggaatgttgttccaggatgtggaatgcagccgtgatcacacttaccgagcttactttgatctgtttgtcaatagcatgcaaaaaatgctttgtttgccctttgcttctgctttttttcagggaagctgccaaagaatgtcgacgtcgaaagaaagaatatgtaaaatgtctggagagccgagttgcagtgctggaagtccagaacaagaagcttatagaggaacttgaaaccttgaaagacatttgttctcccaaaacagattactagaaatatttaactatgaactgaaggcagcatgtatagttgcttttgaaggaatacaatatatagctggcaagaatggtggcttcttttctttgtatcattcatcttcttctttaatcacttaacattcctaaaatgcttcactgtacgtagttaagtcgtagctataacttcaaattttttaaaagagacaaactgtaaaaaatgtgtgtattcttaaaatgcaatatttgtaaggcttgttccaatgccacatacttgcagctcccattctatgtgtcatcaatagtgtcctatgcaataaaattatttgcaggtctttaaatcattttaggaaaggatgatcaaaaataatgcatccagcagtacaataaaagtaaaccacaaaaaaatacctcaggaaagaatagaaagaaagtctatctaatgacatgcctatatgagaagaatagcctagatatgaatatatggcatttgcagatttttatattagttgctttgttaaaaaaaaaaagattgtattgctgtccttgaatgccatagtcaaagagagtttttaatagaaccatgttggttgcactttgtagtgtttggtgctcatttaaatatctgaacatttactacagtttttaactctactgtgtaatataaaagatcttgcagaagttcttagtgttggtttaatattacctaatgaaagtgatgacatattttttatatctggaatgagcctgttgggatcgcattgcataccttcggggtacaagtcagtttctacactgggtgctgatccttgcacgcgccctttctaccatctcacggtggggatggccgcagggctgtgcacccagaagaagatggctgttagcgtttcggccttcataatggcctgagactttctttctgtaggtggtctggagctgtccggctggtggccccctattttgccatttagcgaacaaccacaggaattttaaaaacaaaaacatcccaagattttttcatttcaaaatgcttcaaagtccacattagatcagatactccgctgtcggcacattcagctgaggttcattacaatcgagactgcaatgtgatctatgtttcatcttgtttttataataaaaagcttcagggaacaagcccaaagccctcaccacag

SEQ ID NO: 6527 - protein, 332 aa, Homo sapiens; identical to SEQ ID NO: 6517

SEQ ID NO: 6528 - DNA, 2158 bp, Homo sapiens
atgaccatggaaacagttgaatcccagcatgatggaagtataacagcttctttgacagagagcaagtctgctcatgtgcagactcagactggccaaaattcaatccctgctttagctcaggtttctgtggctggatcaggcaccagaagaggctccccagctgtaactctagtgcagttaccttcgggccaaactatacatgtccagggagtaattcagacaccacagccatgggttattcagtcatcagaaatacacaccgttcaggtagcagcaattgcagagacagatgaatctgcagaatcagaaggtgtaattgattctcataaacgtagagaaatcctttcacgaagaccctcttataggaaaatactgaatgaactgtcctctgatgtgcctggtgttcccaagattgaagaagagagatcagaggaagaaggaacaccacctagtattgctaccatggcagtaccaactagcatatatcagactagcacggggcaatacattgctatagcccaaggtggaacaatccagatttctaacccaggatctgatggtgttcagggactgcaggcattaacaatgacaaattcaggagctcctccaccaggtgctacaattgtacagtacgcagcacaatcagctgatggcacacagcagttctttgtcccaggcagccaggttgttgttcaagctgccactggtgacatgccaacttaccagatccgagctcctactgctgctttgccacagggagtggtgatggctgcatcgcccggaagtttgcacagtccccagcagctggcagaagaagcaacacgcaaacgagagctgaggctaatgaaaaacagggaagctgccaaagaatgtcgacgtcgaaagaaagaatatgtaaaatgtctggagagccgagttgcagtgctggaagtccagaacaagaagcttatagaggaacttgaaaccttgaaagacatttgttctcccaaaacagattactagaaatatttaactatgaactgaaggcagcatgtatagttgcttttgaaggaatacaatatatagctggcaagaatggtggcttcttttctttgtatcattcatcttcttctttaatcacttaacattcctaaaatgcttcactgtacgtagttaagtcgtagctataacttcaaattttttaaaagagacaaactgtaaaaaatgtgtgtattcttaaaatgcaatatttgtaaggcttgttccaatgccacatacttgcagctcccattctatgtgtcatcaatagtgtcctatgcaataaaattatttgcaggtctttaaatcattttaggaaaggatgatcaaaaataatgcatccagcagtacaataaaagtaaaccacaaaaaaatacctcaggaaagaatagaaagaaagtctatctaatgacatgcctatatgagaagaatagcctagatatgaatatatggcatttgcagatttttatattagttgctttgttaaaaaaaaaaagattgtattgctgtccttgaatgccatagtcaaagagagtttttaatagaaccatgttggttgcactttgtagtgtttggtgctcatttaaatatctgaacatttactacagtttttaactctactgtgtaatataaaagatcttgcagaagttcttagtgttggtttaatattacctaatgaaagtgatgacatattttttatatctggaatgagcctgttgggatcgcattgcataccttcggggtacaagtcagtttctacactgggtgctgatccttgcacgcgccctttctaccatctcacggtggggatggccgcagggctgtgcacccagaagaagatggctgttagcgtttcggccttcataatggcctgagactttctttctgtaggtggtctggagctgtccggctggtggccccctattttgccatttagcgaacaaccacaggaattttaaaaacaaaaacatcccaagattttttcatttcaaaatgcttcaaagtccacattagatcagatactccgctgtcggcacattcagctgaggttcattacaatcgagactgcaatgtgatctatgtttcatcttgtttttataataaaaagcttcagggaacaagcccaaagccctcaccacag

SEQ ID NO: 6529 - protein, 333 aa, Homo sapiens; identical to SEQ ID NO: 6519

SEQ ID NO: 6530 - DNA, 598 bp, Homo sapiens
agctgaactctattaaccctatgatgtatgccaaaagtgactgactcttctgaatttctgatggcttcatatttacttgccacttgtctcatttttcttcagacttgaggattgtaaatttccatatgttttagatttaaacttagttgtgaataaagaggaatttctgacactcaccttccttgtttatatgatcagattatcagtaaacagtgtgggaacaaaaggcgtaagcagaacgttcagtgggtttgattctttgcatctaaggtcatttgatactggttgttttgattgtcctggcctttccagagcttctgctaatcaagaatatactatgaaaatcatcagagacctagcaactgttgagcttggttttggctgtcaggcccctgttctgctgatggattgagactcttgggaattggtaacactgccatgaagacctaggtgggtaaggtcattcagatggagccagtggaaaggatgtaccttaaaactgactttctgaagtataattctccatagctgctgctgaagcctggaggcctcgactctgaaagctaaataactcttctttataaatgactacttctca

SEQ ID NO: 6531 - protein, 73 aa, Homo sapiens
MIRLSVNSVGTKGVSRTFSGFDSLHLRSFDTGCFDCPGLSRASANQEYTMKIIRDLATVELGFGCQAPVLLMD

SEQ ID NO: 6532 - DNA, 1101 bp, Homo sapiens
agctacgggtcagagctagtccactaggtgctaatcaaatgctgtgttacaacactgtgaggttttcccagttataagtgtcactattagggttttttttaattgcaaagccaaataaggctgtcaattgcatcatcttaccttatttcttcagattaagtactgtttatagtgggatttttggtggatgtggtggcatcagcataatctatgtttcaggcgtcctatagaagaggattattcttcaggggatgtggaagaaaaggcacagtctcgctctgtcatccaggctggagtgcggtggcatgatctcagctcactgcaacctcgaactcctgggttcaagaaattctcatgcctcagcctcatgagtagctgggattacaggaaaatactgaatgaactgtcctctgatgtgcctggtgttcccaagattgaagaagagagatcagaggaagaaggaacaccacctagtattgctaccatggcagtaccaactagcatatatcagactagcacggggcaatacagtatgtatgctgcaattcgatatgatacagtgctagctttaagtcttctctagttatattgaagcaactcaggttttggcattaaattgttccattttaaaatgcatcattaatacctaaactgtatcatagaatgaaagtatatgttaaaaagtgagatctttgtattgacagctgtcatataattttgaaaagtaaaaattttgactgccgaatatagaagaaaattttggggtaaaaaggagaatttttcctatttacatgtttatattaatctctagtaaaacattgtttttgttgtctttatgatgcatgcgaacataaatgtctgtatttcattcttgttggcttttgttacccacaattacatactattcttactaatctgagagttttctaaagtatgttttcaatgtttcactactctctactctgttaatttgtgctacagtttttcctaaaagagaatggaaaaatgatttaattttttaaactgtagcaattggatagataattttatttgaaattttacacactgaaagctctaaataaacagatacattcacattca

SEQ ID NO: 6533 - protein, 131 aa, Homo sapiens
MWWHQHNLCFRRPIEEDYSSGDVEEKAQSRSVIQAGVRWHDLSSLQPRTPGFKKFSCLSLMSSWDYRKILNELSSDVPGVPKIEEERSEEEGTPPSIATMAVPTSIYQTSTGQYSMYAAIRYDTVLALSLL

SEQ ID NO: 6534 - DNA, 650 bp, Homo sapiens
agctacgggtcagagctagtccactaggtgctaatcaaatgctgtgttacaacactgtgaggttttcccagttataagtgtcactattagggttttttttaattgcaaagccaaataaggctgtcaattgcatcatcttaccttatttcttcagattaagtactgtttatagtgggatttttggtggatgtggtggcatcagcataatctatgtttcaggcgtcctatagaagaggattattcttcaggggatgtggaagaaaaggtagcagcaattgcagagacagatgaatctgcagaatcagaaggtgtaattgattctcataaacgtagagaaatcctttcacgaagaccctcttataggaaaatactgaatgaactgtcctctgatgtgcctggtgttcccaagattgaagaagagagatcagaggaagaaggaacaccacctagtattgctaccatggcagtaccaactagcatatatcagactagcacggggcaatacattgctatagcccaaggtggaacaatccagatttctaacccaggatctgatggtgttcagggactgcaggcattaacaatgacaaattcaggagctcctccaccaggtgctacaattgtacagtacgcagcacaatcagctgatg

SEQ ID NO: 6535 - protein, 153 aa, Homo sapiens
MWWHQHNLCFRRPIEEDYSSGDVEEKVAAIAETDESAESEGVIDSHKRREILSRRPSYRKILNELSSDVPGVPKIEEERSEEEGTPPSIATMAVPTSIYQTSTGQYIAIAQGGTIQISNPGSDGVQGLQALTMTNSGAPPPGATIVQYAAQSA

SEQ ID NO: 6536 - DNA, 2156 bp, Homo sapiens
agctacgggtcagagctagtccactaggtgctaatcaaatgctgtgttacaacactgtgaggttttcccagttataagtgtcactattagggttttttttaattgcaaagccaaataaggctgtcaattgcatcatcttaccttatttcttcagattaagtactgtttatagtgggatttttggtggatgtggtggcatcagcataatctatgtttcaggcgtcctatagaagaggattattcttcaggggatgtggaagaaaaggtagcagcaattgcagagacagatgaatctgcagaatcagaaggtgtaattgattctcataaacgtagagaaatcctttcacgaagaccctcttataggaaaatactgaatgaactgtcctctgatgtgcctggtgttcccaagattgaagaagagagatcagaggaagaaggaacaccacctagtattgctaccatggcagtaccaactagcatatatcagactagcacggggcaatacattgctatagcccaaggtggaacaatccagatttctaacccaggatctgatggtgttcagggactgcaggcattaacaatgacaaattcaggagctcctccaccaggtgctacaattgtacagtacgcagcacaatcagctgatggcacacagcagttctttgtcccaggcagccaggttgttgttcaagctgccactggtgacatgccaacttaccagatccgagctcctactgctgctttgccacagggagtggtgatggctgcatcgcccggaagtttgcacagtccccagcagctggcagaagaagcaacacgcaaacgagagctgaggctaatgaaaaacagggaagctgccaaagaatgtcgacgtcgaaagaaagaatatgtaaaatgtctggagagccgagttgcagtgctggaagtccagaacaagaagcttatagaggaacttgaaaccttgaaagacatttgttctcccaaaacagattactagaaatatttaactatgaactgaaggcagcatgtatagttgcttttgaaggaatacaatatatagctggcaagaatggtggcttcttttctttgtatcattcatcttcttctttaatcacttaacattcctaaaatgcttcactgtacgtagttaagtcgtagctataacttcaaattttttaaaagagacaaactgtaaaaaatgtgtgtattcttaaaatgcaatatttgtaaggcttgttccaatgccacatacttgcagctcccattctatgtgtcatcaatagtgtcctatgcaataaaattatttgcaggtctttaaatcattttaggaaaggatgatcaaaaataatgcatccagcagtacaataaaagtaaaccacaaaaaaatacctcaggaaagaatagaaagaaagtctatctaatgacatgcctatatgagaagaatagcctagatatgaatatatggcatttgcagatttttatattagttgctttgttaaaaaaaaaaagattgtattgctgtccttgaatgccatagtcaaagagagtttttaatagaaccatgttggttgcactttgtagtgtttggtgctcatttaaatatctgaacatttactacagtttttaactctactgtgtaatataaaagatcttgcagaagttcttagtgttggtttaatattacctaatgaaagtgatgacatattttttatatctggaatgagcctgttgggatcgcattgcataccttcggggtacaagtcagtttctacactgggtgctgatccttgcacgcgccctttctaccatctcacggtggggatggccgcagggctgtgcacccagaagaagatggctgttagcgtttcggccttcataatggcctgagactttctttctgtaggtggtctggagctgtccggctggtggccccctattttgccatttagcgaacaaccacaggaattttaaaaacaaaaacatcccaagattttttcatttcaaaatgcttcaaagtccacattagatcagatactccgctgtcggcacattcagctgaggttcattacaatcgagactgcaatgtgatctatgtttcatcttgtttttataataaaaagcttcagggaacaagcccaaagccctcaccacag

SEQ ID NO: 6537 - protein, 270 aa, Homo sapiens; identical to SEQ ID NO: 690

SEQ ID NO: 6538 - DNA, 1967 bp, Homo sapiens
agctacgggtcagagctagtccactaggtgctaatcaaatgctgtgttacaacactgtgaggttttcccagttataagtgtcactattagggttttttttaattgcaaagccaaataaggctgtcaattgcatcatcttaccttatttcttcagattaagtactgtttatagtgggatttttggtggatgtggtggcatcagcataatctatgtttcaggcgtcctatagaagaggattattcttcaggggatgtggaagaaaaggtagcagcaattgcagagacagatgaatctgcagaatcagaaggtgtaattgattctcataaacgtagagaaatcctttcacgaagaccctcttataggaaaatactgaatgaactgtcctctgatgtgcctggtgttcccaagattgaagaagagagatcagaggaagaaggaacaccacctagtattgctaccatggcagtaccaactagcatatatcagactagcacggggcaatacactgccactggtgacatgccaacttaccagatccgagctcctactgctgctttgccacagggagtggtgatggctgcatcgcccggaagtttgcacagtccccagcagctggcagaagaagcaacacgcaaacgagagctgaggctaatgaaaaacagggaagctgccaaagaatgtcgacgtcgaaagaaagaatatgtaaaatgtctggagagccgagttgcagtgctggaagtccagaacaagaagcttatagaggaacttgaaaccttgaaagacatttgttctcccaaaacagattactagaaatatttaactatgaactgaaggcagcatgtatagttgcttttgaaggaatacaatatatagctggcaagaatggtggcttcttttctttgtatcattcatcttcttctttaatcacttaacattcctaaaatgcttcactgtacgtagttaagtcgtagctataacttcaaattttttaaaagagacaaactgtaaaaaatgtgtgtattcttaaaatgcaatatttgtaaggcttgttccaatgccacatacttgcagctcccattctatgtgtcatcaatagtgtcctatgcaataaaattatttgcaggtctttaaatcattttaggaaaggatgatcaaaaataatgcatccagcagtacaataaaagtaaaccacaaaaaaatacctcaggaaagaatagaaagaaagtctatctaatgacatgcctatatgagaagaatagcctagatatgaatatatggcatttgcagatttttatattagttgctttgttaaaaaaaaaaagattgtattgctgtccttgaatgccatagtcaaagagagtttttaatagaaccatgttggttgcactttgtagtgtttggtgctcatttaaatatctgaacatttactacagtttttaactctactgtgtaatataaaagatcttgcagaagttcttagtgttggtttaatattacctaatgaaagtgatgacatattttttatatctggaatgagcctgttgggatcgcattgcataccttcggggtacaagtcagtttctacactgggtgctgatccttgcacgcgccctttctaccatctcacggtggggatggccgcagggctgtgcacccagaagaagatggctgttagcgtttcggccttcataatggcctgagactttctttctgtaggtggtctggagctgtccggctggtggccccctattttgccatttagcgaacaaccacaggaattttaaaaacaaaaacatcccaagattttttcatttcaaaatgcttcaaagtccacattagatcagatactccgctgtcggcacattcagctgaggttcattacaatcgagactgcaatgtgatctatgtttcatcttgtttttataataaaaagcttcagggaacaagcccaaagccctcaccacag

SEQ ID NO: 6539 - protein, 207 aa, Homo sapiens; identical to SEQ ID NO: 692

SEQ ID NO: 6540 - DNA, 919 bp, Homo sapiens
ggaacattcttagccaccgaagtatgggcaccaaaagcgataaggagcatgtgttccttaataaatgtcacatcagaaaatgactgttccaggacagtaaccacctcccgatggtagcagcaattgcagagacagatgaatctgcagaatcagaaggtgtaattgattctcataaacgtagagaaatcctttcacgaagaccctcttataggaaaatactgaatgaactgtcctctgatgtgcctggtgttcccaagattgaagaagagagatcagaggaagaaggaacaccacctagtattgctaccatggcagtaccaactagcatatatcagactagcacggggcaatacattgctatagcccaaggtggaacaatccagatttctaacccaggatctgatggtgttcagggactgcaggcattaacaatgacaaattcaggagctcctccaccaggtgctacaattgtacagtacgcagcacaatcagctgatggcacacagcagttctttgtcccaggcagccaggttgttgttcaagctgccactggtgacatgccaacttaccagatccgagctcctactgctgctttgccacagggagtggtgatggctgcatcgcccggaagtttgcacagtccccagcagctggcagaagaagcaacacgcaaacgagagctgaggctaatgaaaaacagggaagctgccaaagaatgtcgacgtcgaaagaaagaatatgtaaaatgtctggagagccgagttgcagtgctggaagtccagaacaagaagcttatagaggaacttgaaaccttgaaagacatttgttctcccaaaacagattactagaaatatttaactatgaactgaaggcagcatgtatagttgcttttgaaggaatacaatatatagctggcaag

SEQ ID NO: 6541 - protein, 245 aa, Homo sapiens; identical to SEQ ID NO: 686

SEQ ID NO: 6542 - DNA, 926 bp, Homo sapiens
ggaacattcttagccaccgaagtatgggcaccaaaagcgataaggagcatgtgttccttaataaatgtcacatcagaaaatgactgttccaggacagtaaccacctcccgatgttgctatagcccaaggtggaacaatccagatttctaacccaggatctgatggtgttcagggactgcaggcattaacaatgacaaattcaggagctcctccaccaggtgctacaattgtacagtacgcagcacaatcagctgatggcacacagcagttctttgtcccaggcagccaggttgttgttcaagctgccactggtgacatgccaacttaccagatccgagctcctactgctgctttgccacagggagtggtgatggctgcatcgcccggaagtttgcacagtccccagcagctggcagaagaagcaacacgcaaacgagagctgaggctaatgaaaaacagggaagctgccaaagaatgtcgacgtcgaaagaaagaatatgtaaaatgtctggagagccgagttgcagtgctggaagtccagaacaagaagcttatagaggaacttgaaaccttgaaagacatttgttctcccaaaacagattactagaaatatttaactatgaactgaaggcagcatgtatagttgcttttgaaggaatacaatatatagctggcaagaatggtggcttcttttctttgtatcattcatcttcttctttaatcacttaacattcctaaaatgcttcactgtacgtagttaagtcgtagctataacttcaaattttttaaaagagacaaactgtaaaaaatgtgtgtattcttaaaatgcaatatttgtaaggcttgttccaatgccacatacttgcagctcccattctatgtgtcatcaatagtgtcctatgcaataaaattatttgcaggtcttt

SEQ ID NO: 6543 - protein, 138 aa, Homo sapiens
MTNSGAPPPGATIVQYAAQSADGTQQFFVPGSQVVVQAATGDMPTYQIRAPTAALPQGVVMAASPGSLHSPQQLAEEATRKRELRLMKNREAAKECRRRKKEYVKCLESRVAVLEVQNKKLIEELETLKDICSPKTDY

SEQ ID NO: 6544 - DNA, 1167 bp, Homo sapiens
ggaacattcttagccaccgaagtatgggcaccaaaagcgataaggagcatgtgttccttaataaatgtcacatcagaaaatgactgttccaggacagtaaccacctcccgatggtagcagcaattgcagagacagatgaatctgcagaatcagaaggtgtaattgattctcataaacgtagagaaatcctttcacgaagaccctcttataggaaaatactgaatgaactgtcctctgatgtgcctggtgttcccaagattgaagaagagagatcagaggaagaaggaacaccacctagtattgctaccatggcagtaccaactagcatatatcagactagcacggggcaatacattgctatagcccaaggtggaacaatccagatttctaacccaggatctgatggtgttcagggactgcaggcattaacaatgacaaattcaggagctcctccaccaggtgctacaattgtacagtacgcagcacaatcagctgatggcacacagcagttctttgtcccaggcagccaggttgttgttcaagctgccactggtgacatgccaacttaccagatccgagctcctactgctgctttgccacagggagtggtgatggctgcatcgcccggaagtttgcacagtccccagcagctggcagaagaagcaacacgcaaacgagagctgaggctaatgaaaaacagggaagctgccaaagaatgtcgacgtcgaaagaaagaatatgtaaaatgtctggagagccgagttgcagtgctggaagtccagaacaagaagcttatagaggaacttgaaaccttgaaagacatttgttctcccaaaacagattactagaaatatttaactatgaactgaaggcagcatgtatagttgcttttgaaggaatacaatatatagctggcaagaatggtggcttcttttctttgtatcattcatcttcttctttaatcacttaacattcctaaaatgcttcactgtacgtagttaagtcgtagctataacttcaaattttttaaaagagacaaactgtaaaaaatgtgtgtattcttaaaatgcaatatttgtaaggcttgttccaatgccacatacttgcagctcccattctatgtgtcatcaatagtgtcctatgcaataaaattatttgcaggtcttt

SEQ ID NO: 6545 - protein, 245 aa, Homo sapiens; identical to SEQ ID NO: 686

SEQ ID NO: 6546 - DNA, 1271 bp, Homo sapiens
ggaacattcttagccaccgaagtatgggcaccaaaagcgataaggagcatgtgttccttaataaatgtcacatcagaaaatgactgttccaggacagtaaccacctcccgatgttgctatagcccaaggtggaacaatccagatttctaacccaggatctgatggtgttcagggactgcaggcattaacaatgacaaattcaggagctcctccaccaggtgctacaattgtacagtacgcagcacaatcagctgatggcacacagcagttctttgtcccaggcagccaggttgttgttcaagctgccactggtgacatgccaacttaccagatccgagctcctactgctgctttgccacagggagtggtgatggctgcatcgcccggaagtttgcacagtccccagcagctggcagaagaagcaacacgcaaacgagagctgaggctaatgaaaaacagggaagctgccaaagaatgtcgacgtcgaaagaaagaatatgtaaaatgtctggagagccgagttgcagtgctggaagtccagaacaagaagcttatagaggaacttgaaaccttgaaagacatttgttctcccaaaacagattactagaaatatttaactatgaactgaaggcagcatgtatagttgcttttgaaggaatacaatatatagctggcaagaatggtggcttcttttctttgtatcattcatcttcttctttaatcacttaacattcctaaaatgcttcactgtacgtagttaagtcgtagctataacttcaaattttttaaaagagacaaactgtaaaaaatgtgtgtattcttaaaatgcaatatttgtaaggcttgttccaatgccacatacttgcagctcccattctatgtgtcatcaatagtgtcctatgcaataaaattatttgcaggtctttaaatcattttaggaaaggatgatcaaaaataatgcatccagcagtacaataaaagtaaaccacaaaaaaatacctcaggaaagaatagaaagaaagtctatctaatgacatgcctatatgagaagaatagcctagatatgaatatatggcatttgcagatttttatattagttgctttgttaaaaaaaaaaagattgtattgctgtccttgaatgccatagtcaaagagagtttttaatagaaccatgttggttgcactttgtagtgtttggtgctcatttaaatatctgaacatttactacagtttttaactctactgtgtaatataaaagatcttgcagaagt

SEQ ID NO: 6547 - protein, 138 aa, Homo sapiens; identical to SEQ ID NO: 6543

SEQ ID NO: 6548 - DNA, 1512 bp, Homo sapiens
ggaacattcttagccaccgaagtatgggcaccaaaagcgataaggagcatgtgttccttaataaatgtcacatcagaaaatgactgttccaggacagtaaccacctcccgatggtagcagcaattgcagagacagatgaatctgcagaatcagaaggtgtaattgattctcataaacgtagagaaatcctttcacgaagaccctcttataggaaaatactgaatgaactgtcctctgatgtgcctggtgttcccaagattgaagaagagagatcagaggaagaaggaacaccacctagtattgctaccatggcagtaccaactagcatatatcagactagcacggggcaatacattgctatagcccaaggtggaacaatccagatttctaacccaggatctgatggtgttcagggactgcaggcattaacaatgacaaattcaggagctcctccaccaggtgctacaattgtacagtacgcagcacaatcagctgatggcacacagcagttctttgtcccaggcagccaggttgttgttcaagctgccactggtgacatgccaacttaccagatccgagctcctactgctgctttgccacagggagtggtgatggctgcatcgcccggaagtttgcacagtccccagcagctggcagaagaagcaacacgcaaacgagagctgaggctaatgaaaaacagggaagctgccaaagaatgtcgacgtcgaaagaaagaatatgtaaaatgtctggagagccgagttgcagtgctggaagtccagaacaagaagcttatagaggaacttgaaaccttgaaagacatttgttctcccaaaacagattactagaaatatttaactatgaactgaaggcagcatgtatagttgcttttgaaggaatacaatatatagctggcaagaatggtggcttcttttctttgtatcattcatcttcttctttaatcacttaacattcctaaaatgcttcactgtacgtagttaagtcgtagctataacttcaaattttttaaaagagacaaactgtaaaaaatgtgtgtattcttaaaatgcaatatttgtaaggcttgttccaatgccacatacttgcagctcccattctatgtgtcatcaatagtgtcctatgcaataaaattatttgcaggtctttaaatcattttaggaaaggatgatcaaaaataatgcatccagcagtacaataaaagtaaaccacaaaaaaatacctcaggaaagaatagaaagaaagtctatctaatgacatgcctatatgagaagaatagcctagatatgaatatatggcatttgcagatttttatattagttgctttgttaaaaaaaaaaagattgtattgctgtccttgaatgccatagtcaaagagagtttttaatagaaccatgttggttgcactttgtagtgtttggtgctcatttaaatatctgaacatttactacagtttttaactctactgtgtaatataaaagatcttgcagaagt

SEQ ID NO: 6549 - protein, 245 aa, Homo sapiens; identical to SEQ ID NO: 686

SEQ ID NO: 6550 - DNA, 1763 bp, Homo sapiens
ggaacattcttagccaccgaagtatgggcaccaaaagcgataaggagcatgtgttccttaataaatgtcacatcagaaaatgactgttccaggacagtaaccacctcccgatgttgctatagcccaaggtggaacaatccagatttctaacccaggatctgatggtgttcagggactgcaggcattaacaatgacaaattcaggagctcctccaccaggtgctacaattgtacagtacgcagcacaatcagctgatggcacacagcagttctttgtcccaggcagccaggttgttgttcaagctgccactggtgacatgccaacttaccagatccgagctcctactgctgctttgccacagggagtggtgatggctgcatcgcccggaagtttgcacagtccccagcagctggcagaagaagcaacacgcaaacgagagctgaggctaatgaaaaacagggaagctgccaaagaatgtcgacgtcgaaagaaagaatatgtaaaatgtctggagagccgagttgcagtgctggaagtccagaacaagaagcttatagaggaacttgaaaccttgaaagacatttgttctcccaaaacagattactagaaatatttaactatgaactgaaggcagcatgtatagttgcttttgaaggaatacaatatatagctggcaagaatggtggcttcttttctttgtatcattcatcttcttctttaatcacttaacattcctaaaatgcttcactgtacgtagttaagtcgtagctataacttcaaattttttaaaagagacaaactgtaaaaaatgtgtgtattcttaaaatgcaatatttgtaaggcttgttccaatgccacatacttgcagctcccattctatgtgtcatcaatagtgtcctatgcaataaaattatttgcaggtctttaaatcattttaggaaaggatgatcaaaaataatgcatccagcagtacaataaaagtaaaccacaaaaaaatacctcaggaaagaatagaaagaaagtctatctaatgacatgcctatatgagaagaatagcctagatatgaatatatggcatttgcagatttttatattagttgctttgttaaaaaaaaaaagattgtattgctgtccttgaatgccatagtcaaagagagtttttaatagaaccatgttggttgcactttgtagtgtttggtgctcatttaaatatctgaacatttactacagtttttaactctactgtgtaatataaaagatcttgcagaagttcttagtgttggtttaatattacctaatgaaagtgatgacatattttttatatctggaatgagcctgttgggatcgcattgcataccttcggggtacaagtcagtttctacactgggtgctgatccttgcacgcgccctttctaccatctcacggtggggatggccgcagggctgtgcacccagaagaagatggctgttagcgtttcggccttcataatggcctgagactttctttctgtaggtggtctggagctgtccggctggtggccccctattttgccatttagcgaacaaccacaggaattttaaaaacaaaaacatcccaagattttttcatttcaaaatgcttcaaagtccacattagatcagatactccgctgtcggcacattcagctgaggttcattacaatcgagactgcaatgtgatctatgtttcatcttgtttttataataaaaagcttcagggaacaagcccaaagccctcaccacag

SEQ ID NO: 6551 - protein, 138 aa, Homo sapiens; identical to SEQ ID NO: 6543

SEQ ID NO: 6552 - DNA, 2004 bp, Homo sapiens
ggaacattcttagccaccgaagtatgggcaccaaaagcgataaggagcatgtgttccttaataaatgtcacatcagaaaatgactgttccaggacagtaaccacctcccgatggtagcagcaattgcagagacagatgaatctgcagaatcagaaggtgtaattgattctcataaacgtagagaaatcctttcacgaagaccctcttataggaaaatactgaatgaactgtcctctgatgtgcctggtgttcccaagattgaagaagagagatcagaggaagaaggaacaccacctagtattgctaccatggcagtaccaactagcatatatcagactagcacggggcaatacattgctatagcccaaggtggaacaatccagatttctaacccaggatctgatggtgttcagggactgcaggcattaacaatgacaaattcaggagctcctccaccaggtgctacaattgtacagtacgcagcacaatcagctgatggcacacagcagttctttgtcccaggcagccaggttgttgttcaagctgccactggtgacatgccaacttaccagatccgagctcctactgctgctttgccacagggagtggtgatggctgcatcgcccggaagtttgcacagtccccagcagctggcagaagaagcaacacgcaaacgagagctgaggctaatgaaaaacagggaagctgccaaagaatgtcgacgtcgaaagaaagaatatgtaaaatgtctggagagccgagttgcagtgctggaagtccagaacaagaagcttatagaggaacttgaaaccttgaaagacatttgttctcccaaaacagattactagaaatatttaactatgaactgaaggcagcatgtatagttgcttttgaaggaatacaatatatagctggcaagaatggtggcttcttttctttgtatcattcatcttcttctttaatcacttaacattcctaaaatgcttcactgtacgtagttaagtcgtagctataacttcaaattttttaaaagagacaaactgtaaaaaatgtgtgtattcttaaaatgcaatatttgtaaggcttgttccaatgccacatacttgcagctcccattctatgtgtcatcaatagtgtcctatgcaataaaattatttgcaggtctttaaatcattttaggaaaggatgatcaaaaataatgcatccagcagtacaataaaagtaaaccacaaaaaaatacctcaggaaagaatagaaagaaagtctatctaatgacatgcctatatgagaagaatagcctagatatgaatatatggcatttgcagatttttatattagttgctttgttaaaaaaaaaaagattgtattgctgtccttgaatgccatagtcaaagagagtttttaatagaaccatgttggttgcactttgtagtgtttggtgctcatttaaatatctgaacatttactacagtttttaactctactgtgtaatataaaagatcttgcagaagttcttagtgttggtttaatattacctaatgaaagtgatgacatattttttatatctggaatgagcctgttgggatcgcattgcataccttcggggtacaagtcagtttctacactgggtgctgatccttgcacgcgccctttctaccatctcacggtggggatggccgcagggctgtgcacccagaagaagatggctgttagcgtttcggccttcataatggcctgagactttctttctgtaggtggtctggagctgtccggctggtggccccctattttgccatttagcgaacaaccacaggaattttaaaaacaaaaacatcccaagattttttcatttcaaaatgcttcaaagtccacattagatcagatactccgctgtcggcacattcagctgaggttcattacaatcgagactgcaatgtgatctatgtttcatcttgtttttataataaaaagcttcagggaacaagcccaaagccctcaccacag

SEQ ID NO: 6553 - protein, 245 aa, Homo sapiens; identical to SEQ ID NO: 686

SEQ ID NO: 6554 - DNA, 1812 bp, Homo sapiens
acattcttagccaccgaagtatgggcaccaaaagcgataaggagcatgtgttccttaataaatgtcacatcagaaaatgactgttccaggacagtaaccacctcccgatggtagcagcaattgcagagacagatgaatctgcagaatcagaaggtgtaattgattctcataaacgtagagaaatcctttcacgaagaccctcttataggaaaatactgaatgaactgtcctctgatgtgcctggtgttcccaagattgaagaagagagatcagaggaagaaggaacaccacctagtattgctaccatggcagtaccaactagcatatatcagactagcacggggcaatacactgccactggtgacatgccaacttaccagatccgagctcctactgctgctttgccacagggagtggtgatggctgcatcgcccggaagtttgcacagtccccagcagctggcagaagaagcaacacgcaaacgagagctgaggctaatgaaaaacagggaagctgccaaagaatgtcgacgtcgaaagaaagaatatgtaaaatgtctggagagccgagttgcagtgctggaagtccagaacaagaagcttatagaggaacttgaaaccttgaaagacatttgttctcccaaaacagattactagaaatatttaactatgaactgaaggcagcatgtatagttgcttttgaaggaatacaatatatagctggcaagaatggtggcttcttttctttgtatcattcatcttcttctttaatcacttaacattcctaaaatgcttcactgtacgtagttaagtcgtagctataacttcaaattttttaaaagagacaaactgtaaaaaatgtgtgtattcttaaaatgcaatatttgtaaggcttgttccaatgccacatacttgcagctcccattctatgtgtcatcaatagtgtcctatgcaataaaattatttgcaggtctttaaatcattttaggaaaggatgatcaaaaataatgcatccagcagtacaataaaagtaaaccacaaaaaaatacctcaggaaagaatagaaagaaagtctatctaatgacatgcctatatgagaagaatagcctagatatgaatatatggcatttgcagatttttatattagttgctttgttaaaaaaaaaaagattgtattgctgtccttgaatgccatagtcaaagagagtttttaatagaaccatgttggttgcactttgtagtgtttggtgctcatttaaatatctgaacatttactacagtttttaactctactgtgtaatataaaagatcttgcagaagttcttagtgttggtttaatattacctaatgaaagtgatgacatattttttatatctggaatgagcctgttgggatcgcattgcataccttcggggtacaagtcagtttctacactgggtgctgatccttgcacgcgccctttctaccatctcacggtggggatggccgcagggctgtgcacccagaagaagatggctgttagcgtttcggccttcataatggcctgagactttctttctgtaggtggtctggagctgtccggctggtggccccctattttgccatttagcgaacaaccacaggaattttaaaaacaaaaacatcccaagattttttcatttcaaaatgcttcaaagtccacattagatcagatactccgctgtcggcacattcagctgaggttcattacaatcgagactgcaatgtgatctatgtttcatcttgtttttataataaaaagcttcagggaacaagcccaaagccctcaccacag

SEQ ID NO: 6555 - protein, 182 aa, Homo sapiens; identical to SEQ ID NO: 688

SEQ ID NO: 6556 - DNA, 616 bp, Homo sapiens
attcttagccaccgaagtatgggcaccaaaagcgataaggagcatgtgttccttaataaatgtcacatcagaaaatgactgttccaggacagtaaccacctcccgatggtagcagcaattgcagagacagatgaatctgcagaatcagaaggtgtaattgattctcataaacgtagagaaatcctttcacgaagaccctcttataggaaaatactgaatgaactgtcctctgatgtgcctggtgttcccaagattgaagaagagagatcagaggaagaaggaacaccacctagtattgctaccatggcagtaccaactagcatatatcagactagcacggggcaatacattgctatagcccaaggtggaacaatccagatttctaacccaggatctgatggtgttcagggactgcaggcattaacaatgacaaattcaggagctcctccaccaggtgctacaattgtacagtacgcagcacaatcagctgatggcacacagcagttctttgtcccagggagtggtgatggctgcatcgcccggaagtttgcacagtccccagcagctggcagaagaagcaacacgcaaacgagagctgaggctaatgaaaaacagg

SEQ ID NO: 6557 - protein, 169 aa, Homo sapiens
MVAAIAETDESAESEGVIDSHKRREILSRRPSYRKILNELSSDVPGVPKIEEERSEEEGTPPSIATMAVPTSIYQTSTGQYIAIAQGGTIQISNPGSDGVQGLQALTMTNSGAPPPGATIVQYAAQSADGTQQFFVPGSGDGCIARKFAQSPAAGRRSNTQTRAEANEK

SEQ ID NO: 6558 - DNA, 910 bp, Homo sapiens
accgaagtatgggcaccaaaagcgataaggagcatgtgttccttaataaatgtcacatcagaaaatgactgttccaggacagtaaccacctcccgatggtagcagcaattgcagagacagatgaatctgcagaatcagaaggtgtaattgattctcataaacgtagagaaatcctttcacgaagaccctcttataggaaaatactgaatgaactgtcctctgatgtgcctggtgttcccaagattgaagaagagagatcagaggaagaaggaacaccacctagtattgctaccatggcagtaccaactagcatatatcagactagcacggggcaatacagtatgtatgctgcaattcgatatgatacagtgctagctttaagtcttctctagttatattgaagcaactcaggttttggcattaaattgttccattttaaaatgcatcattaatacctaaactgtatcatagaatgaaagtatatgttaaaaagtgagatctttgtattgacagctgtcatataattttgaaaagtaaaaattttgactgccgaatatagaagaaaattttggggtaaaaaggagaatttttcctatttacatgtttatattaatctctagtaaaacattgtttttgttgtctttatgatgcatgcgaacataaatgtctgtatttcattcttgttggcttttgttacccacaattacatactattcttactaatctgagagttttctaaagtatgttttcaatgtttcactactctctactctgttaatttgtgctacagtttttcctaaaagagaatggaaaaatgatttaattttttaaactgtagcaattggatagataattttatttgaaattttacacactgaaagctctaaataaacagatacattcacattca

SEQ ID NO: 6559 - protein, 98 aa, Homo sapiens
MVAAIAETDESAESEGVIDSHKRREILSRRPSYRKILNELSSDVPGVPKIEEERSEEEGTPPSIATMAVPTSIYQTSTGQYSMYAAIRYDTVLALSLL

SEQ ID NO: 6560 - DNA, 4588 bp, Homo sapiens
atggtaggtatagggctgtggatatcgtcagtttgaccaagtattccaagaggccccatggagtttgtcatctgtaatagaggacgttagtgcattagtgatgaaaaaactgcttaccactgactattgtgatctcccagggagtataaggcagctccgcacttgaaatccatggcccaaaatgactctaccagtggagactctcttctgtgaagaagacgaccagataagaggttgggatgagcatgccactgcatcagatctctgccattccatcccaggatgccatctctgctagagtctacagaagtaagaccaaagaaaaggagagggaagaacagaatgagaagactttgggacatttcatgagtcattcaagcaacatttctaaggctgggagtcctccgtcagcatcagctccggctccggtgtcctccttctctcgcacttctatcacgccatccagccaggacatctgcagtgggagaagttgcagatgacgtccagcgagcgcaggaagatcatgtgctcagtgacattccacgtcattgccatcacatgtgtggtctggtccttgtatgtgctcattgaccgtactgctgaggagatcaagcaggggcaggcaacaggaatcctagaatggcccttttggactaaattggtggttgtggccatcggcttcaccggaggacttctttttatgtatgttcagtgtaaagtgtatgtgcaattgtggaagagactcaaggcctataatagagtgatctatgttcaaaactgtccagaaacaagcaaaaagaatatttttgaaaaatctccactaacagagcccaactttgaaaataaacatggatatggaatctgtcattccgacacaaactcttcttgttgcacagagcctgaagacactggagcagaaatcattcacgtctgattgtgtgcgggttgtcattttcctggacatccatgaagagctgaaggaaattgtttactgccaattgtatacctttcttatgtcctttaatagcatagactggacaggtgactatttatagtggcttctctttttctaaaccctccttagtctcctagaaaaccttcctgtgggccaggcatgcctgggtcctgcctctgcctggcagctctgtgggaaagtggaagaccccatgatgacatcatggggagccagcagagttcctgcccatggtcttgagctgaatgagagaataaaatgccaatcccaagggaagaggaggagcaggggtgcccaggccctgatacccagccgcctccagcttgcagtggtccccagcctggagcagagcattggggagtgtctagccatgacgagaagattccctctgcatcacggcgaaccccaggagatggtattgaaacagacccccaaacacagactcctgcctgccctctgccgatgctgcctcctccatgctcttgagcaggtggagccatggtgctctgtggtggcgcatgattcactgagcaaacagcactttacagaagaaaatctttattttgtaatatgtgtgtccagcgggattgacactcaaaaaaagtctcacttagaaatcttcccttccttacctttgtatctcctttacatcatgagagatcaaaaatccattttgccttacatatgctaagaagcgtggcattctttctgttcataaaacagactcatgacttttaagacaggacaagcaggccagaggctttttttttaatcacagatctcatgggaattagtggatgctaaatggcaattaaagcatgattcctatgcttttgagcctgttttatgacaaggtgttactttgtagacctggcccatacatttcttttttgtcaacactgaaaaagaacagtttctgagatcgaaatggaaggaaaggaagtgagtaatgacaacaaaactgaatatttaaaaaatattcctttatagttaaatctctccagttggtgttggcttcacattgaaagagcagccatgtgccaccctggccggggtgtgtgcactgcatgcaggttctcccttgcatgcaagatgggtgctggcccactgtgaggcttctgctcggggaagttctgtggagtcactaccagggccaagaggcaggtgggctggctctgggacgagggccaggtgtgagcaaactgccagggtccgctgtgccactgctccccggccacatgcccgcccagctgtcgccttaaccagactgaacagacaggatccttcagggcccttggccccactctcagtgcattctgtcatcagggattaccacctgtaccattttcataaaacaaaaccaaaatcactaccatcaaatggccttgtccctctaaaaagtctgcttaaaattctgtttttaaaacccagtttcctagttttccaggcaaatagttacctccgggaaagttgctgggggggcctgaagcacaatgtagcgcagatgcttcctttccaggccattctctcacccagcctgcacggaggagatgggagatgctgggggtcctgccctcagtctttttgggccttaggcgtttcgttcatcctgctaaggggatgaagcaaacacgaggtgattcctttgcctttcagagtggaagccctggagtttgttttgaaggccaggaggctgaaggatctctaagctacggtgtgggcttaatagcagcaggctttgtcctcctgtctcctccaagccagtgtctgattccttggcaacacaggtcttagtctgtggagtggctctgctgtggccttcctctggccgggcaggcactgtccagccatagccagctcctgagaataggtcagcctctcctttctgtctcccagggcacatccagcccgtgcctgtgttcactgtgccccgaagtgcaattacccataccccttctcagcctggggaccccaggcaaccacagactgtccactcaggggagctgaatcccaggtcagccctgccaatgtcccttaggaactgcccaggcaaggcccctggttttgtatacttgttcctgccacccagcagtagatgagtgtttcaggtgaagaccaggatagattttctaagtgtgaatccccacttcacatatggaaccccttatgctgaacttgaaaagcaccaagacttcctgtagacaagaaagtgcttaggtagggacagcccctgggcatcccacccaatgtagctggcaccccactatggcaaaggtgccttgataactgagccctgtatccctcccatgcccagccagattctcatgggaagccctctcccttcttttctgcctaacaccatctcatcgtttctggcctcactgtggacaatccacacacattcttctttcctctcctggcggggcacagagccacccccttgccttttcttttcttgaaggttctagttcagctcctgattcatcagacccttctagccccctgcatctagcagtgaagcatgaagcctggtggggatgtggtactcccatctggtgtggccaccagctctgccaatgttcctgtagccttggaaaacttgctctctcggttcttttgggtgctgtgtactccccagcttccccccttccccccccattttgcacctgggtttagtgaaaggatggcatttggttgacccatatagaaacccagaatgaggtctcagggccaggaggcctggtatttgtaggccagggaaggggaagaggcaagtggtctggggtatcaccagccagccctctctgatttggcctctactccccataagtcacagtaccataagcaggcttctggcctcagcaatttggtctttgtgcccaagtttattgtgagaatttcctgaaaactctataaaaggtctcttcctactgtaggcctctaatgtttctcccctttttgcttcagtccactcttcagtcttgtaggcctagttttcaaacctgcacatgtgtcctacctggccacaggcatgcaggcctcaggcagctgggccagtttgggagcctcgggtgatgtctgcacgatctggggctgcctctgcacccctgctgtgggcttcagggttggagaagggctgggaccaaccgggtgagatccacaagtctctggatgtggctgaaggcaaatacacaattgaagtactttctgttttgaagtgctttcccttttgaatctggtttgaaacatgcagcttctgtctctagcccaaggaaagaccaaaacatagggaaataaaagcatttatctttgtcttggaagtaattgttgaagttgtgcagttgatcagtgcacagttagatgcaatgtttatagaaattgattgttaaaccaaatttacactggcatgtgtggtgtagtttctaaaaggcacttcacatttgaaatttttcttaccttagaaagtttctagtgatctaaatgtctagttttgtattcttttgtgtgtgttcactgtttctcagtattaccacttgaataattctctgtacaggggggtttgtgctatacactgggatgtctaattgcagcaataaagcctttctttaaaaagga

SEQ ID NO: 6561 - protein, 145 aa, Homo sapiens [sequence omitted]

SEQ ID NO: 6562 - DNA, 1985 bp, Homo sapiens
atggtaggtatagggctgtggatatcgtcagtttgaccaagtattccaagaggccccatggagtttgtcatctgtaatagaggacgttagtgcattagtgatgaaaaaactgcttaccactgactattgtgatctcccagggagtataaggcagctccgcacttgaaatccatggcccaaaatgactctaccagtggagactctcttctgtgaagaagacgaccagataagaggttgggatgagcatgccactgcatcagatctctgccattccatcccaggatgccatctctgctagagtctacagaagtaagaccaaagaaaaggagagggaagaacagaatgagaagactttgggacatttcatgagtcattcaagcaacatttctaaggctgggagtcctccgtcagcatcagctccggctccggtgtcctccttctctcgcacttctatcacgccatccagccaggacatctgcaggatctgccactgtgaaggagatgatgagagccccctgatcaccccctgccactgcacaggaagcctccacttcgtgcaccaggcctgcctgcagcagtggatcaagagctccgacacgcgctgctgcgagctctgcaagtatgagttcatcatggagaccaagctgaagccactgagaaaatgggagaagttgcagatgacgtccagcgagcgcaggaagatcatgtgctcagtgacattccacgtcattgccatcacatgtgtggtctggtccttgtatgtgctcattgaccgtactgctgaggagatcaagcaggggcaggcaacaggaatcctagaatggcccttttggactaaattggtggttgtggccatcggcttcaccggaggacttctttttatgtatgttcagtgtaaagtgtatgtgcaattgtggaagagactcaaggcctataatagagtgatctatgttcaaaactgtccagaaacaagcaaaaagaatatttttgaaaaatctccactaacagagcccaactttgaaaataaacatggatatggaatctgtcattccgacacaaactcttcttgttgcacagagcctgaagacactggagcagaaatcattcacgtctgattgtgtgcgggttgtcattttcctggacatccatgaagagctgaaggaaattgtttactgccaattgtatacctttcttatgtcctttaatagcatagactggacaggtgactatttatagtggcttctctttttctaaaccctccttagtctcctagaaaaccttcctgtgggccaggcatgcctgggtcctgcctctgcctggcagctctgtgggaaagtggaagaccccatgatgacatcatggggagccagcagagttcctgcccatggtcttgagctgaatgagagaataaaatgccaatcccaagggaagaggaggagcaggggtgcccaggccctgatacccagccgcctccagcttgcagtggtccccagcctggagcagagcattggggagtgtctagccatgacgagaagattccctctgcatcacggcgaaccccaggagatggtattgaaacagacccccaaacacagactcctgcctgccctctgccgatgctgcctcctccatgctcttgagcaggtggagccatggtgctctgtggtggcgcatgattcactgagcaaacagcactttacagaagaaaatctttattttgtaatatgtgtgtccagcgggattgacactcaaaaaaagtctcacttagaaatcttcccttccttacctttgtatctcctttacatcatgagagatcaaaaatccattttgccttacatatgctaagaagcgtggcattctttctgttcataaaacagactcatgacttttaagacaggacaagcaggccagaggctttttttttaatcacagatctcatgggaattagtggatgctaaatggcaattaaagcatgattcctatgc

SEQ ID NO: 6563 - protein, 291 aa, Homo sapiens; identical to SEQ ID NO: 708

SEQ ID NO: 6564 - DNA, 1842 bp, Homo sapiens
atggtaggtatagggctgtggatatcgtcagtttgaccaagtattccaagaggccccatggagtttgtcatctgtaatagaggacgttagtgcattagtgatgaaaaaactgcttaccactgactattgtgatctcccagggagtataaggcagctccgcacttgaaatccatggcccaaaatgactctaccagtggagactctcttctgtgaagaagacgaccagataagaggttgggatgagcatgccactgcatcagatctctgccattccatcccaggatgccatctctgctagagtctacagaagtaagaccaaagaaaaggagagggaagaacagaatgagaagactttgggacatttcatgagtcattcaagcaacatttctaaggctgggagtcctccgtcagcatcagctccggctccggtgtcctccttctctcgcacttctatcacgccatccagccaggacatctgcaggatctgccactgtgaaggagatgatgagagccccctgatcaccccctgccactgcacaggaagcctccacttcgtgcaccaggcctgcctgcagcagtggatcaagagctccgacacgcgctgctgcgagctctgcaagtatgagttcatcatggagaccaagctgaagccactgagaaaatgggagaagttgcagatgacgtccagcgagcgcaggaagatcatgtgctcagtgacattccacgtcattgccatcacatgtgtggtctggtccttgtatgtgctcattgaccgtactgctgaggagatcaagcaggggcaggcaacaggaatcctagaatggcccttttggactaaattggtggttgtggccatcggcttcaccggaggacttctttttatgtatgttcagtgtaaagtgtatgtgcaattgtggaagagactcaaggcctataatagagtgatctatgttcaaaactgtccagaaacaagcaaaaagaatatttttgaaaaatctccactaacagagcccaactttgaaaataaacatggatatggaatctgtcattccgacacaaactcttcttgttgcacagagcctgaagacactggagcagaaatcattcacgtctgattgtgtgcgggttgtcattttcctggacatccatgaagagctgaaggaaattgtttactgccaattgtatacctttcttatgtcctttaatagcatagactggacaggtgactatttatagtggcttctctttttctaaaccctccttagtctcctagaaaaccttcctgtgggccaggcatgcctgggtcctgcctctgcctggcagctctgtgggaaagtggaagaccccatgatgacatcatggggagccagcagagttcctgcccatggtcttgagctgaatgagagaataaaatgccaatcccaagggaagaggaggagcaggggtgcccaggccctgatacccagccgcctccagcttgcagtggtccccagcctggagcagagcattggggagtgtctagccatgacgagaagattccctctgcatcacggcgaaccccaggagatggtattgaaacagacccccaaacacagactcctgcctgccctctgccgatgctgcctcctccatgctcttgagcaggtggagccatggtgctctgtggtggcgcatgattcactgagcaaacagcactttacagaagaaaatctttattttgtaatatgtgtgtccagcgggattgacactcaaaaaaagtctcacttagaaatcttcccttccttacctttgtatctcctttacatcatgagagatcaaaaatccattttgccttacatatgc

SEQ ID NO: 6565 - protein, 291 aa, Homo sapiens; identical to SEQ ID NO: 708

SEQ ID NO: 6566 - DNA, 767 bp, Homo sapiens
aagcaccacaggtagcttttggcatggtaggtatagggctgtggatatcgtcagtttgaccaagtattccaagaggccccatggagtttgtcatctgtaatagaggacgttagtgcattagtgatgaaaaaactgcttaccactgactattgtgatctcccagggagtataaggcagctccgcacttgaaatccatggcccaaaatgactctaccagtggagactctcttctgtgaagaagacgaccagataagaggttgggatgagcatgccactgcatcagatctctgccattccatcccaggatgccatctctgctagagtctacagaagtaagaccaaagaaaaggagagggaagaacagaatgagaagactttgggacatttcatgagtcattcaagcaacatttctaaggctgggagtcctccgtcagcatcagctccggctccggtgtcctccttctctcgcacttctatcacgccatccagccaggacatctgcagttccagtgcagtgttttctgagtgttgtcaccacagttccgtgcagtctgctgttgtctcgaaagctcctcactgccagagttctctgacacaagggctcactgtgacagttatctgtaaggacacattacaggcgtcaaagagaaattcctttggttcagaatgggcccaggccttgaagcctgctaagaataccaaagccagaagaacactaaagttctcaaggtccctcaatgatgtgggtgagaaggcgcaggatactt

SEQ ID NO: 6567 - protein, 167 aa, Homo sapiens
MSMPLHQISAIPSQDAISARVYRSKTKEKEREEQNEKTLGHFMSHSSNISKAGSPPSASAPAPVSSFSRTSITPSSQDICSSSAVFSECCHHSSVQSAVVSKAPHCQSSLTQGLTVTVICKDTLQASKRNSFGSEWAQALKPAKNTKARRTLKFSRSLNDVGEKAQD

SEQ ID NO: 6568 - DNA, 555 bp, Homo sapiens
gatatcgtcagtttgaccaagtattccaagaggccccatggagtttgtcatctgtaatagaggacgttagtgcattagtgatgaaaaaactgcttaccactgactattgtgatctcccagggagtataaggcagctccgcacttgaaatccatggcccaaaatgactctaccagtggagactctcttctgtgaagaagacgaccagataagaggttgggatgagcatgccactgcatcagatctctgccattccatcccaggatgccatctctgctagagtctacagaagtaagaccaaagaaaaggagagggaagaacagaatgagaagactttgggacatttcatgagtcattcaagcaacatttctaagtgtttctgattacactaccttgagctgtcacatctaaggtgacctgggcctggccacttggaacctgatcctgtgcaatatccccttggtcatgatgatctaggctcaacaccacatggaagctgccaaggcttggggcttgcaccctctgaagccatgacctgaactataccctggctgctt

SEQ ID NO: 6569 - protein, 53 aa, Homo sapiens
MSMPLHQISAIPSQDAISARVYRSKTKEKEREEQNEKTLGHFMSHSSNISKCF

SEQ ID NO: 6570 - DNA, 1230 bp, Homo sapiens
atgggagaaataaaactggcagtggttgaaactatttctgggaagtttgatgtaggaaaattggatttggtagacagtgatgaaagtgacagaggaataatgagagttttatgtggacaaaagatgaatgcagagtctggcccgtcagggccaggagacactaaacgacacacacagagctggggaagtcttttcggttccaagcccagtgggttgtcgcctgggcactgcgaaggggtggaagcacagaaaggccgcgcggcggcacccgctgcagcccgcccccagcgcgctgcagtcgccggggcaacgcctccacccaactcggccggacacgtgacgcccgcgtcacgtgacctgccactcggtgtcctcccgcggaggggcgtagggtgtaaacaggcgacgcgctgggggaggtgcggccttgctgcgtccacgtctcgggcatgctcgaggcgggccagggcggtagcgccgccagctcagagcccacctgaggtaactcctgcggcctctaggatcggagtcccccacgccgcgcgcagccgccgccgctggccgccaataagggcggccgagcccccggcccgggcagggggtgtggctgccggcagcgcgtcggctacaggtgggctgggctgggctgggctgggctgggctgggtgggggcggccgccaaggacccatccctgcgctgcgggcccggcgtggagcccgcggagaggcagcgcgactccaggcagtgggtctctctgccccggtgctcgcgtctgcccctggggccgggccgagcggaaccaggaatcgcagaaacggtcagcgcccagggctctaggccggccgccccgggtgccaggtgaattcctttccctgaccggctgtgagacgttggcccgtcagccgtcgtctttggcctgagtgtgcacatctgtaaaatggaagctcggactagtgatccgtgaggaccttccacgtctgacgtgtgatctcgagagacctgcgtacattcggggtgccagaaggaaagcatagttgctccgatacagaatgggaatgggagacttttgaggccaaccgaatgggttaggacatatctgaaaaacatgaaaacgctaaaaagcatgaaaactgaaggagtatacgaactcaagtcgttgagagtcatgaaataatgtgaacatgctcttgtgtgaaatcttgagaccctggagcaagagaattttggat

SEQ ID NO: 6571 - protein, 306 aa, Homo sapiens
MGEIKLAVVETISGKFDVGKLDLVDSDESDRGIMRVLCGQKMNAESGPSGPGDTKRHTQSWGSLFGSKPSGLSPGHCEGVEAQKGRAAAPAAARPQRAAVAGATPPPNSAGHVTPASRDLPLGVLPRRGVGCKQATRWGRCGLAASTSRACSRRARAVAPPAQSPPEVTPAASRIGVPHAARSRRRWPPIRAAEPPARAGGVAAGSASATGGLGWAGLGWAGWGRPPRTHPCAAGPAWSPRRGSATPGSGSLCPGARVCPWGRAERNQESQKRSAPRALGRPPRVPGEFLSLTGCETLARQPSSLA

SEQ ID NO: 6572 - DNA, 2798 bp, Homo sapiens
atctcttgatgtaatatggaaagtggagcattaacttacaaaagttcctacagacgatccacttaggaagatggcagagtacttggattccagtcgagttgaggtctgggagaagacctcctgcagcaaacaagttacatttttggtataccaagaaggagatcaattgaatttctttcctgcagtagataggggagatggcactttaacaccgttatctgactcttcaaagaaaatagattttcatttgcatgtcctacggagaaaaggagaacatcgtatgagtggtggttctatgtataattcagatacagatgaggatgaagaaactgagccttcttcttctgggcaacagataattgaaaattcaataactatgaataagatgaagctgctgaaggctaagatgaagaacatgaatctcagcaaaaagcctaagaaagctgtcaagataaaacctcacccacctgtagctcctcgaccttctagtggttccactgcaccatctcgccaccgattgttaagggtcctccccaacattggtcaatcttgttcacctgcttttgggaatgcatatccgcccgaaatctccaggaatggaatttcaagtttggcaactcaactctctgctgagagatacatatcttctatcactggtgaatttcttaaggaagataatagctgggagaataacacactgtctcacttcagtagcaacgtcaaactacctcctcagataccccatttggagttgggaaatgaccaggagcttgctgactctgttctccatcttggatcatccctgcctaggcaaacaaaacattttttaggaaacttgccatctagtaatgggaacattgtcttaccttcagaagaatgtgtaaccgaacaatcacttctacctaaagtgggctcactggcttcatttgcagaaggaaatgctgatgaacagagcagcggcttagaaggtgcgtgcaaagtgaatctggagttgctactcactaatgctgacaaagggttgaaagctccagagcagcatctcaagcatgttgcaggagtgctgaatggggaatcagtagagacttcagttcttaactaccgggaattaagtcctcacaagaatagactcttgtcacctcttcgctgttctgcaccaatgtcgctacataattctctggtgaaaccagagagacagtccaaatgttttgagtttgggaagctacagccttcttcttctcagtcactggatgttcaaaacataactgattcttctttctctaggactacttgctttcaaggtgttaaagttgattcacttgggaaaagatctgatgttatttccaaagttgaggctcgggatatcacagaaatgactaacaaggcttccaaagagcctgttggttgtgtaaataatatcagttttcttgcctcactggccgggagcacaagcagaaatagattacagagcacacgtggggcaggcaggcttcagaactctggaactgggctgtctacaaacctccagcattttcaggaagaaaactttaggaaaagttctccccagttagaacatacaggagtttttttgtctacccatggtgttggaatgaatggaaataatgcagcagcagggaaaagcgtaggagaatgtactactcatcacctcccacctgtgaaagcccctcttcagacaaagaagaaaacaacaaatcattgttttctttgtggaaagaaaacaggactggctagtagctacgaatgcagatgtggaaacaacttctgtgcatctcatcgttatgcagaaactcatggctgtacctatgattacaagagtgcagggaggagatacttgcacgaggcaaatcctgtggttaatgcaccaaagcttccaaaaatctaactcttcctctacatcttactgttctgcccgggattcgtattataatgacagaagaaatgttgtttagactattatttttgttcgactctaaaagatttgccaaataacaaaagcatacaatgcatactgttggagaacaagaatgctactgtattttacatctttatttcttggtgaaacaaaagttttaaaagtagttttaacaactttacactggaatgatttagctttgttattgcatgtcttgtgttaagtgttttgtatatgatattgcagttttactaggcaaatcttcaaaagatgcactttaggaaacgaaatatttcctaaataaccaggcttccacattgtacagaatgagcagtcatgtaatgaatggctctactcagattgaccatatgggttttttctttttctttcttttattcttctccttctttttttttcagaggtgggatgggtggagattttttaaaaatcccacgtgtgaaagtttactggctttattagcaagttcctttttacttcaagctactttttataaaaaagaacatttttccagtgtggtttttaacagataatacatttcttccacattcagattagtattcggacatgaatccattctataaaacacatcgtgttcatgatagtgtatattttactactttttgaatgttaattttaaaatagaagatgtcccacttgccattaaatatagaagccaactttttaccttttgaaatatggctacatttaaaacaaaatctcacagctcggtttttcttatttgttgagtgctattaccaggagaaattcaaataaatattcaatttcattatgaatttcattatttatttataatagtttttcttttataaataatttttcttttata

SEQ ID NO: 6573 - protein, 609 aa, Homo sapiens
MAEYLDSSRVEVWEKTSCSKQVTFLVYQEGDQLNFFPAVDRGDGTLTPLSDSSKKIDFHLHVLRRKGEHRMSGGSMYNSDTDEDEETEPSSSGQQIIENSITMNKMKLLKAKMKNMNLSKKPKKAVKIKPHPPVAPRPSSGSTAPSRHRLLRVLPNIGQSCSPAFGNAYPPEISRNGISSLATQLSAERYISSITGEFLKEDNSWENNTLSHFSSNVKLPPQIPHLELGNDQELADSVLHLGSSLPRQTKHFLGNLPSSNGNIVLPSEECVTEQSLLPKVGSLASFAEGNADEQSSGLEGACKVNLELLLTNADKGLKAPEQHLKHVAGVLNGESVETSVLNYRELSPHKNRLLSPLRCSAPMSLHNSLVKPERQSKCFEFGKLQPSSSQSLDVQNITDSSFSRTTCFQGVKVDSLGKRSDVISKVEARDITEMTNKASKEPVGCVNNISFLASLAGSTSRNRLQSTRGAGRLQNSGTGLSTNLQHFQEENFRKSSPQLEHTGVFLSTHGVGMNGNNAAAGKSVGECTTHHLPPVKAPLQTKKKTTNHCFLCGKKTGLASSYECRCGNNFCASHRYAETHGCTYDYKSAGRRYLHEANPVVNAPKLPKI

SEQ ID NO: 6574 - DNA, 2126 bp, Homo sapiens
gtgaagttgctcgccgggtcgttgggccctgtcgacctgtaggcgggcgagcgagccaacgccggccgctgctgcccggggaccggagcggcgggccgcctttgcccaggacacacgctctggcgtttgttcctttgggcgtgacgccagcttcaacgggtacgcggctttcccgacgggtgctgatctccgagtcgctgttgtcacgcggactgctgtcctccagattcaggccggtgggtctggggagcccggattggtcttggaggagcaacggctgcgcaggtacaaaactcaaaacatgaacaacaatatatattaccaatcttcaaacctggtttgcctagaactggaatacagttgcctgcgacatattttagaagaactagaaaagtcaaagtaatggataacagaaaagagcctccattcttcaatgatgataacatgggaccattttactacagacttcatttctgtgataccatggagctcttcattgaaacattaactggaacatgttttgagctgagagtttcaccttttgaaactgttatttctgtgaaagcaaaaattcgaagattggaaggtattcccatctgtcgacaacacttaatttggaataacatggaacttgaaaatgattattgcttgaatgattacaacatttcagaagggtgtaccttgaagctagttttggctatgcgtggcggacctataaatactagaagagttcctacagacgatccacttaggaagatggcagagtacttggattccagtcgagttgaggtctgggagaagacctcctgcagcaaacaagttacatttttggtataccaagaaggagatcaattgaatttctttcctgcagtagataggggagatggcactttaacaccgttatctgactcttcaaagaaaatagattttcatttgcatgtcctacggagaaaaggagaacatcgtatgaggagaatgtactactcatcacctcccacctgtgaaagcccctcttcagacaaagaagaaaacaacaaatcattgttttctttgtggaaagaaaacaggactggctagtagctacgaatgcagatgtggaaacaacttctgtgcatctcatcgttatgcagaaactcatggctgtacctatgattacaagagtgcagggaggagatacttgcacgaggcaaatcctgtggttaatgcaccaaagcttccaaaaatctaactcttcctctacatcttactgttctgcccgggattcgtattataatgacagaagaaatgttgtttagactattatttttgttcgactctaaaagatttgccaaataacaaaagcatacaatgcatactgttggagaacaagaatgctactgtattttacatctttatttcttggtgaaacaaaagttttaaaagtagttttaacaactttacactggaatgatttagctttgttattgcatgtcttgtgttaagtgttttgtatatgatattgcagttttactaggcaaatcttcaaaagatgcactttaggaaacgaaatatttcctaaataaccaggcttccacattgtacagaatgagcagtcatgtaatgaatggctctactcagattgaccatatgggttttttctttttctttcttttattcttctccttctttttttttcagaggtgggatgggtggagattttttaaaaatcccacgtgtgaaagtttactggctttattagcaagttcctttttacttcaagctactttttataaaaaagaacatttttccagtgtggtttttaacagataatacatttcttccacattcagattagtattcggacatgaatccattctataaaacacatcgtgttcatgatagtgtatattttactactttttgaatgttaattttaaaatagaagatgtcccacttgccattaaatatagaagccaactttttaccttttgaaatatggctacatttaaaacaaaatctcacagctcggtttttcttatttgttgagtgctattaccaggagaaattcaaataaatattcaatttcattatgaatttcattatttatttataatagtttttcttttataaataatttttcttttata

SEQ ID NO: 6575 - protein, 224 aa, Homo sapiens
MDNRKEPPFFNDDNMGPFYYRLHFCDTMELFIETLTGTCFELRVSPFETVISVKAKIRRLEGIPICRQHLIWNNMELENDYCLNDYNISEGCTLKLVLAMRGGPINTRRVPTDDPLRKMAEYLDSSRVEVWEKTSCSKQVTFLVYQEGDQLNFFPAVDRGDGTLTPLSDSSKKIDFHLHVLRRKGEHRMRRMYYSSPPTCESPSSDKEENNKSLFSLWKENRTG

SEQ ID NO: 6576 - DNA, 2743 bp, Homo sapiens
atctcttgatgtaatatggaaagtggagcattaacttacaaaagttcctacagacgatccacttaggaagatggcagagtacttggattccagtcgagttgaggtctgggagaagacctcctgcagcaaacaagttacatttttggtataccaagaaggagatcaattgaatttctttcctgcagtagataggggagatggcactttaacaccgttatctgactcttcaaagaaaatagattttcatttgcatgtcctacggagaaaaggagaacatcgtatgagtggtggttctatgtataattcagatacagatgaggatgaagaaactgagccttcttcttctgggcaacagataattgaaaattcaataactatgaataagatgaagctgctgaaggctaagatgaagaacatgaatctcagcaaaaagcctaagaaagctgtcaagataaaacctcacccacctgtagctcctcgaccttctagtggttccactgcaccatctcgccaccgattgttaagggtcctccccaacattggtcaatcttgttcacctgcttttgggaatgcatatccgcccgaaatctccaggaatggaatttcaagtttggcaactcaactctctgctgagagatacatatcttctatcactggtgaatttcttaaggaagataatagctgggagaataacacactgtctcacttcagtagcaacgtcaaactacctcctcagataccccatttggagttgggaaatgaccaggagcttgctgactctgttctccatcttggatcatccctgcctaggcaaacaaaacattttttaggaaacttgccatctagtaatgggaacattgtcttaccttcagaagaatgtgtaaccgaacaatcacttctacctaaagtgggctcactggcttcatttgcagaaggaaatgctgatgaacagagcagcggcttagaaggtgcgtgcaaagtgaatctggagttgctactcactaatgctgacaaagggttgaaagctccagagcagcatctcaagcatgttgcaggagtgctgaatggggaatcagtagagacttcagttcttaactaccgggaattaagtcctcacaagaatagactcttgtcacctcttcgctgttctgcaccaatgtcgctacataattctctggtgaaaccagagagacagtccaaatgttttgagtttgggaagctacagccttcttcttctcagtcactggatgttcaaaacataactgattcttctttctctaggactacttgctttcaaggtgttaaagttgattcacttgggaaaagatctgatgttatttccaaagttgaggctcgggatatcacagaaatgactaacaaggcttccaaagagcctgttggttgtgtaaataatatcagttttcttgcctcactggccgggagcacaagcagaaatagattacagagcacacgtggggcaggcaggcttcagaactctggaactgggctgtctacaaacctccagcattttcaggaagaaaactttaggaaaagttctccccagttagaacatacaggagtttttttgtctacccatggtgttggaatgaatggaaataatgcagcagcagggaaaagcgtaggagaatgtactactcatcacctcccacctgtgaaagcccctcttcagacaaagaagaaaacaacaaatcattgttttctttgtggaaagaaaacaggactggctagtagctacgaatgcagatgtggaaacaacttctgtgcatctcatcgttatgcagaaactcatggctgtacctatgattacaagagtgcagggaggagatacttgcacgaggcaaatcctgtggttaatgcaccaaagcttccaaaaatctaactcttcctctacatcttactgttctgcccgggattcgtattataatgacagaagaaatgttgtttagactattatttttgttcgactctaaaagatttgccaaataacaaaagcatacaatgcatactgttggagaacaagaatgctactgtattttacatctttatttcttggtgaaacaaaagttttaaaagtagttttaacaactttacactggaatgatttagctttgttattgcatgtcttgtgttaagtgttttgtatatgatattgcagttttactaggcaaatcttcaaaagatgcactttaggaaacgaaatatttcctaaataaccaggcttccacattgtacagaatgagcagtcatgtaatgaatggctctactcagattgaccatatgggttttttctttttctttcttttattcttctccttctttttttttcagaggtgggatgggtggagattttttaaaaatcccacgtgtgaaagtttactggctttattagcaagttcctttttacttcaagctactttttataaaaaagaacatttttccagtgtggtttttaacagataatacatttcttccacattcagattagtattcggacatgaatccattctataaaacacatcgtgttcatgatagtgtatattttactactttttgaatgttaattttaaaatagaagatgtcccacttgccattaaatatagaagccaactttttaccttttgaaatatggctacatttaaaacaaaatctcacagctcggtttttcttatttgttgagtgctattaccaggagaaattcaaataaatattcaatttcattatg

SEQ ID NO: 6577 - protein, 609 aa, Homo sapiens; identical to SEQ ID NO: 6573

SEQ ID NO: 6578 - DNA, 3252 bp, Homo sapiens
gcgcaggtacaaaactcaaaacatgaacaacaatatatattaccaatcttcaaacctggtttgcctagaactggaatacagttgcctgcgacatattttagaagaactagaaaagtcaaagtaatggataacagaaaagagcctccattcttcaatgatgataacatgggaccattttactacagacttcatttctgtgataccatggagctcttcattgaaacattaactggaacatgttttgagctgagagtttcaccttttgaaactgttatttctgtgaaagcaaaaattcgaagattggaagacccaggagatcctactgaagtgagtggctggccgagtccagtgaccacatcagcacattcagtaatgactcttgaagcttttgtctgccctaaatgatttggtattcccatctgtcgacaacacttaatttggaataacatggaacttgaaaatgattattgcttgaatgattacaacatttcagaagggtgtaccttgaagctagttttggctatgcgtggcggacctataaatactagaagagttcctacagacgatccacttaggaagatggcagagtacttggattccagtcgagttgaggtctgggagaagacctcctgcagcaaacaagttacatttttggtataccaagaaggagatcaattgaatttctttcctgcagtagataggggagatggcactttaacaccgttatctgactcttcaaagaaaatagattttcatttgcatgtcctacggagaaaaggagaacatcgtatgagtggtggttctatgtataattcagatacagatgaggatgaagaaactgagccttcttcttctgggcaacagataattgaaaattcaataactatgaataagatgaagctgctgaaggctaagatgaagaacatgaatctcagcaaaaagcctaagaaagctgtcaagataaaacctcacccacctgtagctcctcgaccttctagtggttccactgcaccatctcgccaccgattgttaagggtcctccccaacattggtcaatcttgttcacctgcttttgggaatgcatatccgcccgaaatctccaggaatggaatttcaagtttggcaactcaactctctgctgagagatacatatcttctatcactggtgaatttcttaaggaagataatagctgggagaataacacactgtctcacttcagtagcaacgtcaaactacctcctcagataccccatttggagttgggaaatgaccaggagcttgctgactctgttctccatcttggatcatccctgcctaggcaaacaaaacattttttaggaaacttgccatctagtaatgggaacattgtcttaccttcagaagaatgtgtaaccgaacaatcacttctacctaaagtgggctcactggcttcatttgcagaaggaaatgctgatgaacagagcagcggcttagaaggtgcgtgcaaagtgaatctggagttgctactcactaatgctgacaaagggttgaaagctccagagcagcatctcaagcatgttgcaggagtgctgaatggggaatcagtagagacttcagttcttaactaccgggaattaagtcctcacaagaatagactcttgtcacctcttcgctgttctgcaccaatgtcgctacataattctctggtgaaaccagagagacagtccaaatgttttgagtttgggaagctacagccttcttcttctcagtcactggatgttcaaaacataactgattcttctttctctaggactacttgctttcaaggtgttaaagttgattcacttgggaaaagatctgatgttatttccaaagttgaggctcgggatatcacagaaatgactaacaaggcttccaaagagcctgttggttgtgtaaataatatcagttttcttgcctcactggccgggagcacaagcagaaatagattacagagcacacgtggggcaggcaggcttcagaactctggaactgggctgtctacaaacctccagcattttcaggaagaaaactttaggaaaagttctccccagttagaacatacaggagtttttttgtctacccatggtgttggaatgaatggaaataatgcagcagcagggaaaagcgtaggagaatgtactactcatcacctcccacctgtgaaagcccctcttcagacaaagaagaaaacaacaaatcattgttttctttgtggaaagaaaacaggactggctagtagctacgaatgcagatgtggaaacaacttctgtgcatctcatcgttatgcagaaactcatggctgtacctatgattacaagagtgcagggaggagatacttgcacgaggcaaatcctgtggttaatgcaccaaagcttccaaaaatctaactcttcctctacatcttactgttctgcccgggattcgtattataatgacagaagaaatgttgtttagactattatttttgttcgactctaaaagatttgccaaataacaaaagcatacaatgcatactgttggagaacaagaatgctactgtattttacatctttatttcttggtgaaacaaaagttttaaaagtagttttaacaactttacactggaatgatttagctttgttattgcatgtcttgtgttaagtgttttgtatatgatattgcagttttactaggcaaatcttcaaaagatgcactttaggaaacgaaatatttcctaaataaccaggcttccacattgtacagaatgagcagtcatgtaatgaatggctctactcagattgaccatatgggttttttctttttctttcttttattcttctccttctttttttttcagaggtgggatgggtggagattttttaaaaatcccacgtgtgaaagtttactggctttattagcaagttcctttttacttcaagctactttttataaaaaagaacatttttccagtgtggtttttaacagataatacatttcttccacattcagattagtattcggacatgaatccattctataaaacacatcgtgttcatgatagtgtatattttactactttttgaatgttaattttaaaatagaagatgtcccacttgccattaaatatagaagccaactttttaccttttgaaatatggctacatttaaaacaaaatctcacagctcggtttttcttatttgttgagtgctattaccaggagaaattcaaataaatattcaatttcattatg

SEQ ID NO: 6579 - protein, 653 aa, Homo sapiens
MELENDYCLNDYNISEGCTLKLVLAMRGGPINTRRVPTDDPLRKMAEYLDSSRVEVWEKTSCSKQVTFLVYQEGDQLNFFPAVDRGDGTLTPLSDSSKKIDFHLHVLRRKGEHRMSGGSMYNSDTDEDEETEPSSSGQQIIENSITMNKMKLLKAKMKNMNLSKKPKKAVKIKPHPPVAPRPSSGSTAPSRHRLLRVLPNIGQSCSPAFGNAYPPEISRNGISSLATQLSAERYISSITGEFLKEDNSWENNTLSHFSSNVKLPPQIPHLELGNDQELADSVLHLGSSLPRQTKHFLGNLPSSNGNIVLPSEECVTEQSLLPKVGSLASFAEGNADEQSSGLEGACKVNLELLLTNADKGLKAPEQHLKHVAGVLNGESVETSVLNYRELSPHKNRLLSPLRCSAPMSLHNSLVKPERQSKCFEFGKLQPSSSQSLDVQNITDSSFSRTTCFQGVKVDSLGKRSDVISKVEARDITEMTNKASKEPVGCVNNISFLASLAGSTSRNRLQSTRGAGRLQNSGTGLSTNLQHFQEENFRKSSPQLEHTGVFLSTHGVGMNGNNAAAGKSVGECTTHHLPPVKAPLQTKKKTTNHCFLCGKKTGLASSYECRCGNNFCASHRYAETHGCTYDYKSAGRRYLHEANPVVNAPKLPKI

SEQ ID NO: 6580 - DNA, 3323 bp, Homo sapiens
tgaagttgctcgccgggtcgttgggccctgtcgacctgtaggcgggcgagcgagccagcggacaagactgcgggtgctgatctccgagtcgctgttgtcacgcggactgctgtcctccagattcaggccggtgggtctggggagcccggattggtcttggaggagcaacggctgcgcaggtacaaaactcaaaacatgaacaacaatatatattaccaatcttcaaacctggtttgcctagaactggaatacagttgcctgcgacatattttagaagaactagaaaagtcaaagtaatggataacagaaaagagcctccattcttcaatgatgataacatgggaccattttactacagacttcatttctgtgataccatggagctcttcattgaaacattaactggaacatgttttgagctgagagtttcaccttttgaaactgttatttctgtgaaagcaaaaattcgaagattggaaggtattcccatctgtcgacaacacttaatttggaataacatggaacttgaaaatgattattgcttgaatgattacaacatttcagaagggtgtaccttgaagctagttttggctatgcgtggcggacctataaatactagaagagttcctacagacgatccacttaggaagatggcagagtacttggattccagtcgagttgaggtctgggagaagacctcctgcagcaaacaagttacatttttggtataccaagaaggagatcaattgaatttctttcctgcagtagataggggagatggcactttaacaccgttatctgactcttcaaagaaaatagattttcatttgcatgtcctacggagaaaaggagaacatcgtatgagtggtggttctatgtataattcagatacagatgaggatgaagaaactgagccttcttcttctgggcaacagataattgaaaattcaataactatgaataagatgaagctgctgaaggctaagatgaagaacatgaatctcagcaaaaagcctaagaaagctgtcaagataaaacctcacccacctgtagctcctcgaccttctagtggttccactgcaccatctcgccaccgattgttaagggtcctccccaacattggtcaatcttgttcacctgcttttgggaatgcatatccgcccgaaatctccaggaatggaatttcaagtttggcaactcaactctctgctgagagatacatatcttctatcactggtgaatttcttaaggaagataatagctgggagaataacacactgtctcacttcagtagcaacgtcaaactacctcctcagataccccatttggagttgggaaatgaccaggagcttgctgactctgttctccatcttggatcatccctgcctaggcaaacaaaacattttttaggaaacttgccatctagtaatgggaacattgtcttaccttcagaagaatgtgtaaccgaacaatcacttctacctaaagtgggctcactggcttcatttgcagaaggaaatgctgatgaacagagcagcggcttagaaggtgcgtgcaaagtgaatctggagttgctactcactaatgctgacaaagggttgaaagctccagagcagcatctcaagcatgttgcaggagtgctgaatggggaatcagtagagacttcagttcttaactaccgggaattaagtcctcacaagaatagactcttgtcacctcttcgctgttctgcaccaatgtcgctacataattctctggtgaaaccagagagacagtccaaatgttttgagtttgggaagctacagccttcttcttctcagtcactggatgttcaaaacataactgattcttctttctctaggactacttgctttcaaggtgttaaagttgattcacttgggaaaagatctgatgttatttccaaagttgaggctcgggatatcacagaaatgactaacaaggcttccaaagagcctgttggttgtgtaaataatatcagttttcttgcctcactggccgggagcacaagcagaaatagattacagagcacacgtggggcaggcaggcttcagaactctggaactgggctgtctacaaacctccagcattttcaggaagaaaactttaggaaaagttctccccagttagaacatacaggagtttttttgtctacccatggtgttggaatgaatggaaataatgcagcagcagggaaaagcgtaggagaatgtactactcatcacctcccacctgtgaaagcccctcttcagacaaagaagaaaacaacaaatcattgttttctttgtggaaagaaaacaggactggctagtagctacgaatgcagatgtggaaacaacttctgtgcatctcatcgttatgcagaaactcatggctgtacctatgattacaagagtgcagggaggagatacttgcacgaggcaaatcctgtggttaatgcaccaaagcttccaaaaatctaactcttcctctacatcttactgttctgcccgggattcgtattataatgacagaagaaatgttgtttagactattatttttgttcgactctaaaagatttgccaaataacaaaagcatacaatgcatactgttggagaacaagaatgctactgtattttacatctttatttcttggtgaaacaaaagttttaaaagtagttttaacaactttacactggaatgatttagctttgttattgcatgtcttgtgttaagtgttttgtatatgatattgcagttttactaggcaaatcttcaaaagatgcactttaggaaacgaaatatttcctaaataaccaggcttccacattgtacagaatgagcagtcatgtaatgaatggctctactcagattgaccatatgggttttttctttttctttcttttattcttctccttctttttttttcagaggtgggatgggtggagattttttaaaaatcccacgtgtgaaagtttactggctttattagcaagttcctttttacttcaagctactttttataaaaaagaacatttttccagtgtggtttttaacagataatacatttcttccacattcagattagtattcggacatgaatccattctataaaacacatcgtgttcatgatagtgtatattttactactttttgaatgttaattttaaaatagaagatgtcccacttgccattaaatatagaagccaactttttaccttttgaaatatggctacatttaaaacaaaatctcacagctcggtttttcttatttgttgagtgctattaccaggagaaattcaaataaatattcaatttcattatg

SEQ ID NO: 6581 - protein, 727 aa, Homo sapiens
MDNRKEPPFFNDDNMGPFYYRLHFCDTMELFIETLTGTCFELRVSPFETVISVKAKIRRLEGIPICRQHLIWNNMELENDYCLNDYNISEGCTLKLVLAMRGGPINTRRVPTDDPLRKMAEYLDSSRVEVWEKTSCSKQVTFLVYQEGDQLNFFPAVDRGDGTLTPLSDSSKKIDFHLHVLRRKGEHRMSGGSMYNSDTDEDEETEPSSSGQQIIENSITMNKMKLLKAKMKNMNLSKKPKKAVKIKPHPPVAPRPSSGSTAPSRHRLLRVLPNIGQSCSPAFGNAYPPEISRNGISSLATQLSAERYISSITGEFLKEDNSWENNTLSHFSSNVKLPPQIPHLELGNDQELADSVLHLGSSLPRQTKHFLGNLPSSNGNIVLPSEECVTEQSLLPKVGSLASFAEGNADEQSSGLEGACKVNLELLLTNADKGLKAPEQHLKHVAGVLNGESVETSVLNYRELSPHKNRLLSPLRCSAPMSLHNSLVKPERQSKCFEFGKLQPSSSQSLDVQNITDSSFSRTTCFQGVKVDSLGKRSDVISKVEARDITEMTNKASKEPVGCVNNISFLASLAGSTSRNRLQSTRGAGRLQNSGTGLSTNLQHFQEENFRKSSPQLEHTGVFLSTHGVGMNGNNAAAGKSVGECTTHHLPPVKAPLQTKKKTTNHCFLCGKKTGLASSYECRCGNNFCASHRYAETHGCTYDYKSAGRRYLHEANPVVNAPKLPKI

SEQ ID NO: 6582 - DNA, 2071 bp, Homo sapiens
gtgaagttgctcgccgggtcgttgggccctgtcgacctgtaggcgggcgagcgagccaacgccggccgctgctgcccggggaccggagcggcgggccgcctttgcccaggacacacgctctggcgtttgttcctttgggcgtgacgccagcttcaacgggtacgcggctttcccgacgggtgctgatctccgagtcgctgttgtcacgcggactgctgtcctccagattcaggccggtgggtctggggagcccggattggtcttggaggagcaacggctgcgcaggtacaaaactcaaaacatgaacaacaatatatattaccaatcttcaaacctggtttgcctagaactggaatacagttgcctgcgacatattttagaagaactagaaaagtcaaagtaatggataacagaaaagagcctccattcttcaatgatgataacatgggaccattttactacagacttcatttctgtgataccatggagctcttcattgaaacattaactggaacatgttttgagctgagagtttcaccttttgaaactgttatttctgtgaaagcaaaaattcgaagattggaaggtattcccatctgtcgacaacacttaatttggaataacatggaacttgaaaatgattattgcttgaatgattacaacatttcagaagggtgtaccttgaagctagttttggctatgcgtggcggacctataaatactagaagagttcctacagacgatccacttaggaagatggcagagtacttggattccagtcgagttgaggtctgggagaagacctcctgcagcaaacaagttacatttttggtataccaagaaggagatcaattgaatttctttcctgcagtagataggggagatggcactttaacaccgttatctgactcttcaaagaaaatagattttcatttgcatgtcctacggagaaaaggagaacatcgtatgaggagaatgtactactcatcacctcccacctgtgaaagcccctcttcagacaaagaagaaaacaacaaatcattgttttctttgtggaaagaaaacaggactggctagtagctacgaatgcagatgtggaaacaacttctgtgcatctcatcgttatgcagaaactcatggctgtacctatgattacaagagtgcagggaggagatacttgcacgaggcaaatcctgtggttaatgcaccaaagcttccaaaaatctaactcttcctctacatcttactgttctgcccgggattcgtattataatgacagaagaaatgttgtttagactattatttttgttcgactctaaaagatttgccaaataacaaaagcatacaatgcatactgttggagaacaagaatgctactgtattttacatctttatttcttggtgaaacaaaagttttaaaagtagttttaacaactttacactggaatgatttagctttgttattgcatgtcttgtgttaagtgttttgtatatgatattgcagttttactaggcaaatcttcaaaagatgcactttaggaaacgaaatatttcctaaataaccaggcttccacattgtacagaatgagcagtcatgtaatgaatggctctactcagattgaccatatgggttttttctttttctttcttttattcttctccttctttttttttcagaggtgggatgggtggagattttttaaaaatcccacgtgtgaaagtttactggctttattagcaagttcctttttacttcaagctactttttataaaaaagaacatttttccagtgtggtttttaacagataatacatttcttccacattcagattagtattcggacatgaatccattctataaaacacatcgtgttcatgatagtgtatattttactactttttgaatgttaattttaaaatagaagatgtcccacttgccattaaatatagaagccaactttttaccttttgaaatatggctacatttaaaacaaaatctcacagctcggtttttcttatttgttgagtgctattaccaggagaaattcaaataaatattcaatttcattatg

SEQ ID NO: 6583 - protein, 224 aa, Homo sapiens; identical to SEQ ID NO: 6575

SEQ ID NO: 6584 - DNA, 3279 bp, Homo sapiens
aggtggtgtcacaaaggggcggggcgcggcggcagcggagcgttgtcggccagtgccttccgtgaagttgctcgccgggtcgttgggccctgtcgacctgtaggcgggcgagcgagccagcggacaagactgcgggtacaaaactcaaaacatgaacaacaatatatattaccaatcttcaaacctggtttgcctagaactggaatacagttgcctgcgacatattttagaagaactagaaaagtcaaagtaatggataacagaaaagagcctccattcttcaatgatgataacatgggaccattttactacagacttcatttctgtgataccatggagctcttcattgaaacattaactggaacatgttttgagctgagagtttcaccttttgaaactgttatttctgtgaaagcaaaaattcgaagattggaaggtattcccatctgtcgacaacacttaatttggaataacatggaacttgaaaatgattattgcttgaatgattacaacatttcagaagggtgtaccttgaagctagttttggctatgcgtggcggacctataaatactagaagagttcctacagacgatccacttaggaagatggcagagtacttggattccagtcgagttgaggtctgggagaagacctcctgcagcaaacaagttacatttttggtataccaagaaggagatcaattgaatttctttcctgcagtagataggggagatggcactttaacaccgttatctgactcttcaaagaaaatagattttcatttgcatgtcctacggagaaaaggagaacatcgtatgagtggtggttctatgtataattcagatacagatgaggatgaagaaactgagccttcttcttctgggcaacagataattgaaaattcaataactatgaataagatgaagctgctgaaggctaagatgaagaacatgaatctcagcaaaaagcctaagaaagctgtcaagataaaacctcacccacctgtagctcctcgaccttctagtggttccactgcaccatctcgccaccgattgttaagggtcctccccaacattggtcaatcttgttcacctgcttttgggaatgcatatccgcccgaaatctccaggaatggaatttcaagtttggcaactcaactctctgctgagagatacatatcttctatcactggtgaatttcttaaggaagataatagctgggagaataacacactgtctcacttcagtagcaacgtcaaactacctcctcagataccccatttggagttgggaaatgaccaggagcttgctgactctgttctccatcttggatcatccctgcctaggcaaacaaaacattttttaggaaacttgccatctagtaatgggaacattgtcttaccttcagaagaatgtgtaaccgaacaatcacttctacctaaagtgggctcactggcttcatttgcagaaggaaatgctgatgaacagagcagcggcttagaaggtgcgtgcaaagtgaatctggagttgctactcactaatgctgacaaagggttgaaagctccagagcagcatctcaagcatgttgcaggagtgctgaatggggaatcagtagagacttcagttcttaactaccgggaattaagtcctcacaagaatagactcttgtcacctcttcgctgttctgcaccaatgtcgctacataattctctggtgaaaccagagagacagtccaaatgttttgagtttgggaagctacagccttcttcttctcagtcactggatgttcaaaacataactgattcttctttctctaggactacttgctttcaaggtgttaaagttgattcacttgggaaaagatctgatgttatttccaaagttgaggctcgggatatcacagaaatgactaacaaggcttccaaagagcctgttggttgtgtaaataatatcagttttcttgcctcactggccgggagcacaagcagaaatagattacagagcacacgtggggcaggcaggcttcagaactctggaactgggctgtctacaaacctccagcattttcaggaagaaaactttaggaaaagttctccccagttagaacatacaggagtttttttgtctacccatggtgttggaatgaatggaaataatgcagcagcagggaaaagcgtaggagaatgtactactcatcacctcccacctgtgaaagcccctcttcagacaaagaagaaaacaacaaatcattgttttctttgtggaaagaaaacaggactggctagtagctacgaatgcagatgtggaaacaacttctgtgcatctcatcgttatgcagaaactcatggctgtacctatgattacaagagtgcagggaggagatacttgcacgaggcaaatcctgtggttaatgcaccaaagcttccaaaaatctaactcttcctctacatcttactgttctgcccgggattcgtattataatgacagaagaaatgttgtttagactattatttttgttcgactctaaaagatttgccaaataacaaaagcatacaatgcatactgttggagaacaagaatgctactgtattttacatctttatttcttggtgaaacaaaagttttaaaagtagttttaacaactttacactggaatgatttagctttgttattgcatgtcttgtgttaagtgttttgtatatgatattgcagttttactaggcaaatcttcaaaagatgcactttaggaaacgaaatatttcctaaataaccaggcttccacattgtacagaatgagcagtcatgtaatgaatggctctactcagattgaccatatgggttttttctttttctttcttttattcttctccttctttttttttcagaggtgggatgggtggagattttttaaaaatcccacgtgtgaaagtttactggctttattagcaagttcctttttacttcaagctactttttataaaaaagaacatttttccagtgtggtttttaacagataatacatttcttccacattcagattagtattcggacatgaatccattctataaaacacatcgtgttcatgatagtgtatattttactactttttgaatgttaattttaaaatagaagatgtcccacttgccattaaatatagaagccaactttttaccttttgaaatatggctacatttaaaacaaaatctcacagctcggtttttcttatttgttgagtgctattaccaggagaaattcaaataaatattcaatttcattatg

SEQ ID NO: 6585 - protein, 727 aa, Homo sapiens; identical to SEQ ID NO: 6581

SEQ ID NO: 6586 - DNA, 660 bp, Homo sapiens
tgttcagtacacatttgagagaaggcttcagagaggagttgataattgatgatgtcttacaggataagtcaaattctactgggttgacaaggtagagtttactttagaagagattgcagatgtggaaggacttggtacatccttcggggagaatgtactactcatcacctcccacctgtgaaagcccctcttcagacaaagaagaaaacaacaaatcattgttttctttgtggaaagaaaacaggactggctagtagctacgaatgcaggcaggttggcgagctggagaagctcagatgctttctctgtgataacccagcttggggattatgcaaaataaaatatttaaattgcctgtttataacatcattaagatgatgttcaatagctatcttcagttgaacttctaattggctgaagtaaagaacaagtagatagctcatgggtttccaaaagacaaaaacagatccttccttgtcctttaagttaggaggtttaaaccaatctgagagtgtacctttttcgtcttatgatgaacctgcttggattttgtttgagtggcaccttggaagaacccctccctgaatattctattaaaaatttaattaaaaaattaaaagttaatataaaatagatgaataatatatttccaaaaaagta

SEQ ID NO: 6587 - protein, 44 aa, Homo sapiens
MWKDLVHPSGRMYYSSPPTCESPSSDKEENNKSLFSLWKENRTG

SEQ ID NO: 6588 - DNA, 1263 bp, Homo sapiens
gccatctagtaatgggaacattgtcttaccttcagaagaatgtgtaaccgaacaatcacttctacctaaagtgggctcactggcttcatttgcagaaggaaatgctgatgaacagagcagcggcttagaaggtgcgtgcaaagtgaatctggagttgctactcactaatgctgacaaagggttgaaagctccagagcagcatctcaagcatgttgcaggagtgctgaatggggaatcagtagagacttcagttcttaactaccgggaattaagtcctcacaagaatagactcttgtcacctcttcgctgttctgcaccaatgtcgctacataattctctggtgaaaccagagagacagtccaaatgttttgagtttgggaagctacagccttcttcttctcagtcactggatgttcaaaacataactgattcttctttctctaggactacttgctttcaaggtgttaaagttgattcacttgggaaaagatctgatgttatttccaaagttgaggctcgggatatcacagaaatgactaacaaggcttccaaagagcctgttggttgtgtaaataatatcagttttcttgcctcactggccgggagcacaagcagaaatagattacagagcacacgtggggcaggcaggcttcagaactctggaactgggctgtctacaaacctccagcattttcaggaagaaaactttaggaaaagttctccccagttagaacatacaggagtttttttggagaatgtactactcatcacctcccacctgtgaaagcccctcttcagacaaagaagaaaacaacaaatcattgttttctttgtggaaagaaaacaggactggctagtagctacgaatgcaggcaggttggcgagctggagaagctcagatgctttctctgtgataacccagcttggggattatgcaaaataaaatatttaaattgcctgtttataacatcattaagatgatgttcaatagctatcttcagttgaacttctaattggctgaagtaaagaacaagtagatagctcatgggtttccaaaagacaaaaacagatccttccttgtcctttaagttaggaggtttaaaccaatctgagagtgtacctttttcgtcttatgatgaacctgcttggattttgtttgagtggcaccttggaagaacccctccctgaatattctattaaaaatttaattaaaaaattaaaagttaatataaaatagatgaataatatatttccaaaaaagta

SEQ ID NO: 6589 - protein, 154 aa, Homo sapiens
MSLHNSLVKPERQSKCFEFGKLQPSSSQSLDVQNITDSSFSRTTCFQGVKVDSLGKRSDVISKVEARDITEMTNKASKEPVGCVNNISFLASLAGSTSRNRLQSTRGAGRLQNSGTGLSTNLQHFQEENFRKSSPQLEHTGVFLENVLLITSHL

SEQ ID NO: 6590 - DNA, 1667 bp, Homo sapiens
gtggttccactgcaccatctcgccaccgattgttaagggtcctccccaacattggtcaatcttgttcacctgcttttgggaatgcatatccgcccgaaatctccaggaatggaatttcaagtttggcaactcaactctctgctgagagatacatatcttctatcactggtgaatttcttaaggaagataatagctgggagaataacacactgtctcacttcagtagcaacgtcaaactacctcctcagataccccatttggagttgggaaatgaccaggagcttgctgactctgttctccatcttggatcatccctgcctaggcaaacaaaacattttttaggaaacttgccatctagtaatgggaacattgtcttaccttcagaagaatgtgtaaccgaacaatcacttctacctaaagtgggctcactggcttcatttgcagaaggaaatgctgatgaacagagcagcggcttagaaggtgcgtgcaaagtgaatctggagttgctactcactaatgctgacaaagggttgaaagctccagagcagcatctcaagcatgttgcaggagtgctgaatggggaatcagtagagacttcagttcttaactaccgggaattaagtcctcacaagaatagactcttgtcacctcttcgctgttctgcaccaatgtcgctacataattctctggtgaaaccagagagacagtccaaatgttttgagtttgggaagctacagccttcttcttctcagtcactggatgttcaaaacataactgattcttctttctctaggactacttgctttcaaggtgttaaagttgattcacttgggaaaagatctgatgttatttccaaagttgaggctcgggatatcacagaaatgactaacaaggcttccaaagagcctgttggttgtgtaaataatatcagttttcttgcctcactggccgggagcacaagcagaaatagattacagagcacacgtggggcaggcaggcttcagaactctggaactgggctgtctacaaacctccagcattttcaggaagaaaactttaggaaaagttctccccagttagaacatacaggagtttttttgtctacccatggtgttggaatgaatggaaataatgcagcagcagggaaaagcgtaggagaatgtactactcatcacctcccacctgtgaaagcccctcttcagacaaagaagaaaacaacaaatcattgttttctttgtggaaagaaaacaggactggctagtagctacgaatgcaggcaggttggcgagctggagaagctcagatgctttctctgtgataacccagcttggggattatgcaaaataaaatatttaaattgcctgtttataacatcattaagatgatgttcaatagctatcttcagttgaacttctaattggctgaagtaaagaacaagtagatagctcatgggtttccaaaagacaaaaacagatccttccttgtcctttaagttaggaggtttaaaccaatctgagagtgtacctttttcgtcttatgatgaacctgcttggattttgtttgagtggcaccttggaagaacccctccctgaatattctattaaaaatttaattaaaaaattaaaagttaatataaaatagatgaataatatatttccaaaaaagta

SEQ ID NO: 6591 - protein, 238 aa, Homo sapiens
MSLHNSLVKPERQSKCFEFGKLQPSSSQSLDVQNITDSSFSRTTCFQGVKVDSLGKRSDVISKVEARDITEMTNKASKEPVGCVNNISFLASLAGSTSRNRLQSTRGAGRLQNSGTGLSTNLQHFQEENFRKSSPQLEHTGVFLSTHGVGMNGNNAAAGKSVGECTTHHLPPVKAPLQTKKKTTNHCFLCGKKTGLASSYECRQVGELEKLRCFLCDNPAWGLCKIKYLNCLFITSLR

SEQ ID NO: 6592 - DNA, 1264 bp, Homo sapiens
aggtggtgtcacaaaggggcggggcgcggcggcagcggagcgttgtcggccagtgccttccgtgaagttgctcgccgggtcgttgggccctgtcgacctgtaggcgggcgagcgagccagcggacaagactgcgggtacaaaactcaaaacatgaacaacaatatatattaccaatcttcaaacctggtttgcctagaactggaatacagttgcctgcgacatattttagaagaactagaaaagtcaaagtaatggataacagaaaagagcctccattcttcaatgatgataacatgggaccattttactacagacttcatttctgtgataccatggagctcttcattgaaacattaactggaacatgttttgagctgagagtttcaccttttgaaactgttatttctgtgaaagcaaaaattcgaagattggaaggtattcccatctgtcgacaacacttaatttggaataacatggaacttgaaaatgattattgcttgaatgattacaacatttcagaagggtgtaccttgaagctagttttggctatgcgtggcggacctataaatactagaagagttcctacagacgatccacttaggaagatggcagagtacttggattccagtcgagttgaggtctgggagaagacctcctgcagcaaacaagttacatttttggtataccaagaaggagatcaattgaatttctttcctgcagtagataggggagatggcactttaacaccgttatctgactcttcaaagaaaatagattttcatttgcatgtcctacggagaaaaggagaacatcgtatgagtgagaatctcctcaggatgactaaaaatctgtacttctctcccgtgccaaatttaaaaaaattctgattcatggaaatctcatcagcctgttgtctgggttgcacaattatcagccttggctgataaaatgaaatcagacattctcatggaaatggattttgcctctttgggaatgatatggcagtggtggttctatgtataattcagatacagatgaggatgaagaaactgagccttcttcttctgggcaacagataattgaaaattcaataactatgaataagatgaagctgctgaaggctaagatgaagaacatgaatctcagcaaaaaggtgaagctgttggcatttgaccaggcttatctctagcttacccctgcagagcactcagcaatgaggtctgttggtcattgtgaaaaaattataaagtattattcatttca

SEQ ID NO: 6593 - protein, 211 aa, Homo sapiens
MDNRKEPPFFNDDNMGPFYYRLHFCDTMELFIETLTGTCFELRVSPFETVISVKAKIRRLEGIPICRQHLIWNNMELENDYCLNDYNISEGCTLKLVLAMRGGPINTRRVPTDDPLRKMAEYLDSSRVEVWEKTSCSKQVTFLVYQEGDQLNFFPAVDRGDGTLTPLSDSSKKIDFHLHVLRRKGEHRMSENLLRMTKNLYFSPVPNLKKF

SEQ ID NO: 6594 - DNA, 2048 bp, Homo sapiens
agcggagcgttgtcggccagtgccttccgtgaagttgctcgccgggtcgttgggccctgtcgacctgtaggcgggcgagcgagccagcggacaagactgcgggtacaaaactcaaaacatgaacaacaatatatattaccaatcttcaaacctggtttgcctagaactggaatacagttgcctgcgacatattttagaagaactagaaaagtcaaagtaatggataacagaaaagagcctccattcttcaatgatgataacatgggaccattttactacagacttcatttctgtgataccatggagctcttcattgaaacattaactggaacatgttttgagctgagagtttcaccttttgaaactgttatttctgtgaaagcaaaaattcgaagattggaaggtattcccatctgtcgacaacacttaatttggaataacatggaacttgaaaatgattattgcttgaatgattacaacatttcagaagggtgtaccttgaagctagttttggctatgcgtggcggacctataaatactagaagagatcttcaaatcccaagatgatgatcgttttgcaaaattccaacattgcctgtttacctggtttgtgatgtgtctgggtttcatggatattatcatggccccggttgcatcctttctcagaatataagtagttctgaaatccagtcattcattcaacaaatacgtattgagcgtctactgaatggtcagtgcaatgttccaagtatggtagacatgggagagaaagtctctgcttcatgacagtgcctacaataaatgtgtaaagagtcgatgtaactcctaatggttgtaagtgctatgcagaaaatagggtaggaagggccctcgaaaaagatgacattagtggagacttgattgatgagagggttttattaagcacaagaagagacggcagtattcacattggtccctgagtcaggtatgtcacatgaattcccatgaagtggaggagactagtcagagcatcctcttctgtggacctcattttgaggaagtccttcagatttatttgatccttcactaaccagaaaaccgaaggataagtattgattctactcctggcttgcttccacatgtcaaattatatccctatgtttaataattttggttagaaaataggattattgccatctttttcttagctatttcaagaggatttaatgagatatgctactttggctgttggactgctttttataggttagagaaaaacaaagttaataatgttagggccttttagcactcctgataccagagacttttaattaattggatttaggtaattgtcctatgtgacatttatagtaataactataaatgtttatagtaataactatgtgatgtttatagtaataactcttgaagtagcacaagaaccctgtgtttactgaaccattatgttaagatagaattatatagtgtttaatgccatgtgaactctattgtattacatttttgaaagttggttatttgtgcgtagtactactttaaaccaaagtgtttaatcaaaacacctacttttcttattagaactaaaattattttatatgtttatgaggagtgtgatacagattctgaggtaaatatatatattttttacttttctttttttttttgagacggagtcttgctctgtcaccgaggctggagtgcagtggcatgatctctgctcacttcaacctctgccacctgggttcaagtgattctcctgcctcagcctcccgagtagctgggattacaggcagtggtattgaggtcaggagtttgagaccagcttggccaacatggtgaaaccccatctctactaaaaatacaaaaattagctgggcatggtggcgggctactcaggaggctgagacatgagaattgcttgaacctgggagacagacgttacagtgagtggagactgcgccactacagtccagtctgggtgacagaggttacagtgagtggagactgcgccactacagtccagtctgggtgacagagtgagactctgtctc

SEQ ID NO: 6595 - protein, 115 aa, Homo sapiens
MDNRKEPPFFNDDNMGPFYYRLHFCDTMELFIETLTGTCFELRVSPFETVISVKAKIRRLEGIPICRQHLIWNNMELENDYCLNDYNISEGCTLKLVLAMRGGPINTRRDLQIPR

SEQ ID NO: 6596 - DNA, 614 bp, Homo sapiens
ttctgttccattcttgccttgtggaagcagcagaatgaacctaggtacaaaactcaaaacatgaacaacaatatatattaccaatcttcaaacctggtttgcctagaactggaatacagttgcctgcgacatattttagaagaactagaaaagtcaaagtaatggataacagaaaagagcctccattcttcaatgatgataacatgggaccattttactacagacttcatttctgtgataccatggagctcttcattgaaacattaactggaacatgttttgagctgagagtttcaccttttgaaactgttatttctgtgaaagcaaaaattcgaagattggaaggtattcccatctgtcgacaacacttaatttggaataacatggaacttgaaaatgattattgcttgaatgattacaacatttcagaagggtgtaccttgaagctagttttggctatgcgtggcggacctataaatactagaagagatcttcaaatcccaagatgatgatcgttttgcaaaattccaacattgcctgtttacctggtttgtgatgtgtctgggtttcatggatattatcatggccccggttgcatcctttctcagaatata

SEQ ID NO: 6597 - protein, 115 aa, Homo sapiens; identical to SEQ ID NO: 6595

SEQ ID NO: 6598 - DNA, 529 bp, Homo sapiens
agtgccttccgtgaagttgctcgccgggtcgttgggccctgtcgacctgtaggcgggcgagcgagccagcggacaagactgcgggtacaaaactcaaaacatgaacaacaatatatattaccaatcttcaaacctggtttgcctagaactggaatacagttgcctgcgacatattttagaagaactagaaaagtcaaagtaatggataacagaaaagagcctccattcttcaatgatgataacatgggaccattttactacagacttcatttctgtgataccatggagctcttcattgaaacattaactggaacatgttttgagctgagagtttcaccttttgaaactgttatttctgtgaaagcaaaaattcgaagattggaagacccaggagatcctactgaagtgagtggctggccgagtccagtgaccacatcagcacattcagtaatgactcttgaagcttttgtctgccctaaatgatttggtattcccatctgtcgacaacacttaatttggaataacatgg

SEQ ID NO: 6599 - protein, 93 aa, Homo sapiens
MDNRKEPPFFNDDNMGPFYYRLHFCDTMELFIETLTGTCFELRVSPFETVISVKAKIRRLEDPGDPTEVSGWPSPVTTSAHSVMTLEAFVCPK

SEQ ID NO: 6600 - DNA, 583 bp, Homo sapiens
gtgaccttggagatacctcatcatatcacacaaagagatgcagatagatctttgagcatacctgatgaacagttacactcatttgcggtttccaccgtgcacattacgaagaacagaaatggaggtgggagtttaaataactattcctcctccattccatcgactcccagcaccagccaggaggaccctcagttcagtgttcctcccactgccaacacacccacccccgtttgcaagcggtccatgcgctggtccaacctgtttacatctgagaaagggagtgacccagacaaagagaggaaagccccggagaatcatgctgacaccatcgggagcggcagagccatccccattaaacagggcatgctcttaaagcgaagtgggaaatggctgaagacatggaaaaagaaatacgtcaccctgtgttccaatggcgtgctcacctattattcaagcttaggtgattatatgaagaatattcataaaaaagagattgaccttcagacatctaccatcaaagtcccaggaaagtggccatccctagccacatcggcctgcgcacccatctccagctctaaaagca

SEQ ID NO: 6601 - protein, 112 aa, Homo sapiens
MRWSNLFTSEKGSDPDKERKAPENHADTIGSGRAIPIKQGMLLKRSGKWLKTWKKKYVTLCSNGVLTYYSSLGDYMKNIHKKEIDLQTSTIKVPGKWPSLATSACAPISSSK

SEQ ID NO: 6602 - DNA, 548 bp, Homo sapiens
agaggcgggttgggcggggggcgctgccgcccaaggcccgaggcagcggcgcgggatcggccaaagcaccggccgccagttcggcgggtctggagagaggggacctcaagcagccagtggagcaaccagcctgggagccttcgacgtaggcgctgtgggcgaaggaaaaggcctggcctgctgcctcttctcttgcagcaaaatccgctgctgtgaaggagctgaaaagaagcagacctacatcgtttgcagatgagctggctgcccgcatcaagggggatgccgtgggccgagtggacgaggagccgacaaatgaagaggataacttattcgcaccccccaagctgaccgacgaggacttctcgccatttggctctggaggtggcctgttcagtgggggcaaggggctctttgatgatgaggacgaggagagtgacctcttcacggaagccccccaggatcggcaagctggagcctctgttaaggaggagtcttcatcatccaaacctggaaagaaaatcctagcaggagctgtttctgtattttta

SEQ ID NO: 6603 - protein, 36 aa, Homo sapiens
MMRTRRVTSSRKPPRIGKLEPLLRRSLHHPNLERKS

SEQ ID NO: 6604 - DNA, 861 bp, Homo sapiens
cgaccacggccgctcccacacgggctccgacgccggcaccagctcctggtcgggggtcgtccggttcatctgcagcgaaaaaaacgagaagagaggctgagcctgagggcggcagggacggcggccccagcccaggccggcccctctccggcccgccgccctcaccatcccagccgcccggctcggtgggctccgaggctgccagcacaggccgaggaccgcagagccccggaagcctagccccagccaagctgcccggggcgtgaccggcctcacgtgacctgatgtcacgtgacagaacccgcacgtgatccgacctgcgatgctgaggggaggaagctgcggaagtggactgggactggagtttggggttctaccctaggttggggcggaggaagctggaggataggggctgacgccaggaacgctgcagaggcgggttgggcggggggcgctgccgcccaaggcccgaggcagcggcgcgggatcggccaaagcaccggccgccagttcggcgggtctggagagaggggacctcaagcagccagtggagcaaccagcctgggagccttcgacgtaggcgctgtgggcgaaggaaaaggcctggcctgctgcctcttctcttgcagcaaaatccgctgctgtgaaggagctgaaaagaagcagacctacatcgtttgcagatgagctggctgcccgcatcaagggggatgccgtgggccgagtggacgaggagccgacaaccttaccctcaggagaagcaaaacttcggaagacactcaagagaagaaggaaaggagaactccttcggacgatgaagaggataacttattcgcaccccccaagctgaccgacgaggac

SEQ ID NO: 6605 - protein, 44 aa, Homo sapiens
MSWLPASRGMPWAEWTRSRQPYPQEKQNFGRHSREEGKENSFGR

SEQ ID NO: 6606 - DNA, 440 bp, Homo sapiens
tttgaaggaggagcctaaaggctaagtggcagtatctcttctttagcttaataactagtagttctaatttggtattttatactcttagcacatcacacaagtgagtgatgaggaagaggatgatgatggctgtgacctttttgctgactctgagaaggaggagaaagatattgaggacattgaagaaaatactagacctaaaagaagcagacctacatcgtttgcagatgagctggctgcccgcatcaagggggatgccgtgggccgagtggacgaggagccgacaagtgagccccagccgcgttgatggggagtaggggaggggtagtgcagggccctctgctggcttcaccaaaggcggatttctctttttattagtaattaccacatatatttattagtaattgctacatataatttaaattgtagtgcttattcct

SEQ ID NO: 6607 - protein, 69 aa, Homo sapiens
MRKRMMMAVTFLLTLRRRRKILRTLKKILDLKEADLHRLQMSWLPASRGMPWAEWTRSRQVSPSRVDGE

SEQ ID NO: 6608 - DNA, 4626 bp, Homo sapiens
gtcacgccccgggcagcttggctggggctaggcttccggggctctgcggtcctcggcctgtgctggcagcctcggagcccaccgagccgggcggctgggatgatgaaccggacgacccccgaccaggagctggtgccggcgtcggagcccgtgtgggagcggccgtggtcggtggaggagatccgcaggagcagccagagctggtcgctggcggccgacgcgggcctactacagtttctacaggaattctcacagcaaactatctctaggacccatgaaatcaagaaacaagtggacggactaatccgggaaaccaaagccacagattgtcgcctgcataatgtcttcaatgacttccttatgctctctaatacccagttcatagagaatcgtgtatatgatgaagaagtggaggagccagtactcaaggctgaggcagaaaaaacagagcaggagaagacacgagagcagaaagaagtagatctcattcctaaagtccaggaggctgtgaactatggcttacaagtattggacagtgcctttgagcaacttgatatcaaagcaggaaactcagactccgaggaagatgatgctaatgggcgggtggaactgatccttgaaccaaaggatctatacattgatcgtcctttaccatatctcattgggtcaaagctgttcatggaacaagaagatgtaggtcttggagagctgtccagtgaagaaggctctgtaggcagtgatcgtggcagtattgtggacactgaggaagagaaagaagaggaggagtcagatgaagattttgcccatcacagtgacaatgaacaaaaccagcacaccacacaaatgagtgatgaggaagaggatgatgatggctgtgacctttttgctgactctgagaaggaggaggaagatattgaggacattgaagaaaatactagacctaaaagaagcagacctacatcgtttgcagatgagctggctgcccgcatcaagggggatgccatgggtcgagtggacgaggagccgacaaccttaccctcaggagaagcaaaacctcggaagacactcaaagagaagaaggaaaggagaactccttcagacgatgaagaggataacttattcgcaccccccaagctgaccgacgaggacttctcgccatttggctctggaggtggcctgttcagtggcggcaaggggctatttgatgatgaggacgaggagagtgacctcttcacggaagcctcccaggatcggcaagctggagcctctgttaaggaggagtcttcatcatccaaacctggaaagaaaatcccagcaggagctgtttctgtatttttaggagacacggatgtgtttggtgctgcctccgttccatcactgaaggagccacagaagcctgagcagcccactccaaggaaaagcccctatggtccccctcccactggcctctttgatgatgatgatggtgatgatgatgacgactttttctcggcaccccacagcaaaccttctaaaacacgcaaagtccaatccactgccgatatctttggtgacgaagaaggagatctgttcaaagaaaaagccgtagcatcgccagaagccactgtgagtcagacagatgaaaataaagcaagagcagaaaaaaaggttaccttatcttacagcaaaaatctcaagccctcatcagaaacaaagactcaaaaaggcttattttcagatgaggaggactctgaggatttgttttcttctcaaagtgcgagtaacttaaaaggtgcatctctgctgcctggcaagctccccacgtcggtttccctgtttgatgatgaagatgaagaggataatctttttgggggtacagctgctaagaagcagacattgtctctacaagctcagagagaagagaaagcaaaagcctccgagctctccaaaaagaaagcatctgccctgttgttcagcagtgatgaggaggaccagtggaatattcctgcttcacagacccacttagcatctgacagcaggtctaaaggagaacccagggattctgggaccctccagagccaggaggccaaggctgtgaaaaagaccagtctctttgaggaagacaaagaagatgatctttttgccattgccaaggacagccaaaagaagacccagagagtgtcactcctctttgaagacgatgttgatagcggaggctctctgtttggctctcctcccacatctgttcctcctgcaacaaagaaaaaagagactgtctctgaggcaccacctttgctgttcagcgatgaagaagagaaggaggcacaacttggagtgaagtctgtggataagaaggttgagagtgccaaggagtcattaaaatttgggagaactgatgtggctgagtcagaaaaggaaggacttttgactagatctgctcaggaaacagtcaagcattctgatttattttcttcatcatccccatgggacaaaggaaccaagcctagaaccaaaactgttcttagcttgtttgatgaggaagaggataaaatggaagatcaaaacattatccaggctccacagaaagaagtaggaaagggctgcgatcctgatgcccaccccaagagcacaggtgtcttccaggatgaagagctgcttttcagccacaagctccaaaaggacaatgacccagatgttgacctttttgctggcaccaaaaaaaccaagctgttagagccaagtgttgggagcctgtttggggatgatgaagatgatgatcttttcagctctgccaagtcccagcctttggtacaagagaaaaagagagtagtgaaaaaagaccactctgttaactctttcaaaaaccagaaacatcctgaatccattcaaggtagtaaagaaaaaggcatatggaagccggaaacacctcaggcaaatttagcgatcaacccagcggccttgctgcccacagcggcttcccagatctctgaagtaaagcctgttttgccagaattggcttttccttcatctgaacacagaaggagccacggtctggaaagtgtgcctgtccttcccgggagtggggaggccggtgtgagttttgatcttccagctcaggcagacaccttacacagtgcaaacaagagccgtgtcaagatgagagggaagcgtagaccgcagacccgtgcagctaggcggctggctgctcaggagtccagcgaggctgaggacatgagcgtccccagaggacccattgcacagtgggctgatggcgccatttccccaaatggccatcggccacagctcagagcagccagtggagaagacagcactgaggaggccctggcagctgccgctgcaccttgggaaggtggtcctgtgcctggagtggacacaagcccctttgcaaagtctctgggtcattccagaggggaggctgacctttttgattctggggacattttttccacgggcactggatctcagtccgtggagagaacaaaacccaaggcaaagatagcagagaatcctgccaacccaccagtgggtggtaaagcaaagagccccatgtttcctgctctaggcgaggccagcagtgatgatgatctctttcagtctgctaaaccaaaaccagcaaagaaaacaaatccctttcctctcctggaagatgaggatgacctctttacagatcagaaagtcaagaagaatgagacaaaatccagtagtcagcaggatgtcatattaacaacacaagatatttttgaggatgatatatttgctacggaagcaattaaaccctctcagaaaaccagagagaaggagaaaacattggaatctaatttatttgatgataacattgatatctttgctgacttaactgtaaaaccaaaagaaaagtccaaaaagaaagtggaagccaagtctatatttgatgatgatatggatgacatcttctccactggtatccaggctaagacaaccaaaccaaaaagccgatctgcacaggccgcacctgaaccaagatttgaacacaaggtgtccaacatctttgatgatcccctgaatgcctttggaggccagtagagcacacagggtatccacatgttaccctgcagctacattgttgagttagtgatgatattgtatatgctcatggtcttaactggattacaaaaagcaaatactagaacagctagctcatcttttacccaatgtacttagtatttttctgcactggtttaatcatgcttaatactacaaaacaaaaataaatatttcacagtggttggtttgttttgtttttaaaccacagtttgatttagttagccttgctggggccataatatgcttcagggtgtgtaaaagaagaaatctctttgtggctttcatgggcagggaatctcagagatagcaaatgccacctgaccagaagtctttgttatatggatgggaaccctaacttagggcttgggcaggggaaagagaaagaagatgagagattatacttcatgagtcttagcaatatgggagcaggttttcactgaattctgagggtgcctctgcatgtcctccaaggcaaagtttggcaaactgtggcccccccactgtcatattttgttaataaaattttattggaacacaatcaca

SEQ ID NO: 6609 - protein, 1320 aa, Homo sapiens
MMNRTTPDQELVPASEPVWERPWSVEEIRRSSQSWSLAADAGLLQFLQEFSQQTISRTHEIKKQVDGLIRETKATDCRLHNVFNDFLMLSNTQFIENRVYDEEVEEPVLKAEAEKTEQEKTREQKEVDLIPKVQEAVNYGLQVLDSAFEQLDIKAGNSDSEEDDANGRVELILEPKDLYIDRPLPYLIGSKLFMEQEDVGLGELSSEEGSVGSDRGSIVDTEEEKEEEESDEDFAHHSDNEQNQHTTQMSDEEEDDDGCDLFADSEKEEEDIEDIEENTRPKRSRPTSFADELAARIKGDAMGRVDEEPTTLPSGEAKPRKTLKEKKERRTPSDDEEDNLFAPPKLTDEDFSPFGSGGGLFSGGKGLFDDEDEESDLFTEASQDRQAGASVKEESSSSKPGKKIPAGAVSVFLGDTDVFGAASVPSLKEPQKPEQPTPRKSPYGPPPTGLFDDDDGDDDDDFFSAPHSKPSKTRKVQSTADIFGDEEGDLFKEKAVASPEATVSQTDENKARAEKKVTLSYSKNLKPSSETKTQKGLFSDEEDSEDLFSSQSASNLKGASLLPGKLPTSVSLFDDEDEEDNLFGGTAAKKQTLSLQAQREEKAKASELSKKKASALLFSSDEEDQWNIPASQTHLASDSRSKGEPRDSGTLQSQEAKAVKKTSLFEEDKEDDLFAIAKDSQKKTQRVSLLFEDDVDSGGSLFGSPPTSVPPATKKKETVSEAPPLLFSDEEEKEAQLGVKSVDKKVESAKESLKFGRTDVAESEKEGLLTRSAQETVKHSDLFSSSSPWDKGTKPRTKTVLSLFDEEEDKMEDQNIIQAPQKEVGKGCDPDAHPKSTGVFQDEELLFSHKLQKDNDPDVDLFAGTKKTKLLEPSVGSLFGDDEDDDLFSSAKSQPLVQEKKRVVKKDHSVNSFKNQKHPESIQGSKEKGIWKPETPQANLAINPAALLPTAASQISEVKPVLPELAFPSSEHRRSHGLESVPVLPGSGEAGVSFDLPAQADTLHSANKSRVKMRGKRRPQTRAARRLAAQESSEAEDMSVPRGPIAQWADGAISPNGHRPQLRAASGEDSTEEALAAAAAPWEGGPVPGVDTSPFAKSLGHSRGEADLFDSGDIFSTGTGSQSVERTKPKAKIAENPANPPVGGKAKSPMFPALGEASSDDDLFQSAKPKPAKKTNPFPLLEDEDDLFTDQKVKKNETKSSSQQDVILTTQDIFEDDIFATEAIKPSQKTREKEKTLESNLFDDNIDIFADLTVKPKEKSKKKVEAKSIFDDDMDDIFSTGIQAKTTKPKSRSAQAAPEPRFEHKVSNIFDDPLNAFGGQ

SEQ ID NO: 6610 - DNA, 4717 bp, Homo sapiens
acgccccgggcagcttggctggggctaggcttccggggctctgcggtcctcggcctgtgctggcagcctcggagcccaccgagccgggcggctgggatgatgaaccggacgacccccgaccaggagctggtgccggcgtcggagcccgtgtgggagcggccgtggtcggtggaggagatccgcaggagcagccagagctggtcgctggcggccgacgcgggcctactacagtttctacaggaattctcacagcaaactatctctaggacccatgaaatcaagaaacaagtggacggactaatccgggaaaccaaagccacagattgtcgcctgcataatgtcttcaatgacttccttatgctctctaatacccagttcatagagaatcgtgtatatgatgaagaagtggaggagccagtactcaaggctgaggcagaaaaaacagagcaggagaagacacgagagcagaaagaagtagatctcattcctaaagtccaggaggctgtgaactatggcttacaagtattggacagtgcctttgagcaacttgatatcaaagcaggaaactcagactccgaggaagatgatgctaatgggcgggtggaactgatccttgaaccaaagagtttcactcttgttgcccaagctggagtggcgcaatctcggctcactgcagcttctgtctcctgggttcaagcgattctcctgcctcagccttccaagtagctgggattacaggatctatacattgatcgtcctttaccatatctcattgggtcaaagctgttcatggaacaagaagatgtaggtcttggagagctgtccagtgaagaaggctctgtaggcagtgatcgtggcagtattgtggacactgaggaagagaaagaagaggaggagtcagatgaagattttgcccatcacagtgacaatgaacaaaaccagaaaagaagcagacctacatcgtttgcagatgagctggctgcccgcatcaagggggatgccatgggtcgagtggacgaggagccgacaaccttaccctcaggagaagcaaaacctcggaagacactcaaagagaagaaggaaaggagaactccttcagacgatgaagaggataacttattcgcaccccccaagctgaccgacgaggacttctcgccatttggctctggaggtggcctgttcagtggcggcaaggggctatttgatgatgaggacgaggagagtgacctcttcacggaagcctcccaggatcggcaagctggagcctctgttaaggaggagtcttcatcatccaaacctggaaagaaaatcccagcaggagctgtttctgtatttttaggagacacggatgtgtttggtgctgcctccgttccatcactgaaggagccacagaagcctgagcagcccactccaaggaaaagcccctatggtccccctcccactggcctctttgatgatgatgatggtgatgatgatgacgactttttctcggcaccccacagcaaaccttctaaaacacgcaaagtccaatccactgccgatatctttggtgacgaagaaggagatctgttcaaagaaaaagccgtagcatcgccagaagccactgtgagtcagacagatgaaaataaagcaagagcagaaaaaaaggatttgttttcttctcaaagtgcgagtaacttaaaaggtgcatctctgctgcctggcaagctccccacgtcggtttccctgtttgatgatgaagatgaagaggataatctttttgggggtacagctgctaagaagcagacattgtctctacaagctcagagagaagagaaagcaaaagcctccgagctctccaaaaagaaagcatctgccctgttgttcagcagtgatgaggaggaccagtggaatattcctgcttcacagacccacttagcatctgacagcaggtctaaaggagaacccagggattctgggaccctccagagccaggaggccaaggctgtgaaaaagaccagtctctttgaggaagacaaagaagatgatctttttgccattgccaaggacagatacatcctacctcctattgttcccgaagttgtctgtcaagttttgtgtatggaaagtaattcataccttcatcagatctcaaaagaagctttacacacacaagaagaagttgagccaaaagaagacccagagagtgtcactcctctttgaagacgatgttgatagcggaggctctctgtttggctctcctcccacatctgttcctcctgcaacaaagaaaaaagagactgtctctgaggcaccacctttgctgttcagcgatgaagaagagaaggaggcacaacttggagtgaagtctgtggataagaaggttgagagtgccaaggagtcattaaaatttgggagaactgatgtggctgagtcagaaaaggaaggacttttgactagatctgctcaggaaacagtcaagcattctgatttattttcttcatcatccccatgggacaaaggaaccaagcctagaaccaaaactgttcttagcttgtttgatgaggaagaggataaaatggaagatcaaaacattatccaggctccacagaaagaagtaggaaagggctgcgatcctgatgcccaccccaagagcacaggtgtcttccaggatgaagagctgcttttcagccacaagctccaaaaggacaatgacccagatgttgacctttttgctggcaccaaaaaaaccaagctgttagagccaagtgttgggagcctgtttggggatgatgaagatgatgatcttttcagctctgccaagtcccagcctttggtacaagagaaaaagagagtagtgaaaaaagaccactctgttaactctttcaaaaaccagaaacatcctgaatccattcaaggtagtaaagaaaaaggcatatggaagccggaaacacctcaggactcatcaggtctcgctccatttaaaaccaaagaaccatccactcggatcgggaagatacaagcaaatttagcgatcaacccagcggccttgctgcccacagcggcttcccagatctctgaagtaaagcctgttttgccagaattggcttttccttcatctgaacacagaaggagccacggtctggaaagtgtgcctgtccttcccgggagtggggaggccggtgtgagttttgatcttccagctcaggcagacaccttacacagtgcaaacaagagccgtgtcaagatgagagggaagcgtagaccgcagacccgtgcagctaggcggctggctgctcaggagtccagcgaggctgaggacatgagcgtccccagaggacccattgcacagtgggctgatggcgccatttccccaaatggccatcggccacagctcagagcagccagtggagaagacagcactgaggaggccctggcagctgccgctgcaccttgggaaggtggtcctgtgcctggagtggacacaagcccctttgcaaagtctctgggtcattccagaggggaggctgacctttttgattctggggacattttttccacgggcactggatctcagtccgtggagagaacaaaacccaaggcaaagatagcagagaatcctgccaacccaccagtgggtggtaaagcaaagagccccatgtttcctgctctaggcgaggccagcagtgatgatgatctctttcagtctgctaaaccaaaaccagcaaagaaaacaaatccctttcctctcctggaagatgaggatgacctctttacagatcagaaagtcaagaagaatgagacaaaatccagtagtcagcaggatgtcatattaacaacacaagatatttttgaggatgatatatttgctacggaagcaattaaaccctctcagaaaaccagagagaaggagaaaacattggaatctaatttatttgatgataacattgatatctttgctgacttaactgtaaaaccaaaagaaaagtccaaaaagaaagtggaagccaagtctatatttgatgatgatatggatgacatcttctccactggtatccaggctaagacaaccaaaccaaaaagccgatctgcacaggccgcacctgaaccaagatttgaacacaaggtgtccaacatctttgatgatcccctgaatgcctttggaggccagtagagcacacagggtatccacatgttaccctgcagctacattgttgagttagtgatgatattgtatatgctcatggtcttaactggattacaaaaagcaaatactagaacagctagctcatcttttacccaatgtacttagtatttttctgcactggtttaatcatgcttaatactacaaaacaaaaataaatatttcacagtggttggtttgttttgtttttaaaccacagtttgatttagttagccttgctggggccataatatgcttcagggtgtgtaaaagaagaaatctctttgtggctttcatgggcagggaatctcagagatagcaaatgccacctgaccagaagtctttgttatatggatgggaaccctaacttagggcttgggcaggggaaagagaaagaagatgagagattatacttcatgagtcttagcaatatgggagcaggttttcactgaattctgagggtgcctctgcatgtcctccaaggcaaagtttggcaaactgtggcccccccactgtcatattttgttaataaaattttattggaacacaatcaca

SEQ ID NO: 6611 - protein, 709 aa, Homo sapiens
MIFLPLPRTDTSYLLLFPKLSVKFCVWKVIHTFIRSQKKLYTHKKKLSQKKTQRVSLLFEDDVDSGGSLFGSPPTSVPPATKKKETVSEAPPLLFSDEEEKEAQLGVKSVDKKVESAKESLKFGRTDVAESEKEGLLTRSAQETVKHSDLFSSSSPWDKGTKPRTKTVLSLFDEEEDKMEDQNIIQAPQKEVGKGCDPDAHPKSTGVFQDEELLFSHKLQKDNDPDVDLFAGTKKTKLLEPSVGSLFGDDEDDDLFSSAKSQPLVQEKKRVVKKDHSVNSFKNQKHPESIQGSKEKGIWKPETPQDSSGLAPFKTKEPSTRIGKIQANLAINPAALLPTAASQISEVKPVLPELAFPSSEHRRSHGLESVPVLPGSGEAGVSFDLPAQADTLHSANKSRVKMRGKRRPQTRAARRLAAQESSEAEDMSVPRGPIAQWADGAISPNGHRPQLRAASGEDSTEEALAAAAAPWEGGPVPGVDTSPFAKSLGHSRGEADLFDSGDIFSTGTGSQSVERTKPKAKIAENPANPPVGGKAKSPMFPALGEASSDDDLFQSAKPKPAKKTNPFPLLEDEDDLFTDQKVKKNETKSSSQQDVILTTQDIFEDDIFATEAIKPSQKTREKEKTLESNLFDDNIDIFADLTVKPKEKSKKKVEAKSIFDDDMDDIFSTGIQAKTTKPKSRSAQAAPEPRFEHKVSNIFDDPLNAFGGQ

SEQ ID NO: 6612 - DNA, 4654 bp, Homo sapiens
acgccccgggcagcttggctggggctaggcttccggggctctgcggtcctcggcctgtgctggcagcctcggagcccaccgagccgggcggctgggatgatgaaccggacgacccccgaccaggagctggtgccggcgtcggagcccgtgtgggagcggccgtggtcggtggaggagatccgcaggagcagccagagctggtcgctggcggccgacgcgggcctactacagtttctacaggaattctcacagcaaactatctctaggacccatgaaatcaagaaacaagtggacggactaatccgggaaaccaaagccacagattgtcgcctgcataatgtcttcaatgacttccttatgctctctaatacccagttcatagagaatcgtgtatatgatgaagaagtggaggagccagtactcaaggctgaggcagaaaaaacagagcaggagaagacacgagagcagaaagaagtagatctcattcctaaagtccaggaggctgtgaactatggcttacaagtattggacagtgcctttgagcaacttgatatcaaagcaggaaactcagactccgaggaagatgatgctaatgggcgggtggaactgatccttgaaccaaagagtttcactcttgttgcccaagctggagtggcgcaatctcggctcactgcagcttctgtctcctgggttcaagcgattctcctgcctcagccttccaagtagctgggattacaggatctatacattgatcgtcctttaccatatctcattgggtcaaagctgttcatggaacaagaagatgtaggtcttggagagctgtccagtgaagaaggctctgtaggcagtgatcgtggcagtattgtggacactgaggaagagaaagaagaggaggagtcagatgaagattttgcccatcacagtgacaatgaacaaaaccagaaaagaagcagacctacatcgtttgcagatgagctggctgcccgcatcaagggggatgccatgggtcgagtggacgaggagccgacaaccttaccctcaggagaagcaaaacctcggaagacactcaaagagaagaaggaaaggagaactccttcagacgatgaagaggataacttattcgcaccccccaagctgaccgacgaggacttctcgccatttggctctggaggtggcctgttcagtggcggcaaggggctatttgatgatgaggacgaggagagtgacctcttcacggaagcctcccaggatcggcaagctggagcctctgttaaggaggagtcttcatcatccaaacctggaaagaaaatcccagcaggagctgtttctgtatttttaggagacacggatgtgtttggtgctgcctccgttccatcactgaaggagccacagaagcctgagcagcccactccaaggaaaagcccctatggtccccctcccactggcctctttgatgatgatgatggtgatgatgatgacgactttttctcggcaccccacagcaaaccttctaaaacacgcaaagtccaatccactgccgatatctttggtgacgaagaaggagatctgttcaaagaaaaagccgtagcatcgccagaagccactgtgagtcagacagatgaaaataaagcaagagcagaaaaaaaggatttgttttcttctcaaagtgcgagtaacttaaaaggtgcatctctgctgcctggcaagctccccacgtcggtttccctgtttgatgatgaagatgaagaggataatctttttgggggtacagctgctaagaagcagacattgtctctacaagctcagagagaagagaaagcaaaagcctccgagctctccaaaaagaaagcatctgccctgttgttcagcagtgatgaggaggaccagtggaatattcctgcttcacagacccacttagcatctgacagcaggtctaaaggagaacccagggattctgggaccctccagagccaggaggccaaggctgtgaaaaagaccagtctctttgaggaagacaaagaagatgatctttttgccattgccaaggacagatacatcctacctcctattgttcccgaagttgtctgtcaagttttgtgtatggaaagtaattcataccttcatcagatctcaaaagaagctttacacacacaagaagaagttgagccaaaagaagacccagagagtgtcactcctctttgaagacgatgttgatagcggaggctctctgtttggctctcctcccacatctgttcctcctgcaacaaagaaaaaagagactgtctctgaggcaccacctttgctgttcagcgatgaagaagagaaggaggcacaacttggagtgaagtctgtggataagaaggttgagagtgccaaggagtcattaaaatttgggagaactgatgtggctgagtcagaaaaggaaggacttttgactagatctgctcaggaaacagtcaagcattctgatttattttcttcatcatccccatgggacaaaggaaccaagcctagaaccaaaactgttcttagcttgtttgatgaggaagaggataaaatggaagatcaaaacattatccaggctccacagaaagaagtaggaaagggctgcgatcctgatgcccaccccaagagcacaggtgtcttccaggatgaagagctgcttttcagccacaagctccaaaaggacaatgacccagatgttgacctttttgctggcaccaaaaaaaccaagctgttagagccaagtgttgggagcctgtttggggatgatgaagatgatgatcttttcagctctgccaagtcccagcctttggtacaagagaaaaagagagtagtgaaaaaagaccactctgttaactctttcaaaaaccagaaacatcctgaatccattcaaggtagtaaagaaaaaggcatatggaagccggaaacacctcaggcaaatttagcgatcaacccagcggccttgctgcccacagcggcttcccagatctctgaagtaaagcctgttttgccagaattggcttttccttcatctgaacacagaaggagccacggtctggaaagtgtgcctgtccttcccgggagtggggaggccggtgtgagttttgatcttccagctcaggcagacaccttacacagtgcaaacaagagccgtgtcaagatgagagggaagcgtagaccgcagacccgtgcagctaggcggctggctgctcaggagtccagcgaggctgaggacatgagcgtccccagaggacccattgcacagtgggctgatggcgccatttccccaaatggccatcggccacagctcagagcagccagtggagaagacagcactgaggaggccctggcagctgccgctgcaccttgggaaggtggtcctgtgcctggagtggacacaagcccctttgcaaagtctctgggtcattccagaggggaggctgacctttttgattctggggacattttttccacgggcactggatctcagtccgtggagagaacaaaacccaaggcaaagatagcagagaatcctgccaacccaccagtgggtggtaaagcaaagagccccatgtttcctgctctaggcgaggccagcagtgatgatgatctctttcagtctgctaaaccaaaaccagcaaagaaaacaaatccctttcctctcctggaagatgaggatgacctctttacagatcagaaagtcaagaagaatgagacaaaatccagtagtcagcaggatgtcatattaacaacacaagatatttttgaggatgatatatttgctacggaagcaattaaaccctctcagaaaaccagagagaaggagaaaacattggaatctaatttatttgatgataacattgatatctttgctgacttaactgtaaaaccaaaagaaaagtccaaaaagaaagtggaagccaagtctatatttgatgatgatatggatgacatcttctccactggtatccaggctaagacaaccaaaccaaaaagccgatctgcacaggccgcacctgaaccaagatttgaacacaaggtgtccaacatctttgatgatcccctgaatgcctttggaggccagtagagcacacagggtatccacatgttaccctgcagctacattgttgagttagtgatgatattgtatatgctcatggtcttaactggattacaaaaagcaaatactagaacagctagctcatcttttacccaatgtacttagtatttttctgcactggtttaatcatgcttaatactacaaaacaaaaataaatatttcacagtggttggtttgttttgtttttaaaccacagtttgatttagttagccttgctggggccataatatgcttcagggtgtgtaaaagaagaaatctctttgtggctttcatgggcagggaatctcagagatagcaaatgccacctgaccagaagtctttgttatatggatgggaaccctaacttagggcttgggcaggggaaagagaaagaagatgagagattatacttcatgagtcttagcaatatgggagcaggttttcactgaattctgagggtgcctctgcatgtcctccaaggcaaagtttggcaaactgtggcccccccactgtcatattttgttaataaaattttattggaacacaatcaca

SEQ ID NO: 6613 - protein, 688 aa, Homo sapiens
MIFLPLPRTDTSYLLLFPKLSVKFCVWKVIHTFIRSQKKLYTHKKKLSQKKTQRVSLLFEDDVDSGGSLFGSPPTSVPPATKKKETVSEAPPLLFSDEEEKEAQLGVKSVDKKVESAKESLKFGRTDVAESEKEGLLTRSAQETVKHSDLFSSSSPWDKGTKPRTKTVLSLFDEEEDKMEDQNIIQAPQKEVGKGCDPDAHPKSTGVFQDEELLFSHKLQKDNDPDVDLFAGTKKTKLLEPSVGSLFGDDEDDDLFSSAKSQPLVQEKKRVVKKDHSVNSFKNQKHPESIQGSKEKGIWKPETPQANLAINPAALLPTAASQISEVKPVLPELAFPSSEHRRSHGLESVPVLPGSGEAGVSFDLPAQADTLHSANKSRVKMRGKRRPQTRAARRLAAQESSEAEDMSVPRGPIAQWADGAISPNGHRPQLRAASGEDSTEEALAAAAAPWEGGPVPGVDTSPFAKSLGHSRGEADLFDSGDIFSTGTGSQSVERTKPKAKIAENPANPPVGGKAKSPMFPALGEASSDDDLFQSAKPKPAKKTNPFPLLEDEDDLFTDQKVKKNETKSSSQQDVILTTQDIFEDDIFATEAIKPSQKTREKEKTLESNLFDDNIDIFADLTVKPKEKSKKKVEAKSIFDDDMDDIFSTGIQAKTTKPKSRSAQAAPEPRFEHKVSNIFDDPLNAFGGQ

SEQ ID NO: 6614 - DNA, 4765 bp, Homo sapiens
acgccccgggcagcttggctggggctaggcttccggggctctgcggtcctcggcctgtgctggcagcctcggagcccaccgagccgggcggctgggatgatgaaccggacgacccccgaccaggagctggtgccggcgtcggagcccgtgtgggagcggccgtggtcggtggaggagatccgcaggagcagccagagctggtcgctggcggccgacgcgggcctactacagtttctacaggaattctcacagcaaactatctctaggacccatgaaatcaagaaacaagtggacggactaatccgggaaaccaaagccacagattgtcgcctgcataatgtcttcaatgacttccttatgctctctaatacccagttcatagagaatcgtgtatatgatgaagaagtggaggagccagtactcaaggctgaggcagaaaaaacagagcaggagaagacacgagagcagaaagaagtagatctcattcctaaagtccaggaggctgtgaactatggcttacaagtattggacagtgcctttgagcaacttgatatcaaagcaggaaactcagactccgaggaagatgatgctaatgggcgggtggaactgatccttgaaccaaagagtttcactcttgttgcccaagctggagtggcgcaatctcggctcactgcagcttctgtctcctgggttcaagcgattctcctgcctcagccttccaagtagctgggattacaggatctatacattgatcgtcctttaccatatctcattgggtcaaagctgttcatggaacaagaagatgtaggtcttggagagctgtccagtgaagaaggctctgtaggcagtgatcgtggcagtattgtggacactgaggaagagaaagaagaggaggagtcagatgaagattttgcccatcacagtgacaatgaacaaaaccagcacaccacacaaatgagtgatgaggaagaggatgatgatggctgtgacctttttgctgactctgagaaggaggaggaagatattgaggacattgaagaaaatactagacctaaaagaagcagacctacatcgtttgcagatgagctggctgcccgcatcaagggggatgccatgggtcgagtggacgaggagccgacaaccttaccctcaggagaagcaaaacctcggaagacactcaaagagaagaaggaaaggagaactccttcagacgatgaagaggataacttattcgcaccccccaagctgaccgacgaggacttctcgccatttggctctggaggtggcctgttcagtggcggcaaggggctatttgatgatgaggacgaggagagtgacctcttcacggaagcctcccaggatcggcaagctggagcctctgttaaggaggagtcttcatcatccaaacctggaaagaaaatcccagcaggagctgtttctgtatttttaggagacacggatgtgtttggtgctgcctccgttccatcactgaaggagccacagaagcctgagcagcccactccaaggaaaagcccctatggtccccctcccactggcctctttgatgatgatgatggtgatgatgatgacgactttttctcggcaccccacagcaaaccttctaaaacacgcaaagtccaatccactgccgatatctttggtgacgaagaaggagatctgttcaaagaaaaagccgtagcatcgccagaagccactgtgagtcagacagatgaaaataaagcaagagcagaaaaaaaggatttgttttcttctcaaagtgcgagtaacttaaaaggtgcatctctgctgcctggcaagctccccacgtcggtttccctgtttgatgatgaagatgaagaggataatctttttgggggtacagctgctaagaagcagacattgtctctacaagctcagagagaagagaaagcaaaagcctccgagctctccaaaaagaaagcatctgccctgttgttcagcagtgatgaggaggaccagtggaatattcctgcttcacagacccacttagcatctgacagcaggtctaaaggagaacccagggattctgggaccctccagagccaggaggccaaggctgtgaaaaagaccagtctctttgaggaagacaaagaagatgatctttttgccattgccaaggacagatacatcctacctcctattgttcccgaagttgtctgtcaagttttgtgtatggaaagtaattcataccttcatcagatctcaaaagaagctttacacacacaagaagaagttgagccaaaagaagacccagagagtgtcactcctctttgaagacgatgttgatagcggaggctctctgtttggctctcctcccacatctgttcctcctgcaacaaagaaaaaagagactgtctctgaggcaccacctttgctgttcagcgatgaagaagagaaggaggcacaacttggagtgaagtctgtggataagaaggttgagagtgccaaggagtcattaaaatttgggagaactgatgtggctgagtcagaaaaggaaggacttttgactagatctgctcaggaaacagtcaagcattctgatttattttcttcatcatccccatgggacaaaggaaccaagcctagaaccaaaactgttcttagcttgtttgatgaggaagaggataaaatggaagatcaaaacattatccaggctccacagaaagaagtaggaaagggctgcgatcctgatgcccaccccaagagcacaggtgtcttccaggatgaagagctgcttttcagccacaagctccaaaaggacaatgacccagatgttgacctttttgctggcaccaaaaaaaccaagctgttagagccaagtgttgggagcctgtttggggatgatgaagatgatgatcttttcagctctgccaagtcccagcctttggtacaagagaaaaagagagtagtgaaaaaagaccactctgttaactctttcaaaaaccagaaacatcctgaatccattcaaggtagtaaagaaaaaggcatatggaagccggaaacacctcaggcaaatttagcgatcaacccagcggccttgctgcccacagcggcttcccagatctctgaagtaaagcctgttttgccagaattggcttttccttcatctgaacacagaaggagccacggtctggaaagtgtgcctgtccttcccgggagtggggaggccggtgtgagttttgatcttccagctcaggcagacaccttacacagtgcaaacaagagccgtgtcaagatgagagggaagcgtagaccgcagacccgtgcagctaggcggctggctgctcaggagtccagcgaggctgaggacatgagcgtccccagaggacccattgcacagtgggctgatggcgccatttccccaaatggccatcggccacagctcagagcagccagtggagaagacagcactgaggaggccctggcagctgccgctgcaccttgggaaggtggtcctgtgcctggagtggacacaagcccctttgcaaagtctctgggtcattccagaggggaggctgacctttttgattctggggacattttttccacgggcactggatctcagtccgtggagagaacaaaacccaaggcaaagatagcagagaatcctgccaacccaccagtgggtggtaaagcaaagagccccatgtttcctgctctaggcgaggccagcagtgatgatgatctctttcagtctgctaaaccaaaaccagcaaagaaaacaaatccctttcctctcctggaagatgaggatgacctctttacagatcagaaagtcaagaagaatgagacaaaatccagtagtcagcaggatgtcatattaacaacacaagatatttttgaggatgatatatttgctacggaagcaattaaaccctctcagaaaaccagagagaaggagaaaacattggaatctaatttatttgatgataacattgatatctttgctgacttaactgtaaaaccaaaagaaaagtccaaaaagaaagtggaagccaagtctatatttgatgatgatatggatgacatcttctccactggtatccaggctaagacaaccaaaccaaaaagccgatctgcacaggccgcacctgaaccaagatttgaacacaaggtgtccaacatctttgatgatcccctgaatgcctttggaggccagtagagcacacagggtatccacatgttaccctgcagctacattgttgagttagtgatgatattgtatatgctcatggtcttaactggattacaaaaagcaaatactagaacagctagctcatcttttacccaatgtacttagtatttttctgcactggtttaatcatgcttaatactacaaaacaaaaataaatatttcacagtggttggtttgttttgtttttaaaccacagtttgatttagttagccttgctggggccataatatgcttcagggtgtgtaaaagaagaaatctctttgtggctttcatgggcagggaatctcagagatagcaaatgccacctgaccagaagtctttgttatatggatgggaaccctaacttagggcttgggcaggggaaagagaaagaagatgagagattatacttcatgagtcttagcaatatgggagcaggttttcactgaattctgagggtgcctctgcatgtcctccaaggcaaagtttggcaaactgtggcccccccactgtcatattttgttaataaaattttattggaacacaatcaca

SEQ ID NO: 6615 - protein, 688 aa, Homo sapiens; identical to SEQ ID NO: 6613

SEQ ID NO: 6616 - DNA, 4650 bp, Homo sapiens
acgccccgggcagcttggctggggctaggcttccggggctctgcggtcctcggcctgtgctggcagcctcggagcccaccgagccgggcggctgggatgatgaaccggacgacccccgaccaggagctggtgccggcgtcggagcccgtgtgggagcggccgtggtcggtggaggagatccgcaggagcagccagagctggtcgctggcggccgacgcgggcctactacagtttctacaggaattctcacagcaaactatctctaggacccatgaaatcaagaaacaagtggacggactaatccgggaaaccaaagccacagattgtcgcctgcataatgtcttcaatgacttccttatgctctctaatacccagttcatagagaatcgtgtatatgatgaagaagtggaggagccagtactcaaggctgaggcagaaaaaacagagcaggagaagacacgagagcagaaagaagtagatctcattcctaaagtccaggaggctgtgaactatggcttacaagtattggacagtgcctttgagcaacttgatatcaaagcaggaaactcagactccgaggaagatgatgctaatgggcgggtggaactgatccttgaaccaaagagtttcactcttgttgcccaagctggagtggcgcaatctcggctcactgcagcttctgtctcctgggttcaagcgattctcctgcctcagccttccaagtagctgggattacaggatctatacattgatcgtcctttaccatatctcattgggtcaaagctgttcatggaacaagaagatgtaggtcttggagagctgtccagtgaagaaggctctgtaggcagtgatcgtggcagtattgtggacactgaggaagagaaagaagaggaggagtcagatgaagattttgcccatcacagtgacaatgaacaaaaccagcacaccacacaaatgagtgatgaggaagaggatgatgatggctgtgacctttttgctgactctgagaaggaggaggaagatattgaggacattgaagaaaatactagacctaaaagaagcagacctacatcgtttgcagatgagctggctgcccgcatcaagggggatgccatgggtcgagtggacgaggagccgacaaccttaccctcaggagaagcaaaacctcggaagacactcaaagagaagaaggaaaggagaactccttcagacgatgaagaggataacttattcgcaccccccaagctgaccgacgaggacttctcgccatttggctctggaggtggcctgttcagtggcggcaaggggctatttgatgatgaggacgaggagagtgacctcttcacggaagcctcccaggatcggcaagctggagcctctgttaaggaggagtcttcatcatccaaacctggaaagaaaatcccagcaggagctgtttctgtatttttaggagacacggatgtgtttggtgctgcctccgttccatcactgaaggagccacagaagcctgagcagcccactccaaggaaaagcccctatggtccccctcccactggcctctttgatgatgatgatggtgatgatgatgacgactttttctcggcaccccacagcaaaccttctaaaacacgcaaagtccaatccactgccgatatctttggtgacgaagaaggagatctgttcaaagaaaaagccgtagcatcgccagaagccactgtgagtcagacagatgaaaataaagcaagagcagaaaaaaaggatttgttttcttctcaaagtgcgagtaacttaaaaggtgcatctctgctgcctggcaagctccccacgtcggtttccctgtttgatgatgaagatgaagaggataatctttttgggggtacagctgctaagaagcagacattgtctctacaagctcagagagaagagaaagcaaaagcctccgagctctccaaaaagaaagcatctgccctgttgttcagcagtgatgaggaggaccagtggaatattcctgcttcacagacccacttagcatctgacagcaggtctaaaggagaacccagggattctgggaccctccagagccaggaggccaaggctgtgaaaaagaccagtctctttgaggaagacaaagaagatgatctttttgccattgccaaggacagccaaaagaagacccagagagtgtcactcctctttgaagacgatgttgatagcggaggctctctgtttggctctcctcccacatctgttcctcctgcaacaaagaaaaaagagactgtctctgaggcaccacctttgctgttcagcgatgaagaagagaaggaggcacaacttggagtgaagtctgtggataagaaggttgagagtgccaaggagtcattaaaatttgggagaactgatgtggctgagtcagaaaaggaaggacttttgactagatctgctcaggaaacagtcaagcattctgatttattttcttcatcatccccatgggacaaaggaaccaagcctagaaccaaaactgttcttagcttgtttgatgaggaagaggataaaatggaagatcaaaacattatccaggctccacagaaagaagtaggaaagggctgcgatcctgatgcccaccccaagagcacaggtgtcttccaggatgaagagctgcttttcagccacaagctccaaaaggacaatgacccagatgttgacctttttgctggcaccaaaaaaaccaagctgttagagccaagtgttgggagcctgtttggggatgatgaagatgatgatcttttcagctctgccaagtcccagcctttggtacaagagaaaaagagagtagtgaaaaaagaccactctgttaactctttcaaaaaccagaaacatcctgaatccattcaaggtagtaaagaaaaaggcatatggaagccggaaacacctcaggcaaatttagcgatcaacccagcggccttgctgcccacagcggcttcccagatctctgaagtaaagcctgttttgccagaattggcttttccttcatctgaacacagaaggagccacggtctggaaagtgtgcctgtccttcccgggagtggggaggccggtgtgagttttgatcttccagctcaggcagacaccttacacagtgcaaacaagagccgtgtcaagatgagagggaagcgtagaccgcagacccgtgcagctaggcggctggctgctcaggagtccagcgaggctgaggacatgagcgtccccagaggacccattgcacagtgggctgatggcgccatttccccaaatggccatcggccacagctcagagcagccagtggagaagacagcactgaggaggccctggcagctgccgctgcaccttgggaaggtggtcctgtgcctggagtggacacaagcccctttgcaaagtctctgggtcattccagaggggaggctgacctttttgattctggggacattttttccacgggcactggatctcagtccgtggagagaacaaaacccaaggcaaagatagcagagaatcctgccaacccaccagtgggtggtaaagcaaagagccccatgtttcctgctctaggcgaggccagcagtgatgatgatctctttcagtctgctaaaccaaaaccagcaaagaaaacaaatccctttcctctcctggaagatgaggatgacctctttacagatcagaaagtcaagaagaatgagacaaaatccagtagtcagcaggatgtcatattaacaacacaagatatttttgaggatgatatatttgctacggaagcaattaaaccctctcagaaaaccagagagaaggagaaaacattggaatctaatttatttgatgataacattgatatctttgctgacttaactgtaaaaccaaaagaaaagtccaaaaagaaagtggaagccaagtctatatttgatgatgatatggatgacatcttctccactggtatccaggctaagacaaccaaaccaaaaagccgatctgcacaggccgcacctgaaccaagatttgaacacaaggtgtccaacatctttgatgatcccctgaatgcctttggaggccagtagagcacacagggtatccacatgttaccctgcagctacattgttgagttagtgatgatattgtatatgctcatggtcttaactggattacaaaaagcaaatactagaacagctagctcatcttttacccaatgtacttagtatttttctgcactggtttaatcatgcttaatactacaaaacaaaaataaatatttcacagtggttggtttgttttgtttttaaaccacagtttgatttagttagccttgctggggccataatatgcttcagggtgtgtaaaagaagaaatctctttgtggctttcatgggcagggaatctcagagatagcaaatgccacctgaccagaagtctttgttatatggatgggaaccctaacttagggcttgggcaggggaaagagaaagaagatgagagattatacttcatgagtcttagcaatatgggagcaggttttcactgaattctgagggtgcctctgcatgtcctccaaggcaaagtttggcaaactgtggcccccccactgtcatattttgttaataaaattttattggaacacaatcaca

SEQ ID NO: 6617 - protein, 1098 aa, Homo sapiens
MEQEDVGLGELSSEEGSVGSDRGSIVDTEEEKEEEESDEDFAHHSDNEQNQHTTQMSDEEEDDDGCDLFADSEKEEEDIEDIEENTRPKRSRPTSFADELAARIKGDAMGRVDEEPTTLPSGEAKPRKTLKEKKERRTPSDDEEDNLFAPPKLTDEDFSPFGSGGGLFSGGKGLFDDEDEESDLFTEASQDRQAGASVKEESSSSKPGKKIPAGAVSVFLGDTDVFGAASVPSLKEPQKPEQPTPRKSPYGPPPTGLFDDDDGDDDDDFFSAPHSKPSKTRKVQSTADIFGDEEGDLFKEKAVASPEATVSQTDENKARAEKKDLFSSQSASNLKGASLLPGKLPTSVSLFDDEDEEDNLFGGTAAKKQTLSLQAQREEKAKASELSKKKASALLFSSDEEDQWNIPASQTHLASDSRSKGEPRDSGTLQSQEAKAVKKTSLFEEDKEDDLFAIAKDSQKKTQRVSLLFEDDVDSGGSLFGSPPTSVPPATKKKETVSEAPPLLFSDEEEKEAQLGVKSVDKKVESAKESLKFGRTDVAESEKEGLLTRSAQETVKHSDLFSSSSPWDKGTKPRTKTVLSLFDEEEDKMEDQNIIQAPQKEVGKGCDPDAHPKSTGVFQDEELLFSHKLQKDNDPDVDLFAGTKKTKLLEPSVGSLFGDDEDDDLFSSAKSQPLVQEKKRVVKKDHSVNSFKNQKHPESIQGSKEKGIWKPETPQANLAINPAALLPTAASQISEVKPVLPELAFPSSEHRRSHGLESVPVLPGSGEAGVSFDLPAQADTLHSANKSRVKMRGKRRPQTRAARRLAAQESSEAEDMSVPRGPIAQWADGAISPNGHRPQLRAASGEDSTEEALAAAAAPWEGGPVPGVDTSPFAKSLGHSRGEADLFDSGDIFSTGTGSQSVERTKPKAKIAENPANPPVGGKAKSPMFPALGEASSDDDLFQSAKPKPAKKTNPFPLLEDEDDLFTDQKVKKNETKSSSQQDVILTTQDIFEDDIFATEAIKPSQKTREKEKTLESNLFDDNIDIFADLTVKPKEKSKKKVEAKSIFDDDMDDIFSTGIQAKTTKPKSRSAQAAPEPRFEHKVSNIFDDPLNAFGGQ

SEQ ID NO: 6618 - DNA, 4690 bp, Homo sapiens
acgccccgggcagcttggctggggctaggcttccggggctctgcggtcctcggcctgtgctggcagcctcggagcccaccgagccgggcggctgggatgatgaaccggacgacccccgaccaggagctggtgccggcgtcggagcccgtgtgggagcggccgtggtcggtggaggagatccgcaggagcagccagagctggtcgctggcggccgacgcgggcctactacagtttctacaggaattctcacagcaaactatctctaggacccatgaaatcaagaaacaagtggacggactaatccgggaaaccaaagccacagattgtcgcctgcataatgtcttcaatgacttccttatgctctctaatacccagttcatagagaatcgtgtatatgatgaagaagtggaggagccagtactcaaggctgaggcagaaaaaacagagcaggagaagacacgagagcagaaagaagtagatctcattcctaaagtccaggaggctgtgaactatggcttacaagtattggacagtgcctttgagcaacttgatatcaaagcaggaaactcagactccgaggaagatgatgctaatgggcgggtggaactgatccttgaaccaaaggatctatacattgatcgtcctttaccatatctcattgggtcaaagctgttcatggaacaagaagatgtaggtcttggagagctgtccagtgaagaaggctctgtaggcagtgatcgtggcagtattgtggacactgaggaagagaaagaagaggaggagtcagatgaagattttgcccatcacagtgacaatgaacaaaaccagaaaagaagcagacctacatcgtttgcagatgagctggctgcccgcatcaagggggatgccatgggtcgagtggacgaggagccgacaaccttaccctcaggagaagcaaaacctcggaagacactcaaagagaagaaggaaaggagaactccttcagacgatgaagaggataacttattcgcaccccccaagctgaccgacgaggacttctcgccatttggctctggaggtggcctgttcagtggcggcaaggggctatttgatgatgaggacgaggagagtgacctcttcacggaagcctcccaggatcggcaagctggagcctctgttaaggaggagtcttcatcatccaaacctggaaagaaaatcccagcaggagctgtttctgtatttttaggagacacggatgtgtttggtgctgcctccgttccatcactgaaggagccacagaagcctgagcagcccactccaaggaaaagcccctatggtccccctcccactggcctctttgatgatgatgatggtgatgatgatgacgactttttctcggcaccccacagcaaaccttctaaaacacgcaaagtccaatccactgccgatatctttggtgacgaagaaggagatctgttcaaagaaaaagccgtagcatcgccagaagccactgtgagtcagacagatgaaaataaagcaagagcagaaaaaaaggttaccttatcttacagcaaaaatctcaagccctcatcagaaacaaagactcaaaaaggcttattttcagatgaggaggactctgaggatttgttttcttctcaaagtgcgagtaacttaaaaggtgcatctctgctgcctggcaagctccccacgtcggtttccctgtttgatgatgaagatgaagaggataatctttttgggggtacagctgctaagaagcagacattgtctctacaagctcagagagaagagaaagcaaaagcctccgagctctccaaaaagaaagcatctgccctgttgttcagcagtgatgaggaggaccagtggaatattcctgcttcacagacccacttagcatctgacagcaggtctaaaggagaacccagggattctgggaccctccagagccaggaggccaaggctgtgaaaaagaccagtctctttgaggaagacaaagaagatgatctttttgccattgccaaggacagatacatcctacctcctattgttcccgaagttgtctgtcaagttttgtgtatggaaagtaattcataccttcatcagatctcaaaagaagctttacacacacaagaagaagttgagccaaaagaagacccagagagtgtcactcctctttgaagacgatgttgatagcggaggctctctgtttggctctcctcccacatctgttcctcctgcaacaaagaaaaaagagactgtctctgaggcaccacctttgctgttcagcgatgaagaagagaaggaggcacaacttggagtgaagtctgtggataagaaggttgagagtgccaaggagtcattaaaatttgggagaactgatgtggctgagtcagaaaaggaaggacttttgactagatctgctcaggaaacagtcaagcattctgatttattttcttcatcatccccatgggacaaaggaaccaagcctagaaccaaaactgttcttagcttgtttgatgaggaagaggataaaatggaagatcaaaacattatccaggctccacagaaagaagtaggaaagggctgcgatcctgatgcccaccccaagagcacaggtgtcttccaggatgaagagctgcttttcagccacaagctccaaaaggacaatgacccagatgttgacctttttgctggcaccaaaaaaaccaagctgttagagccaagtgttgggagcctgtttggggatgatgaagatgatgatcttttcagctctgccaagtcccagcctttggtacaagagaaaaagagagtagtgaaaaaagaccactctgttaactctttcaaaaaccagaaacatcctgaatccattcaaggtagtaaagaaaaaggcatatggaagccggaaacacctcaggactcatcaggtctcgctccatttaaaaccaaagaaccatccactcggatcgggaagatacaagcaaatttagcgatcaacccagcggccttgctgcccacagcggcttcccagatctctgaagtaaagcctgttttgccagaattggcttttccttcatctgaacacagaaggagccacggtctggaaagtgtgcctgtccttcccgggagtggggaggccggtgtgagttttgatcttccagctcaggcagacaccttacacagtgcaaacaagagccgtgtcaagatgagagggaagcgtagaccgcagacccgtgcagctaggcggctggctgctcaggagtccagcgaggctgaggacatgagcgtccccagaggacccattgcacagtgggctgatggcgccatttccccaaatggccatcggccacagctcagagcagccagtggagaagacagcactgaggaggccctggcagctgccgctgcaccttgggaaggtggtcctgtgcctggagtggacacaagcccctttgcaaagtctctgggtcattccagaggggaggctgacctttttgattctggggacattttttccacgggcactggatctcagtccgtggagagaacaaaacccaaggcaaagatagcagagaatcctgccaacccaccagtgggtggtaaagcaaagagccccatgtttcctgctctaggcgaggccagcagtgatgatgatctctttcagtctgctaaaccaaaaccagcaaagaaaacaaatccctttcctctcctggaagatgaggatgacctctttacagatcagaaagtcaagaagaatgagacaaaatccagtagtcagcaggatgtcatattaacaacacaagatatttttgaggatgatatatttgctacggaagcaattaaaccctctcagaaaaccagagagaaggagaaaacattggaatctaatttatttgatgataacattgatatctttgctgacttaactgtaaaaccaaaagaaaagtccaaaaagaaagtggaagccaagtctatatttgatgatgatatggatgacatcttctccactggtatccaggctaagacaaccaaaccaaaaagccgatctgcacaggccgcacctgaaccaagatttgaacacaaggtgtccaacatctttgatgatcccctgaatgcctttggaggccagtagagcacacagggtatccacatgttaccctgcagctacattgttgagttagtgatgatattgtatatgctcatggtcttaactggattacaaaaagcaaatactagaacagctagctcatcttttacccaatgtacttagtatttttctgcactggtttaatcatgcttaatactacaaaacaaaaataaatatttcacagtggttggtttgttttgtttttaaaccacagtttgatttagttagccttgctggggccataatatgcttcagggtgtgtaaaagaagaaatctctttgtggctttcatgggcagggaatctcagagatagcaaatgccacctgaccagaagtctttgttatatggatgggaaccctaacttagggcttgggcaggggaaagagaaagaagatgagagattatacttcatgagtcttagcaatatgggagcaggttttcactgaattctgagggtgcctctgcatgtcctccaaggcaaagtttggcaaactgtggcccccccactgtcatattttgttaataaaattttattggaacacaatcaca

SEQ ID NO: 6619 - protein, 709 aa, Homo sapiens; identical to SEQ ID NO: 6611

SEQ ID NO: 6620 - DNA, 4477 bp, Homo sapiens
acgccccgggcagcttggctggggctaggcttccggggctctgcggtcctcggcctgtgctggcagcctcggagcccaccgagccgggcggctgggatgatgaaccggacgacccccgaccaggagctggtgccggcgtcggagcccgtgtgggagcggccgtggtcggtggaggagatccgcaggagcagccagagctggtcgctggcggccgacgcgggcctactacagtttctacaggaattctcacagcaaactatctctaggacccatgaaatcaagaaacaagtggacggactaatccgggaaaccaaagccacagattgtcgcctgcataatgtcttcaatgacttccttatgctctctaatacccagttcatagagaatcgtgtatatgatgaagaagtggaggagccagtactcaaggctgaggcagaaaaaacagagcaggagaagacacgagagcagaaagaagtagatctcattcctaaagtccaggaggctgtgaactatggcttacaagtattggacagtgcctttgagcaacttgatatcaaagcaggaaactcagactccgaggaagatgatgctaatgggcgggtggaactgatccttgaaccaaagagtttcactcttgttgcccaagctggagtggcgcaatctcggctcactgcagcttctgtctcctgggttcaagcgattctcctgcctcagccttccaagtagctgggattacaggatctatacattgatcgtcctttaccatatctcattgggtcaaagctgttcatggaacaagaagatgtaggtcttggagagctgtccagtgaagaaggctctgtaggcagtgatcgtggcagtattgtggacactgaggaagagaaagaagaggaggagtcagatgaagattttgcccatcacagtgacaatgaacaaaaccagcacaccacacaaatgagtgatgaggaagaggatgatgatggctgtgacctttttgctgactctgagaaggaggaggaagatattgaggacattgaagaaaatactagacctaaaagaagcagacctacatcgtttgcagatgagctggctgcccgcatcaagggggatgccatgggtcgagtggacgaggagccgacaaccttaccctcaggagaagcaaaacctcggaagacactcaaagagaagaaggaaaggagaactccttcagacgatgaagaggataacttattcgcaccccccaagctgaccgacgaggacttctcgccatttggctctggaggtggcctgttcagtggcggcaaggggctatttgatgatgaggacgaggagagtgacctcttcacggaagcctcccaggatcggcaagctggagcctctgttaaggaggagtcttcatcatccaaacctggaaagaaaatcccagcaggagctgtttctgtatttttaggagacacggatgtgtttggtgctgcctccgttccatcactgaaggagccacagaagcctgagcagcccactccaaggaaaagcccctatggtccccctcccactggcctctttgatgatgatgatggtgatgatgatgacgactttttctcggcaccccacagcaaaccttctaaaacacgcaaagtccaatccactgccgatatctttggtgacgaagaaggagatctgttcaaagaaaaagccgtagcatcgccagaagccactgtgagtcagacagatgaaaataaagcaagagcagaaaaaaaggttaccttatcttacagcaaaaatctcaagccctcatcagaaacaaagactcaaaaaggcttattttcagatgaggaggactctgaggatttgttttcttctcaaagtgcgagtaacttaaaaggtgcatctctgctgcctggcaagctccccacgtcggtttccctgtttgatgatgaagatgaagaggataatctttttgggggtacagctgctaagaagcagacattgtctctacaagctcagagagaagagaaagcaaaagcctccgagctctccaaaaagaaagcatctgccctgttgttcagcagtgatgaggagccaaaagaagacccagagagtgtcactcctctttgaagacgatgttgatagcggaggctctctgtttggctctcctcccacatctgttcctcctgcaacaaaggaaggacttttgactagatctgctcaggaaacagtcaagcattctgatttattttcttcatcatccccatgggacaaaggaaccaagcctagaaccaaaactgttcttagcttgtttgatgaggaagaggataaaatggaagatcaaaacattatccaggctccacagaaagaagtaggaaagggctgcgatcctgatgcccaccccaagagcacaggtgtcttccaggatgaagagctgcttttcagccacaagctccaaaaggacaatgacccagatgttgacctttttgctggcaccaaaaaaaccaagctgttagagccaagtgttgggagcctgtttggggatgatgaagatgatgatcttttcagctctgccaagtcccagcctttggtacaagagaaaaagagagtagtgaaaaaagaccactctgttaactctttcaaaaaccagaaacatcctgaatccattcaaggtagtaaagaaaaaggcatatggaagccggaaacacctcaggactcatcaggtctcgctccatttaaaaccaaagaaccatccactcggatcgggaagatacaagcaaatttagcgatcaacccagcggccttgctgcccacagcggcttcccagatctctgaagtaaagcctgttttgccagaattggcttttccttcatctgaacacagaaggagccacggtctggaaagtgtgcctgtccttcccgggagtggggaggccggtgtgagttttgatcttccagctcaggcagacaccttacacagtgcaaacaagagccgtgtcaagatgagagggaagcgtagaccgcagacccgtgcagctaggcggctggctgctcaggagtccagcgaggctgaggacatgagcgtccccagaggacccattgcacagtgggctgatggcgccatttccccaaatggccatcggccacagctcagagcagccagtggagaagacagcactgaggaggccctggcagctgccgctgcaccttgggaaggtggtcctgtgcctggagtggacacaagcccctttgcaaagtctctgggtcattccagaggggaggctgacctttttgattctggggacattttttccacgggcactggatctcagtccgtggagagaacaaaacccaaggcaaagatagcagagaatcctgccaacccaccagtgggtggtaaagcaaagagccccatgtttcctgctctaggcgaggccagcagtgatgatgatctctttcagtctgctaaaccaaaaccagcaaagaaaacaaatccctttcctctcctggaagatgaggatgacctctttacagatcagaaagtcaagaagaatgagacaaaatccagtagtcagcaggatgtcatattaacaacacaagatatttttgaggatgatatatttgctacggaagcaattaaaccctctcagaaaaccagagagaaggagaaaacattggaatctaatttatttgatgataacattgatatctttgctgacttaactgtaaaaccaaaagaaaagtccaaaaagaaagtggaagccaagtctatatttgatgatgatatggatgacatcttctccactggtatccaggctaagacaaccaaaccaaaaagccgatctgcacaggccgcacctgaaccaagatttgaacacaaggtgtccaacatctttgatgatcccctgaatgcctttggaggccagtagagcacacagggtatccacatgttaccctgcagctacattgttgagttagtgatgatattgtatatgctcatggtcttaactggattacaaaaagcaaatactagaacagctagctcatcttttacccaatgtacttagtatttttctgcactggtttaatcatgcttaatactacaaaacaaaaataaatatttcacagtggttggtttgttttgtttttaaaccacagtttgatttagttagccttgctggggccataatatgcttcagggtgtgtaaaagaagaaatctctttgtggctttcatgggcagggaatctcagagatagcaaatgccacctgaccagaagtctttgttatatggatgggaaccctaacttagggcttgggcaggggaaagagaaagaagatgagagattatacttcatgagtcttagcaatatgggagcaggttttcactgaattctgagggtgcctctgcatgtcctccaaggcaaagtttggcaaactgtggcccccccactgtcatattttgttaataaaattttattggaacacaatcaca

SEQ ID NO: 6621 - protein, 660 aa, Homo sapiens
MMKMKRIIFLGVQLLRSRHCLYKLREKRKQKPPSSPKRKHLPCCSAVMRSQKKTQRVSLLFEDDVDSGGSLFGSPPTSVPPATKEGLLTRSAQETVKHSDLFSSSSPWDKGTKPRTKTVLSLFDEEEDKMEDQNIIQAPQKEVGKGCDPDAHPKSTGVFQDEELLFSHKLQKDNDPDVDLFAGTKKTKLLEPSVGSLFGDDEDDDLFSSAKSQPLVQEKKRVVKKDHSVNSFKNQKHPESIQGSKEKGIWKPETPQDSSGLAPFKTKEPSTRIGKIQANLAINPAALLPTAASQISEVKPVLPELAFPSSEHRRSHGLESVPVLPGSGEAGVSFDLPAQADTLHSANKSRVKMRGKRRPQTRAARRLAAQESSEAEDMSVPRGPIAQWADGAISPNGHRPQLRAASGEDSTEEALAAAAAPWEGGPVPGVDTSPFAKSLGHSRGEADLFDSGDIFSTGTGSQSVERTKPKAKIAENPANPPVGGKAKSPMFPALGEASSDDDLFQSAKPKPAKKTNPFPLLEDEDDLFTDQKVKKNETKSSSQQDVILTTQDIFEDDIFATEAIKPSQKTREKEKTLESNLFDDNIDIFADLTVKPKEKSKKKVEAKSIFDDDMDDIFSTGIQAKTTKPKSRSAQAAPEPRFEHKVSNIFDDPLNAFGGQ

SEQ ID NO: 6622 - DNA, 4366 bp, Homo sapiens
acgccccgggcagcttggctggggctaggcttccggggctctgcggtcctcggcctgtgctggcagcctcggagcccaccgagccgggcggctgggatgatgaaccggacgacccccgaccaggagctggtgccggcgtcggagcccgtgtgggagcggccgtggtcggtggaggagatccgcaggagcagccagagctggtcgctggcggccgacgcgggcctactacagtttctacaggaattctcacagcaaactatctctaggacccatgaaatcaagaaacaagtggacggactaatccgggaaaccaaagccacagattgtcgcctgcataatgtcttcaatgacttccttatgctctctaatacccagttcatagagaatcgtgtatatgatgaagaagtggaggagccagtactcaaggctgaggcagaaaaaacagagcaggagaagacacgagagcagaaagaagtagatctcattcctaaagtccaggaggctgtgaactatggcttacaagtattggacagtgcctttgagcaacttgatatcaaagcaggaaactcagactccgaggaagatgatgctaatgggcgggtggaactgatccttgaaccaaagagtttcactcttgttgcccaagctggagtggcgcaatctcggctcactgcagcttctgtctcctgggttcaagcgattctcctgcctcagccttccaagtagctgggattacaggatctatacattgatcgtcctttaccatatctcattgggtcaaagctgttcatggaacaagaagatgtaggtcttggagagctgtccagtgaagaaggctctgtaggcagtgatcgtggcagtattgtggacactgaggaagagaaagaagaggaggagtcagatgaagattttgcccatcacagtgacaatgaacaaaaccagaaaagaagcagacctacatcgtttgcagatgagctggctgcccgcatcaagggggatgccatgggtcgagtggacgaggagccgacaaccttaccctcaggagaagcaaaacctcggaagacactcaaagagaagaaggaaaggagaactccttcagacgatgaagaggataacttattcgcaccccccaagctgaccgacgaggacttctcgccatttggctctggaggtggcctgttcagtggcggcaaggggctatttgatgatgaggacgaggagagtgacctcttcacggaagcctcccaggatcggcaagctggagcctctgttaaggaggagtcttcatcatccaaacctggaaagaaaatcccagcaggagctgtttctgtatttttaggagacacggatgtgtttggtgctgcctccgttccatcactgaaggagccacagaagcctgagcagcccactccaaggaaaagcccctatggtccccctcccactggcctctttgatgatgatgatggtgatgatgatgacgactttttctcggcaccccacagcaaaccttctaaaacacgcaaagtccaatccactgccgatatctttggtgacgaagaaggagatctgttcaaagaaaaagccgtagcatcgccagaagccactgtgagtcagacagatgaaaataaagcaagagcagaaaaaaaggttaccttatcttacagcaaaaatctcaagccctcatcagaaacaaagactcaaaaaggcttattttcagatgaggaggactctgaggatttgttttcttctcaaagtgcgagtaacttaaaaggtgcatctctgctgcctggcaagctccccacgtcggtttccctgtttgatgatgaagatgaagaggataatctttttgggggtacagctgctaagaagcagacattgtctctacaagctcagagagaagagaaagcaaaagcctccgagctctccaaaaagaaagcatctgccctgttgttcagcagtgatgaggagccaaaagaagacccagagagtgtcactcctctttgaagacgatgttgatagcggaggctctctgtttggctctcctcccacatctgttcctcctgcaacaaaggaaggacttttgactagatctgctcaggaaacagtcaagcattctgatttattttcttcatcatccccatgggacaaaggaaccaagcctagaaccaaaactgttcttagcttgtttgatgaggaagaggataaaatggaagatcaaaacattatccaggctccacagaaagaagtaggaaagggctgcgatcctgatgcccaccccaagagcacaggtgtcttccaggatgaagagctgcttttcagccacaagctccaaaaggacaatgacccagatgttgacctttttgctggcaccaaaaaaaccaagctgttagagccaagtgttgggagcctgtttggggatgatgaagatgatgatcttttcagctctgccaagtcccagcctttggtacaagagaaaaagagagtagtgaaaaaagaccactctgttaactctttcaaaaaccagaaacatcctgaatccattcaaggtagtaaagaaaaaggcatatggaagccggaaacacctcaggactcatcaggtctcgctccatttaaaaccaaagaaccatccactcggatcgggaagatacaagcaaatttagcgatcaacccagcggccttgctgcccacagcggcttcccagatctctgaagtaaagcctgttttgccagaattggcttttccttcatctgaacacagaaggagccacggtctggaaagtgtgcctgtccttcccgggagtggggaggccggtgtgagttttgatcttccagctcaggcagacaccttacacagtgcaaacaagagccgtgtcaagatgagagggaagcgtagaccgcagacccgtgcagctaggcggctggctgctcaggagtccagcgaggctgaggacatgagcgtccccagaggacccattgcacagtgggctgatggcgccatttccccaaatggccatcggccacagctcagagcagccagtggagaagacagcactgaggaggccctggcagctgccgctgcaccttgggaaggtggtcctgtgcctggagtggacacaagcccctttgcaaagtctctgggtcattccagaggggaggctgacctttttgattctggggacattttttccacgggcactggatctcagtccgtggagagaacaaaacccaaggcaaagatagcagagaatcctgccaacccaccagtgggtggtaaagcaaagagccccatgtttcctgctctaggcgaggccagcagtgatgatgatctctttcagtctgctaaaccaaaaccagcaaagaaaacaaatccctttcctctcctggaagatgaggatgacctctttacagatcagaaagtcaagaagaatgagacaaaatccagtagtcagcaggatgtcatattaacaacacaagatatttttgaggatgatatatttgctacggaagcaattaaaccctctcagaaaaccagagagaaggagaaaacattggaatctaatttatttgatgataacattgatatctttgctgacttaactgtaaaaccaaaagaaaagtccaaaaagaaagtggaagccaagtctatatttgatgatgatatggatgacatcttctccactggtatccaggctaagacaaccaaaccaaaaagccgatctgcacaggccgcacctgaaccaagatttgaacacaaggtgtccaacatctttgatgatcccctgaatgcctttggaggccagtagagcacacagggtatccacatgttaccctgcagctacattgttgagttagtgatgatattgtatatgctcatggtcttaactggattacaaaaagcaaatactagaacagctagctcatcttttacccaatgtacttagtatttttctgcactggtttaatcatgcttaatactacaaaacaaaaataaatatttcacagtggttggtttgttttgtttttaaaccacagtttgatttagttagccttgctggggccataatatgcttcagggtgtgtaaaagaagaaatctctttgtggctttcatgggcagggaatctcagagatagcaaatgccacctgaccagaagtctttgttatatggatgggaaccctaacttagggcttgggcaggggaaagagaaagaagatgagagattatacttcatgagtcttagcaatatgggagcaggttttcactgaattctgagggtgcctctgcatgtcctccaaggcaaagtttggcaaactgtggcccccccactgtcatattttgttaataaaattttattggaacacaatcaca

SEQ ID NO: 6623 - protein, 660 aa, Homo sapiens; identical to SEQ ID NO: 6621

SEQ ID NO: 6624 - DNA, 4651 bp, Homo sapiens
acgccccgggcagcttggctggggctaggcttccggggctctgcggtcctcggcctgtgctggcagcctcggagcccaccgagccgggcggctgggatgatgaaccggacgacccccgaccaggagctggtgccggcgtcggagcccgtgtgggagcggccgtggtcggtggaggagatccgcaggagcagccagagctggtcgctggcggccgacgcgggcctactacagtttctacaggaattctcacagcaaactatctctaggacccatgaaatcaagaaacaagtggacggactaatccgggaaaccaaagccacagattgtcgcctgcataatgtcttcaatgacttccttatgctctctaatacccagttcatagagaatcgtgtatatgatgaagaagtggaggagccagtactcaaggctgaggcagaaaaaacagagcaggagaagacacgagagcagaaagaagtagatctcattcctaaagtccaggaggctgtgaactatggcttacaagtattggacagtgcctttgagcaacttgatatcaaagcaggaaactcagactccgaggaagatgatgctaatgggcgggtggaactgatccttgaaccaaaggatctatacattgatcgtcctttaccatatctcattgggtcaaagctgttcatggaacaagaagatgtaggtcttggagagctgtccagtgaagaaggctctgtaggcagtgatcgtggcagtattgtggacactgaggaagagaaagaagaggaggagtcagatgaagattttgcccatcacagtgacaatgaacaaaaccagcacaccacacaaatgagtgatgaggaagaggatgatgatggctgtgacctttttgctgactctgagaaggaggaggaagatattgaggacattgaagaaaatactagacctaaaagaagcagacctacatcgtttgcagatgagctggctgcccgcatcaagggggatgccatgggtcgagtggacgaggagccgacaaccttaccctcaggagaagcaaaacctcggaagacactcaaagagaagaaggaaaggagaactccttcagacgatgaagaggataacttattcgcaccccccaagctgaccgacgaggacttctcgccatttggctctggaggtggcctgttcagtggcggcaaggggctatttgatgatgaggacgaggagagtgacctcttcacggaagcctcccaggatcggcaagctggagcctctgttaaggaggagtcttcatcatccaaacctggaaagaaaatcccagcaggagctgtttctgtatttttaggagacacggatgtgtttggtgctgcctccgttccatcactgaaggagccacagaagcctgagcagcccactccaaggaaaagcccctatggtccccctcccactggcctctttgatgatgatgatggtgatgatgatgacgactttttctcggcaccccacagcaaaccttctaaaacacgcaaagtccaatccactgccgatatctttggtgacgaagaaggagatctgttcaaagaaaaagccgtagcatcgccagaagccactgtgagtcagacagatgaaaataaagcaagagcagaaaaaaaggatttgttttcttctcaaagtgcgagtaacttaaaaggtgcatctctgctgcctggcaagctccccacgtcggtttccctgtttgatgatgaagatgaagaggataatctttttgggggtacagctgctaagaagcagacattgtctctacaagctcagagagaagagaaagcaaaagcctccgagctctccaaaaagaaagcatctgccctgttgttcagcagtgatgaggaggaccagtggaatattcctgcttcacagacccacttagcatctgacagcaggtctaaaggagaacccagggattctgggaccctccagagccaggaggccaaggctgtgaaaaagaccagtctctttgaggaagacaaagaagatgatctttttgccattgccaaggacagatacatcctacctcctattgttcccgaagttgtctgtcaagttttgtgtatggaaagtaattcataccttcatcagatctcaaaagaagctttacacacacaagaagaagttgagccaaaagaagacccagagagtgtcactcctctttgaagacgatgttgatagcggaggctctctgtttggctctcctcccacatctgttcctcctgcaacaaagaaaaaagagactgtctctgaggcaccacctttgctgttcagcgatgaagaagagaaggaggcacaacttggagtgaagtctgtggataagaaggttgagagtgccaaggagtcattaaaatttgggagaactgatgtggctgagtcagaaaaggaaggacttttgactagatctgctcaggaaacagtcaagcattctgatttattttcttcatcatccccatgggacaaaggaaccaagcctagaaccaaaactgttcttagcttgtttgatgaggaagaggataaaatggaagatcaaaacattatccaggctccacagaaagaagtaggaaagggctgcgatcctgatgcccaccccaagagcacaggtgtcttccaggatgaagagctgcttttcagccacaagctccaaaaggacaatgacccagatgttgacctttttgctggcaccaaaaaaaccaagctgttagagccaagtgttgggagcctgtttggggatgatgaagatgatgatcttttcagctctgccaagtcccagcctttggtacaagagaaaaagagagtagtgaaaaaagaccactctgttaactctttcaaaaaccagaaacatcctgaatccattcaaggtagtaaagaaaaaggcatatggaagccggaaacacctcaggcaaatttagcgatcaacccagcggccttgctgcccacagcggcttcccagatctctgaagtaaagcctgttttgccagaattggcttttccttcatctgaacacagaaggagccacggtctggaaagtgtgcctgtccttcccgggagtggggaggccggtgtgagttttgatcttccagctcaggcagacaccttacacagtgcaaacaagagccgtgtcaagatgagagggaagcgtagaccgcagacccgtgcagctaggcggctggctgctcaggagtccagcgaggctgaggacatgagcgtccccagaggacccattgcacagtgggctgatggcgccatttccccaaatggccatcggccacagctcagagcagccagtggagaagacagcactgaggaggccctggcagctgccgctgcaccttgggaaggtggtcctgtgcctggagtggacacaagcccctttgcaaagtctctgggtcattccagaggggaggctgacctttttgattctggggacattttttccacgggcactggatctcagtccgtggagagaacaaaacccaaggcaaagatagcagagaatcctgccaacccaccagtgggtggtaaagcaaagagccccatgtttcctgctctaggcgaggccagcagtgatgatgatctctttcagtctgctaaaccaaaaccagcaaagaaaacaaatccctttcctctcctggaagatgaggatgacctctttacagatcagaaagtcaagaagaatgagacaaaatccagtagtcagcaggatgtcatattaacaacacaagatatttttgaggatgatatatttgctacggaagcaattaaaccctctcagaaaaccagagagaaggagaaaacattggaatctaatttatttgatgataacattgatatctttgctgacttaactgtaaaaccaaaagaaaagtccaaaaagaaagtggaagccaagtctatatttgatgatgatatggatgacatcttctccactggtatccaggctaagacaaccaaaccaaaaagccgatctgcacaggccgcacctgaaccaagatttgaacacaaggtgtccaacatctttgatgatcccctgaatgcctttggaggccagtagagcacacagggtatccacatgttaccctgcagctacattgttgagttagtgatgatattgtatatgctcatggtcttaactggattacaaaaagcaaatactagaacagctagctcatcttttacccaatgtacttagtatttttctgcactggtttaatcatgcttaatactacaaaacaaaaataaatatttcacagtggttggtttgttttgtttttaaaccacagtttgatttagttagccttgctggggccataatatgcttcagggtgtgtaaaagaagaaatctctttgtggctttcatgggcagggaatctcagagatagcaaatgccacctgaccagaagtctttgttatatggatgggaaccctaacttagggcttgggcaggggaaagagaaagaagatgagagattatacttcatgagtcttagcaatatgggagcaggttttcactgaattctgagggtgcctctgcatgtcctccaaggcaaagtttggcaaactgtggcccccccactgtcatattttgttaataaaattttattggaacacaatcaca

SEQ ID NO: 6625 - protein, 700 aa, Homo sapiens
MMNRTTPDQELVPASEPVWERPWSVEEIRRSSQSWSLAADAGLLQFLQEFSQQTISRTHEIKKQVDGLIRETKATDCRLHNVFNDFLMLSNTQFIENRVYDEEVEEPVLKAEAEKTEQEKTREQKEVDLIPKVQEAVNYGLQVLDSAFEQLDIKAGNSDSEEDDANGRVELILEPKDLYIDRPLPYLIGSKLFMEQEDVGLGELSSEEGSVGSDRGSIVDTEEEKEEEESDEDFAHHSDNEQNQHTTQMSDEEEDDDGCDLFADSEKEEEDIEDIEENTRPKRSRPTSFADELAARIKGDAMGRVDEEPTTLPSGEAKPRKTLKEKKERRTPSDDEEDNLFAPPKLTDEDFSPFGSGGGLFSGGKGLFDDEDEESDLFTEASQDRQAGASVKEESSSSKPGKKIPAGAVSVFLGDTDVFGAASVPSLKEPQKPEQPTPRKSPYGPPPTGLFDDDDGDDDDDFFSAPHSKPSKTRKVQSTADIFGDEEGDLFKEKAVASPEATVSQTDENKARAEKKDLFSSQSASNLKGASLLPGKLPTSVSLFDDEDEEDNLFGGTAAKKQTLSLQAQREEKAKASELSKKKASALLFSSDEEDQWNIPASQTHLASDSRSKGEPRDSGTLQSQEAKAVKKTSLFEEDKEDDLFAIAKDRYILPPIVPEVVCQVLCMESNSYLHQISKEALHTQEEVEPKEDPESVTPL

SEQ ID NO: 6626 - DNA, 4599 bp, Homo sapiens
acgccccgggcagcttggctggggctaggcttccggggctctgcggtcctcggcctgtgctggcagcctcggagcccaccgagccgggcggctgggatgatgaaccggacgacccccgaccaggagctggtgccggcgtcggagcccgtgtgggagcggccgtggtcggtggaggagatccgcaggagcagccagagctggtcgctggcggccgacgcgggcctactacagtttctacaggaattctcacagcaaactatctctaggacccatgaaatcaagaaacaagtggacggactaatccgggaaaccaaagccacagattgtcgcctgcataatgtcttcaatgacttccttatgctctctaatacccagttcatagagaatcgtgtatatgatgaagaagtggaggagccagtactcaaggctgaggcagaaaaaacagagcaggagaagacacgagagcagaaagaagtagatctcattcctaaagtccaggaggctgtgaactatggcttacaagtattggacagtgcctttgagcaacttgatatcaaagcaggaaactcagactccgaggaagatgatgctaatgggcgggtggaactgatccttgaaccaaaggatctatacattgatcgtcctttaccatatctcattgggtcaaagctgttcatggaacaagaagatgtaggtcttggagagctgtccagtgaagaaggctctgtaggcagtgatcgtggcagtattgtggacactgaggaagagaaagaagaggaggagtcagatgaagattttgcccatcacagtgacaatgaacaaaaccagcacaccacacaaatgagtgatgaggaagaggatgatgatggctgtgacctttttgctgactctgagaaggaggaggaagatattgaggacattgaagaaaatactagacctaaaagaagcagacctacatcgtttgcagatgagctggctgcccgcatcaagggggatgccatgggtcgagtggacgaggagccgacaaccttaccctcaggagaagcaaaacctcggaagacactcaaagagaagaaggaaaggagaactccttcagacgatgaagaggataacttattcgcaccccccaagctgaccgacgaggacttctcgccatttggctctggaggtggcctgttcagtggcggcaaggggctatttgatgatgaggacgaggagagtgacctcttcacggaagcctcccaggatcggcaagctggagcctctgttaaggaggagtcttcatcatccaaacctggaaagaaaatcccagcaggagctgtttctgtatttttaggagacacggatgtgtttggtgctgcctccgttccatcactgaaggagccacagaagcctgagcagcccactccaaggaaaagcccctatggtccccctcccactggcctctttgatgatgatgatggtgatgatgatgacgactttttctcggcaccccacagcaaaccttctaaaacacgcaaagtccaatccactgccgatatctttggtgacgaagaaggagatctgttcaaagaaaaagccgtagcatcgccagaagccactgtgagtcagacagatgaaaataaagcaagagcagaaaaaaaggatttgttttcttctcaaagtgcgagtaacttaaaaggtgcatctctgctgcctggcaagctccccacgtcggtttccctgtttgatgatgaagatgaagaggataatctttttgggggtacagctgctaagaagcagacattgtctctacaagctcagagagaagagaaagcaaaagcctccgagctctccaaaaagaaagcatctgccctgttgttcagcagtgatgaggaggaccagtggaatattcctgcttcacagacccacttagcatctgacagcaggtctaaaggagaacccagggattctgggaccctccagagccaggaggccaaggctgtgaaaaagaccagtctctttgaggaagacaaagaagatgatctttttgccattgccaaggacagccaaaagaagacccagagagtgtcactcctctttgaagacgatgttgatagcggaggctctctgtttggctctcctcccacatctgttcctcctgcaacaaagaaaaaagagactgtctctgaggcaccacctttgctgttcagcgatgaagaagagaaggaggcacaacttggagtgaagtctgtggataagaaggttgagagtgccaaggagtcattaaaatttgggagaactgatgtggctgagtcagaaaaggaaggacttttgactagatctgctcaggaaacagtcaagcattctgatttattttcttcatcatccccatgggacaaaggaaccaagcctagaaccaaaactgttcttagcttgtttgatgaggaagaggataaaatggaagatcaaaacattatccaggctccacagaaagaagtaggaaagggctgcgatcctgatgcccaccccaagagcacaggtgtcttccaggatgaagagctgcttttcagccacaagctccaaaaggacaatgacccagatgttgacctttttgctggcaccaaaaaaaccaagctgttagagccaagtgttgggagcctgtttggggatgatgaagatgatgatcttttcagctctgccaagtcccagcctttggtacaagagaaaaagagagtagtgaaaaaagaccactctgttaactctttcaaaaaccagaaacatcctgaatccattcaaggtagtaaagaaaaaggcatatggaagccggaaacacctcaggactcatcaggtctcgctccatttaaaaccaaagaaccatccactcggatcgggaagatacaagcaaatttagcgatcaacccagcggccttgctgcccacagcggcttcccagatctctgaagtaaagcctgttttgccagaattggcttttccttcatctgaacacagaaggagccacggtctggaaagtgtgcctgtccttcccgggagtggggaggccggtgtgagttttgatcttccagctcaggcagacaccttacacagtgcaaacaagagccgtgtcaagatgagagggaagcgtagaccgcagacccgtgcagctaggcggctggctgctcaggagtccagcgaggctgaggacatgagcgtccccagaggacccattgcacagtgggctgatggcgccatttccccaaatggccatcggccacagctcagagcagccagtggagaagacagcactgaggaggccctggcagctgccgctgcaccttgggaaggtggtcctgtgcctggagtggacacaagcccctttgcaaagtctctgggtcattccagaggggaggctgacctttttgattctggggacattttttccacgggcactggatctcagtccgtggagagaacaaaacccaaggcaaagatagcagagaatcctgccaacccaccagtgggtggtaaagcaaagagccccatgtttcctgctctaggcgaggccagcagtgatgatgatctctttcagtctgctaaaccaaaaccagcaaagaaaacaaatccctttcctctcctggaagatgaggatgacctctttacagatcagaaagtcaagaagaatgagacaaaatccagtagtcagcaggatgtcatattaacaacacaagatatttttgaggatgatatatttgctacggaagcaattaaaccctctcagaaaaccagagagaaggagaaaacattggaatctaatttatttgatgataacattgatatctttgctgacttaactgtaaaaccaaaagaaaagtccaaaaagaaagtggaagccaagtctatatttgatgatgatatggatgacatcttctccactggtatccaggctaagacaaccaaaccaaaaagccgatctgcacaggccgcacctgaaccaagatttgaacacaaggtgtccaacatctttgatgatcccctgaatgcctttggaggccagtagagcacacagggtatccacatgttaccctgcagctacattgttgagttagtgatgatattgtatatgctcatggtcttaactggattacaaaaagcaaatactagaacagctagctcatcttttacccaatgtacttagtatttttctgcactggtttaatcatgcttaatactacaaaacaaaaataaatatttcacagtggttggtttgttttgtttttaaaccacagtttgatttagttagccttgctggggccataatatgcttcagggtgtgtaaaagaagaaatctctttgtggctttcatgggcagggaatctcagagatagcaaatgccacctgaccagaagtctttgttatatggatgggaaccctaacttagggcttgggcaggggaaagagaaagaagatgagagattatacttcatgagtcttagcaatatgggagcaggttttcactgaattctgagggtgcctctgcatgtcctccaaggcaaagtttggcaaactgtggcccccccactgtcatattttgttaataaaattttattggaacacaatcaca

SEQ ID NO: 6627 - protein, 1312 aa, Homo sapiens
MMNRTTPDQELVPASEPVWERPWSVEEIRRSSQSWSLAADAGLLQFLQEFSQQTISRTHEIKKQVDGLIRETKATDCRLHNVFNDFLMLSNTQFIENRVYDEEVEEPVLKAEAEKTEQEKTREQKEVDLIPKVQEAVNYGLQVLDSAFEQLDIKAGNSDSEEDDANGRVELILEPKDLYIDRPLPYLIGSKLFMEQEDVGLGELSSEEGSVGSDRGSIVDTEEEKEEEESDEDFAHHSDNEQNQHTTQMSDEEEDDDGCDLFADSEKEEEDIEDIEENTRPKRSRPTSFADELAARIKGDAMGRVDEEPTTLPSGEAKPRKTLKEKKERRTPSDDEEDNLFAPPKLTDEDFSPFGSGGGLFSGGKGLFDDEDEESDLFTEASQDRQAGASVKEESSSSKPGKKIPAGAVSVFLGDTDVFGAASVPSLKEPQKPEQPTPRKSPYGPPPTGLFDDDDGDDDDDFFSAPHSKPSKTRKVQSTADIFGDEEGDLFKEKAVASPEATVSQTDENKARAEKKDLFSSQSASNLKGASLLPGKLPTSVSLFDDEDEEDNLFGGTAAKKQTLSLQAQREEKAKASELSKKKASALLFSSDEEDQWNIPASQTHLASDSRSKGEPRDSGTLQSQEAKAVKKTSLFEEDKEDDLFAIAKDSQKKTQRVSLLFEDDVDSGGSLFGSPPTSVPPATKKKETVSEAPPLLFSDEEEKEAQLGVKSVDKKVESAKESLKFGRTDVAESEKEGLLTRSAQETVKHSDLFSSSSPWDKGTKPRTKTVLSLFDEEEDKMEDQNIIQAPQKEVGKGCDPDAHPKSTGVFQDEELLFSHKLQKDNDPDVDLFAGTKKTKLLEPSVGSLFGDDEDDDLFSSAKSQPLVQEKKRVVKKDHSVNSFKNQKHPESIQGSKEKGIWKPETPQDSSGLAPFKTKEPSTRIGKIQANLAINPAALLPTAASQISEVKPVLPELAFPSSEHRRSHGLESVPVLPGSGEAGVSFDLPAQADTLHSANKSRVKMRGKRRPQTRAARRLAAQESSEAEDMSVPRGPIAQWADGAISPNGHRPQLRAASGEDSTEEALAAAAAPWEGGPVPGVDTSPFAKSLGHSRGEADLFDSGDIFSTGTGSQSVERTKPKAKIAENPANPPVGGKAKSPMFPALGEASSDDDLFQSAKPKPAKKTNPFPLLEDEDDLFTDQKVKKNETKSSSQQDVILTTQDIFEDDIFATEAIKPSQKTREKEKTLESNLFDDNIDIFADLTVKPKEKSKKKVEAKSIFDDDMDDIFSTGIQAKTTKPKSRSAQAAPEPRFEHKVSNIFDDPLNAFGGQ

SEQ ID NO: 6628 - DNA, 4303 bp, Homo sapiens
acgccccgggcagcttggctggggctaggcttccggggctctgcggtcctcggcctgtgctggcagcctcggagcccaccgagccgggcggctgggatgatgaaccggacgacccccgaccaggagctggtgccggcgtcggagcccgtgtgggagcggccgtggtcggtggaggagatccgcaggagcagccagagctggtcgctggcggccgacgcgggcctactacagtttctacaggaattctcacagcaaactatctctaggacccatgaaatcaagaaacaagtggacggactaatccgggaaaccaaagccacagattgtcgcctgcataatgtcttcaatgacttccttatgctctctaatacccagttcatagagaatcgtgtatatgatgaagaagtggaggagccagtactcaaggctgaggcagaaaaaacagagcaggagaagacacgagagcagaaagaagtagatctcattcctaaagtccaggaggctgtgaactatggcttacaagtattggacagtgcctttgagcaacttgatatcaaagcaggaaactcagactccgaggaagatgatgctaatgggcgggtggaactgatccttgaaccaaagagtttcactcttgttgcccaagctggagtggcgcaatctcggctcactgcagcttctgtctcctgggttcaagcgattctcctgcctcagccttccaagtagctgggattacaggatctatacattgatcgtcctttaccatatctcattgggtcaaagctgttcatggaacaagaagatgtaggtcttggagagctgtccagtgaagaaggctctgtaggcagtgatcgtggcagtattgtggacactgaggaagagaaagaagaggaggagtcagatgaagattttgcccatcacagtgacaatgaacaaaaccagaaaagaagcagacctacatcgtttgcagatgagctggctgcccgcatcaagggggatgccatgggtcgagtggacgaggagccgacaaccttaccctcaggagaagcaaaacctcggaagacactcaaagagaagaaggaaaggagaactccttcagacgatgaagaggataacttattcgcaccccccaagctgaccgacgaggacttctcgccatttggctctggaggtggcctgttcagtggcggcaaggggctatttgatgatgaggacgaggagagtgacctcttcacggaagcctcccaggatcggcaagctggagcctctgttaaggaggagtcttcatcatccaaacctggaaagaaaatcccagcaggagctgtttctgtatttttaggagacacggatgtgtttggtgctgcctccgttccatcactgaaggagccacagaagcctgagcagcccactccaaggaaaagcccctatggtccccctcccactggcctctttgatgatgatgatggtgatgatgatgacgactttttctcggcaccccacagcaaaccttctaaaacacgcaaagtccaatccactgccgatatctttggtgacgaagaaggagatctgttcaaagaaaaagccgtagcatcgccagaagccactgtgagtcagacagatgaaaataaagcaagagcagaaaaaaaggttaccttatcttacagcaaaaatctcaagccctcatcagaaacaaagactcaaaaaggcttattttcagatgaggaggactctgaggatttgttttcttctcaaagtgcgagtaacttaaaaggtgcatctctgctgcctggcaagctccccacgtcggtttccctgtttgatgatgaagatgaagaggataatctttttgggggtacagctgctaagaagcagacattgtctctacaagctcagagagaagagaaagcaaaagcctccgagctctccaaaaagaaagcatctgccctgttgttcagcagtgatgaggagccaaaagaagacccagagagtgtcactcctctttgaagacgatgttgatagcggaggctctctgtttggctctcctcccacatctgttcctcctgcaacaaaggaaggacttttgactagatctgctcaggaaacagtcaagcattctgatttattttcttcatcatccccatgggacaaaggaaccaagcctagaaccaaaactgttcttagcttgtttgatgaggaagaggataaaatggaagatcaaaacattatccaggctccacagaaagaagtaggaaagggctgcgatcctgatgcccaccccaagagcacaggtgtcttccaggatgaagagctgcttttcagccacaagctccaaaaggacaatgacccagatgttgacctttttgctggcaccaaaaaaaccaagctgttagagccaagtgttgggagcctgtttggggatgatgaagatgatgatcttttcagctctgccaagtcccagcctttggtacaagagaaaaagagagtagtgaaaaaagaccactctgttaactctttcaaaaaccagaaacatcctgaatccattcaaggtagtaaagaaaaaggcatatggaagccggaaacacctcaggcaaatttagcgatcaacccagcggccttgctgcccacagcggcttcccagatctctgaagtaaagcctgttttgccagaattggcttttccttcatctgaacacagaaggagccacggtctggaaagtgtgcctgtccttcccgggagtggggaggccggtgtgagttttgatcttccagctcaggcagacaccttacacagtgcaaacaagagccgtgtcaagatgagagggaagcgtagaccgcagacccgtgcagctaggcggctggctgctcaggagtccagcgaggctgaggacatgagcgtccccagaggacccattgcacagtgggctgatggcgccatttccccaaatggccatcggccacagctcagagcagccagtggagaagacagcactgaggaggccctggcagctgccgctgcaccttgggaaggtggtcctgtgcctggagtggacacaagcccctttgcaaagtctctgggtcattccagaggggaggctgacctttttgattctggggacattttttccacgggcactggatctcagtccgtggagagaacaaaacccaaggcaaagatagcagagaatcctgccaacccaccagtgggtggtaaagcaaagagccccatgtttcctgctctaggcgaggccagcagtgatgatgatctctttcagtctgctaaaccaaaaccagcaaagaaaacaaatccctttcctctcctggaagatgaggatgacctctttacagatcagaaagtcaagaagaatgagacaaaatccagtagtcagcaggatgtcatattaacaacacaagatatttttgaggatgatatatttgctacggaagcaattaaaccctctcagaaaaccagagagaaggagaaaacattggaatctaatttatttgatgataacattgatatctttgctgacttaactgtaaaaccaaaagaaaagtccaaaaagaaagtggaagccaagtctatatttgatgatgatatggatgacatcttctccactggtatccaggctaagacaaccaaaccaaaaagccgatctgcacaggccgcacctgaaccaagatttgaacacaaggtgtccaacatctttgatgatcccctgaatgcctttggaggccagtagagcacacagggtatccacatgttaccctgcagctacattgttgagttagtgatgatattgtatatgctcatggtcttaactggattacaaaaagcaaatactagaacagctagctcatcttttacccaatgtacttagtatttttctgcactggtttaatcatgcttaatactacaaaacaaaaataaatatttcacagtggttggtttgttttgtttttaaaccacagtttgatttagttagccttgctggggccataatatgcttcagggtgtgtaaaagaagaaatctctttgtggctttcatgggcagggaatctcagagatagcaaatgccacctgaccagaagtctttgttatatggatgggaaccctaacttagggcttgggcaggggaaagagaaagaagatgagagattatacttcatgagtcttagcaatatgggagcaggttttcactgaattctgagggtgcctctgcatgtcctccaaggcaaagtttggcaaactgtggcccccccactgtcatattttgttaataaaattttattggaacacaatcaca

SEQ ID NO: 6629 - protein, 639 aa, Homo sapiens
MMKMKRIIFLGVQLLRSRHCLYKLREKRKQKPPSSPKRKHLPCCSAVMRSQKKTQRVSLLFEDDVDSGGSLFGSPPTSVPPATKEGLLTRSAQETVKHSDLFSSSSPWDKGTKPRTKTVLSLFDEEEDKMEDQNIIQAPQKEVGKGCDPDAHPKSTGVFQDEELLFSHKLQKDNDPDVDLFAGTKKTKLLEPSVGSLFGDDEDDDLFSSAKSQPLVQEKKRVVKKDHSVNSFKNQKHPESIQGSKEKGIWKPETPQANLAINPAALLPTAASQISEVKPVLPELAFPSSEHRRSHGLESVPVLPGSGEAGVSFDLPAQADTLHSANKSRVKMRGKRRPQTRAARRLAAQESSEAEDMSVPRGPIAQWADGAISPNGHRPQLRAASGEDSTEEALAAAAAPWEGGPVPGVDTSPFAKSLGHSRGEADLFDSGDIFSTGTGSQSVERTKPKAKIAENPANPPVGGKAKSPMFPALGEASSDDDLFQSAKPKPAKKTNPFPLLEDEDDLFTDQKVKKNETKSSSQQDVILTTQDIFEDDIFATEAIKPSQKTREKEKTLESNLFDDNIDIFADLTVKPKEKSKKKVEAKSIFDDDMDDIFSTGIQAKTTKPKSRSAQAAPEPRFEHKVSNIFDDPLNAFGGQ

SEQ ID NO: 6630 - DNA, 4804 bp, Homo sapiens
acgccccgggcagcttggctggggctaggcttccggggctctgcggtcctcggcctgtgctggcagcctcggagcccaccgagccgggcggctgggatgatgaaccggacgacccccgaccaggagctggtgccggcgtcggagcccgtgtgggagcggccgtggtcggtggaggagatccgcaggagcagccagagctggtcgctggcggccgacgcgggcctactacagtttctacaggaattctcacagcaaactatctctaggacccatgaaatcaagaaacaagtggacggactaatccgggaaaccaaagccacagattgtcgcctgcataatgtcttcaatgacttccttatgctctctaatacccagttcatagagaatcgtgtatatgatgaagaagtggaggagccagtactcaaggctgaggcagaaaaaacagagcaggagaagacacgagagcagaaagaagtagatctcattcctaaagtccaggaggctgtgaactatggcttacaagtattggacagtgcctttgagcaacttgatatcaaagcaggaaactcagactccgaggaagatgatgctaatgggcgggtggaactgatccttgaaccaaagagtttcactcttgttgcccaagctggagtggcgcaatctcggctcactgcagcttctgtctcctgggttcaagcgattctcctgcctcagccttccaagtagctgggattacaggatctatacattgatcgtcctttaccatatctcattgggtcaaagctgttcatggaacaagaagatgtaggtcttggagagctgtccagtgaagaaggctctgtaggcagtgatcgtggcagtattgtggacactgaggaagagaaagaagaggaggagtcagatgaagattttgcccatcacagtgacaatgaacaaaaccagaaaagaagcagacctacatcgtttgcagatgagctggctgcccgcatcaagggggatgccatgggtcgagtggacgaggagccgacaaccttaccctcaggagaagcaaaacctcggaagacactcaaagagaagaaggaaaggagaactccttcagacgatgaagaggataacttattcgcaccccccaagctgaccgacgaggacttctcgccatttggctctggaggtggcctgttcagtggcggcaaggggctatttgatgatgaggacgaggagagtgacctcttcacggaagcctcccaggatcggcaagctggagcctctgttaaggaggagtcttcatcatccaaacctggaaagaaaatcccagcaggagctgtttctgtatttttaggagacacggatgtgtttggtgctgcctccgttccatcactgaaggagccacagaagcctgagcagcccactccaaggaaaagcccctatggtccccctcccactggcctctttgatgatgatgatggtgatgatgatgacgactttttctcggcaccccacagcaaaccttctaaaacacgcaaagtccaatccactgccgatatctttggtgacgaagaaggagatctgttcaaagaaaaagccgtagcatcgccagaagccactgtgagtcagacagatgaaaataaagcaagagcagaaaaaaaggttaccttatcttacagcaaaaatctcaagccctcatcagaaacaaagactcaaaaaggcttattttcagatgaggaggactctgaggatttgttttcttctcaaagtgcgagtaacttaaaaggtgcatctctgctgcctggcaagctccccacgtcggtttccctgtttgatgatgaagatgaagaggataatctttttgggggtacagctgctaagaagcagacattgtctctacaagctcagagagaagagaaagcaaaagcctccgagctctccaaaaagaaagcatctgccctgttgttcagcagtgatgaggaggaccagtggaatattcctgcttcacagacccacttagcatctgacagcaggtctaaaggagaacccagggattctgggaccctccagagccaggaggccaaggctgtgaaaaagaccagtctctttgaggaagacaaagaagatgatctttttgccattgccaaggacagatacatcctacctcctattgttcccgaagttgtctgtcaagttttgtgtatggaaagtaattcataccttcatcagatctcaaaagaagctttacacacacaagaagaagttgagccaaaagaagacccagagagtgtcactcctctttgaagacgatgttgatagcggaggctctctgtttggctctcctcccacatctgttcctcctgcaacaaagaaaaaagagactgtctctgaggcaccacctttgctgttcagcgatgaagaagagaaggaggcacaacttggagtgaagtctgtggataagaaggttgagagtgccaaggagtcattaaaatttgggagaactgatgtggctgagtcagaaaaggaaggacttttgactagatctgctcaggaaacagtcaagcattctgatttattttcttcatcatccccatgggacaaaggaaccaagcctagaaccaaaactgttcttagcttgtttgatgaggaagaggataaaatggaagatcaaaacattatccaggctccacagaaagaagtaggaaagggctgcgatcctgatgcccaccccaagagcacaggtgtcttccaggatgaagagctgcttttcagccacaagctccaaaaggacaatgacccagatgttgacctttttgctggcaccaaaaaaaccaagctgttagagccaagtgttgggagcctgtttggggatgatgaagatgatgatcttttcagctctgccaagtcccagcctttggtacaagagaaaaagagagtagtgaaaaaagaccactctgttaactctttcaaaaaccagaaacatcctgaatccattcaaggtagtaaagaaaaaggcatatggaagccggaaacacctcaggactcatcaggtctcgctccatttaaaaccaaagaaccatccactcggatcgggaagatacaagcaaatttagcgatcaacccagcggccttgctgcccacagcggcttcccagatctctgaagtaaagcctgttttgccagaattggcttttccttcatctgaacacagaaggagccacggtctggaaagtgtgcctgtccttcccgggagtggggaggccggtgtgagttttgatcttccagctcaggcagacaccttacacagtgcaaacaagagccgtgtcaagatgagagggaagcgtagaccgcagacccgtgcagctaggcggctggctgctcaggagtccagcgaggctgaggacatgagcgtccccagaggacccattgcacagtgggctgatggcgccatttccccaaatggccatcggccacagctcagagcagccagtggagaagacagcactgaggaggccctggcagctgccgctgcaccttgggaaggtggtcctgtgcctggagtggacacaagcccctttgcaaagtctctgggtcattccagaggggaggctgacctttttgattctggggacattttttccacgggcactggatctcagtccgtggagagaacaaaacccaaggcaaagatagcagagaatcctgccaacccaccagtgggtggtaaagcaaagagccccatgtttcctgctctaggcgaggccagcagtgatgatgatctctttcagtctgctaaaccaaaaccagcaaagaaaacaaatccctttcctctcctggaagatgaggatgacctctttacagatcagaaagtcaagaagaatgagacaaaatccagtagtcagcaggatgtcatattaacaacacaagatatttttgaggatgatatatttgctacggaagcaattaaaccctctcagaaaaccagagagaaggagaaaacattggaatctaatttatttgatgataacattgatatctttgctgacttaactgtaaaaccaaaagaaaagtccaaaaagaaagtggaagccaagtctatatttgatgatgatatggatgacatcttctccactggtatccaggctaagacaaccaaaccaaaaagccgatctgcacaggccgcacctgaaccaagatttgaacacaaggtgtccaacatctttgatgatcccctgaatgcctttggaggccagtagagcacacagggtatccacatgttaccctgcagctacattgttgagttagtgatgatattgtatatgctcatggtcttaactggattacaaaaagcaaatactagaacagctagctcatcttttacccaatgtacttagtatttttctgcactggtttaatcatgcttaatactacaaaacaaaaataaatatttcacagtggttggtttgttttgtttttaaaccacagtttgatttagttagccttgctggggccataatatgcttcagggtgtgtaaaagaagaaatctctttgtggctttcatgggcagggaatctcagagatagcaaatgccacctgaccagaagtctttgttatatggatgggaaccctaacttagggcttgggcaggggaaagagaaagaagatgagagattatacttcatgagtcttagcaatatgggagcaggttttcactgaattctgagggtgcctctgcatgtcctccaaggcaaagtttggcaaactgtggcccccccactgtcatattttgttaataaaattttattggaacacaatcaca

SEQ ID NO: 6631 - protein, 709 aa, Homo sapiens; identical to SEQ ID NO: 6611

SEQ ID NO: 6632 - DNA, 4539 bp, Homo sapiens
acgccccgggcagcttggctggggctaggcttccggggctctgcggtcctcggcctgtgctggcagcctcggagcccaccgagccgggcggctgggatgatgaaccggacgacccccgaccaggagctggtgccggcgtcggagcccgtgtgggagcggccgtggtcggtggaggagatccgcaggagcagccagagctggtcgctggcggccgacgcgggcctactacagtttctacaggaattctcacagcaaactatctctaggacccatgaaatcaagaaacaagtggacggactaatccgggaaaccaaagccacagattgtcgcctgcataatgtcttcaatgacttccttatgctctctaatacccagttcatagagaatcgtgtatatgatgaagaagtggaggagccagtactcaaggctgaggcagaaaaaacagagcaggagaagacacgagagcagaaagaagtagatctcattcctaaagtccaggaggctgtgaactatggcttacaagtattggacagtgcctttgagcaacttgatatcaaagcaggaaactcagactccgaggaagatgatgctaatgggcgggtggaactgatccttgaaccaaagagtttcactcttgttgcccaagctggagtggcgcaatctcggctcactgcagcttctgtctcctgggttcaagcgattctcctgcctcagccttccaagtagctgggattacaggatctatacattgatcgtcctttaccatatctcattgggtcaaagctgttcatggaacaagaagatgtaggtcttggagagctgtccagtgaagaaggctctgtaggcagtgatcgtggcagtattgtggacactgaggaagagaaagaagaggaggagtcagatgaagattttgcccatcacagtgacaatgaacaaaaccagaaaagaagcagacctacatcgtttgcagatgagctggctgcccgcatcaagggggatgccatgggtcgagtggacgaggagccgacaaccttaccctcaggagaagcaaaacctcggaagacactcaaagagaagaaggaaaggagaactccttcagacgatgaagaggataacttattcgcaccccccaagctgaccgacgaggacttctcgccatttggctctggaggtggcctgttcagtggcggcaaggggctatttgatgatgaggacgaggagagtgacctcttcacggaagcctcccaggatcggcaagctggagcctctgttaaggaggagtcttcatcatccaaacctggaaagaaaatcccagcaggagctgtttctgtatttttaggagacacggatgtgtttggtgctgcctccgttccatcactgaaggagccacagaagcctgagcagcccactccaaggaaaagcccctatggtccccctcccactggcctctttgatgatgatgatggtgatgatgatgacgactttttctcggcaccccacagcaaaccttctaaaacacgcaaagtccaatccactgccgatatctttggtgacgaagaaggagatctgttcaaagaaaaagccgtagcatcgccagaagccactgtgagtcagacagatgaaaataaagcaagagcagaaaaaaaggatttgttttcttctcaaagtgcgagtaacttaaaaggtgcatctctgctgcctggcaagctccccacgtcggtttccctgtttgatgatgaagatgaagaggataatctttttgggggtacagctgctaagaagcagacattgtctctacaagctcagagagaagagaaagcaaaagcctccgagctctccaaaaagaaagcatctgccctgttgttcagcagtgatgaggaggaccagtggaatattcctgcttcacagacccacttagcatctgacagcaggtctaaaggagaacccagggattctgggaccctccagagccaggaggccaaggctgtgaaaaagaccagtctctttgaggaagacaaagaagatgatctttttgccattgccaaggacagccaaaagaagacccagagagtgtcactcctctttgaagacgatgttgatagcggaggctctctgtttggctctcctcccacatctgttcctcctgcaacaaagaaaaaagagactgtctctgaggcaccacctttgctgttcagcgatgaagaagagaaggaggcacaacttggagtgaagtctgtggataagaaggttgagagtgccaaggagtcattaaaatttgggagaactgatgtggctgagtcagaaaaggaaggacttttgactagatctgctcaggaaacagtcaagcattctgatttattttcttcatcatccccatgggacaaaggaaccaagcctagaaccaaaactgttcttagcttgtttgatgaggaagaggataaaatggaagatcaaaacattatccaggctccacagaaagaagtaggaaagggctgcgatcctgatgcccaccccaagagcacaggtgtcttccaggatgaagagctgcttttcagccacaagctccaaaaggacaatgacccagatgttgacctttttgctggcaccaaaaaaaccaagctgttagagccaagtgttgggagcctgtttggggatgatgaagatgatgatcttttcagctctgccaagtcccagcctttggtacaagagaaaaagagagtagtgaaaaaagaccactctgttaactctttcaaaaaccagaaacatcctgaatccattcaaggtagtaaagaaaaaggcatatggaagccggaaacacctcaggcaaatttagcgatcaacccagcggccttgctgcccacagcggcttcccagatctctgaagtaaagcctgttttgccagaattggcttttccttcatctgaacacagaaggagccacggtctggaaagtgtgcctgtccttcccgggagtggggaggccggtgtgagttttgatcttccagctcaggcagacaccttacacagtgcaaacaagagccgtgtcaagatgagagggaagcgtagaccgcagacccgtgcagctaggcggctggctgctcaggagtccagcgaggctgaggacatgagcgtccccagaggacccattgcacagtgggctgatggcgccatttccccaaatggccatcggccacagctcagagcagccagtggagaagacagcactgaggaggccctggcagctgccgctgcaccttgggaaggtggtcctgtgcctggagtggacacaagcccctttgcaaagtctctgggtcattccagaggggaggctgacctttttgattctggggacattttttccacgggcactggatctcagtccgtggagagaacaaaacccaaggcaaagatagcagagaatcctgccaacccaccagtgggtggtaaagcaaagagccccatgtttcctgctctaggcgaggccagcagtgatgatgatctctttcagtctgctaaaccaaaaccagcaaagaaaacaaatccctttcctctcctggaagatgaggatgacctctttacagatcagaaagtcaagaagaatgagacaaaatccagtagtcagcaggatgtcatattaacaacacaagatatttttgaggatgatatatttgctacggaagcaattaaaccctctcagaaaaccagagagaaggagaaaacattggaatctaatttatttgatgataacattgatatctttgctgacttaactgtaaaaccaaaagaaaagtccaaaaagaaagtggaagccaagtctatatttgatgatgatatggatgacatcttctccactggtatccaggctaagacaaccaaaccaaaaagccgatctgcacaggccgcacctgaaccaagatttgaacacaaggtgtccaacatctttgatgatcccctgaatgcctttggaggccagtagagcacacagggtatccacatgttaccctgcagctacattgttgagttagtgatgatattgtatatgctcatggtcttaactggattacaaaaagcaaatactagaacagctagctcatcttttacccaatgtacttagtatttttctgcactggtttaatcatgcttaatactacaaaacaaaaataaatatttcacagtggttggtttgttttgtttttaaaccacagtttgatttagttagccttgctggggccataatatgcttcagggtgtgtaaaagaagaaatctctttgtggctttcatgggcagggaatctcagagatagcaaatgccacctgaccagaagtctttgttatatggatgggaaccctaacttagggcttgggcaggggaaagagaaagaagatgagagattatacttcatgagtcttagcaatatgggagcaggttttcactgaattctgagggtgcctctgcatgtcctccaaggcaaagtttggcaaactgtggcccccccactgtcatattttgttaataaaattttattggaacacaatcaca

SEQ ID NO: 6633 - protein, 1061 aa, Homo sapiens
MEQEDVGLGELSSEEGSVGSDRGSIVDTEEEKEEEESDEDFAHHSDNEQNQKRSRPTSFADELAARIKGDAMGRVDEEPTTLPSGEAKPRKTLKEKKERRTPSDDEEDNLFAPPKLTDEDFSPFGSGGGLFSGGKGLFDDEDEESDLFTEASQDRQAGASVKEESSSSKPGKKIPAGAVSVFLGDTDVFGAASVPSLKEPQKPEQPTPRKSPYGPPPTGLFDDDDGDDDDDFFSAPHSKPSKTRKVQSTADIFGDEEGDLFKEKAVASPEATVSQTDENKARAEKKDLFSSQSASNLKGASLLPGKLPTSVSLFDDEDEEDNLFGGTAAKKQTLSLQAQREEKAKASELSKKKASALLFSSDEEDQWNIPASQTHLASDSRSKGEPRDSGTLQSQEAKAVKKTSLFEEDKEDDLFAIAKDSQKKTQRVSLLFEDDVDSGGSLFGSPPTSVPPATKKKETVSEAPPLLFSDEEEKEAQLGVKSVDKKVESAKESLKFGRTDVAESEKEGLLTRSAQETVKHSDLFSSSSPWDKGTKPRTKTVLSLFDEEEDKMEDQNIIQAPQKEVGKGCDPDAHPKSTGVFQDEELLFSHKLQKDNDPDVDLFAGTKKTKLLEPSVGSLFGDDEDDDLFSSAKSQPLVQEKKRVVKKDHSVNSFKNQKHPESIQGSKEKGIWKPETPQANLAINPAALLPTAASQISEVKPVLPELAFPSSEHRRSHGLESVPVLPGSGEAGVSFDLPAQADTLHSANKSRVKMRGKRRPQTRAARRLAAQESSEAEDMSVPRGPIAQWADGAISPNGHRPQLRAASGEDSTEEALAAAAAPWEGGPVPGVDTSPFAKSLGHSRGEADLFDSGDIFSTGTGSQSVERTKPKAKIAENPANPPVGGKAKSPMFPALGEASSDDDLFQSAKPKPAKKTNPFPLLEDEDDLFTDQKVKKNETKSSSQQDVILTTQDIFEDDIFATEAIKPSQKTREKEKTLESNLFDDNIDIFADLTVKPKEKSKKKVEAKSIFDDDMDDIFSTGIQAKTTKPKSRSAQAAPEPRFEHKVSNIFDDPLNAFGGQ

SEQ ID NO: 6634 - DNA, 4801 bp, Homo sapiens
acgccccgggcagcttggctggggctaggcttccggggctctgcggtcctcggcctgtgctggcagcctcggagcccaccgagccgggcggctgggatgatgaaccggacgacccccgaccaggagctggtgccggcgtcggagcccgtgtgggagcggccgtggtcggtggaggagatccgcaggagcagccagagctggtcgctggcggccgacgcgggcctactacagtttctacaggaattctcacagcaaactatctctaggacccatgaaatcaagaaacaagtggacggactaatccgggaaaccaaagccacagattgtcgcctgcataatgtcttcaatgacttccttatgctctctaatacccagttcatagagaatcgtgtatatgatgaagaagtggaggagccagtactcaaggctgaggcagaaaaaacagagcaggagaagacacgagagcagaaagaagtagatctcattcctaaagtccaggaggctgtgaactatggcttacaagtattggacagtgcctttgagcaacttgatatcaaagcaggaaactcagactccgaggaagatgatgctaatgggcgggtggaactgatccttgaaccaaaggatctatacattgatcgtcctttaccatatctcattgggtcaaagctgttcatggaacaagaagatgtaggtcttggagagctgtccagtgaagaaggctctgtaggcagtgatcgtggcagtattgtggacactgaggaagagaaagaagaggaggagtcagatgaagattttgcccatcacagtgacaatgaacaaaaccagcacaccacacaaatgagtgatgaggaagaggatgatgatggctgtgacctttttgctgactctgagaaggaggaggaagatattgaggacattgaagaaaatactagacctaaaagaagcagacctacatcgtttgcagatgagctggctgcccgcatcaagggggatgccatgggtcgagtggacgaggagccgacaaccttaccctcaggagaagcaaaacctcggaagacactcaaagagaagaaggaaaggagaactccttcagacgatgaagaggataacttattcgcaccccccaagctgaccgacgaggacttctcgccatttggctctggaggtggcctgttcagtggcggcaaggggctatttgatgatgaggacgaggagagtgacctcttcacggaagcctcccaggatcggcaagctggagcctctgttaaggaggagtcttcatcatccaaacctggaaagaaaatcccagcaggagctgtttctgtatttttaggagacacggatgtgtttggtgctgcctccgttccatcactgaaggagccacagaagcctgagcagcccactccaaggaaaagcccctatggtccccctcccactggcctctttgatgatgatgatggtgatgatgatgacgactttttctcggcaccccacagcaaaccttctaaaacacgcaaagtccaatccactgccgatatctttggtgacgaagaaggagatctgttcaaagaaaaagccgtagcatcgccagaagccactgtgagtcagacagatgaaaataaagcaagagcagaaaaaaaggttaccttatcttacagcaaaaatctcaagccctcatcagaaacaaagactcaaaaaggcttattttcagatgaggaggactctgaggatttgttttcttctcaaagtgcgagtaacttaaaaggtgcatctctgctgcctggcaagctccccacgtcggtttccctgtttgatgatgaagatgaagaggataatctttttgggggtacagctgctaagaagcagacattgtctctacaagctcagagagaagagaaagcaaaagcctccgagctctccaaaaagaaagcatctgccctgttgttcagcagtgatgaggaggaccagtggaatattcctgcttcacagacccacttagcatctgacagcaggtctaaaggagaacccagggattctgggaccctccagagccaggaggccaaggctgtgaaaaagaccagtctctttgaggaagacaaagaagatgatctttttgccattgccaaggacagatacatcctacctcctattgttcccgaagttgtctgtcaagttttgtgtatggaaagtaattcataccttcatcagatctcaaaagaagctttacacacacaagaagaagttgagccaaaagaagacccagagagtgtcactcctctttgaagacgatgttgatagcggaggctctctgtttggctctcctcccacatctgttcctcctgcaacaaagaaaaaagagactgtctctgaggcaccacctttgctgttcagcgatgaagaagagaaggaggcacaacttggagtgaagtctgtggataagaaggttgagagtgccaaggagtcattaaaatttgggagaactgatgtggctgagtcagaaaaggaaggacttttgactagatctgctcaggaaacagtcaagcattctgatttattttcttcatcatccccatgggacaaaggaaccaagcctagaaccaaaactgttcttagcttgtttgatgaggaagaggataaaatggaagatcaaaacattatccaggctccacagaaagaagtaggaaagggctgcgatcctgatgcccaccccaagagcacaggtgtcttccaggatgaagagctgcttttcagccacaagctccaaaaggacaatgacccagatgttgacctttttgctggcaccaaaaaaaccaagctgttagagccaagtgttgggagcctgtttggggatgatgaagatgatgatcttttcagctctgccaagtcccagcctttggtacaagagaaaaagagagtagtgaaaaaagaccactctgttaactctttcaaaaaccagaaacatcctgaatccattcaaggtagtaaagaaaaaggcatatggaagccggaaacacctcaggactcatcaggtctcgctccatttaaaaccaaagaaccatccactcggatcgggaagatacaagcaaatttagcgatcaacccagcggccttgctgcccacagcggcttcccagatctctgaagtaaagcctgttttgccagaattggcttttccttcatctgaacacagaaggagccacggtctggaaagtgtgcctgtccttcccgggagtggggaggccggtgtgagttttgatcttccagctcaggcagacaccttacacagtgcaaacaagagccgtgtcaagatgagagggaagcgtagaccgcagacccgtgcagctaggcggctggctgctcaggagtccagcgaggctgaggacatgagcgtccccagaggacccattgcacagtgggctgatggcgccatttccccaaatggccatcggccacagctcagagcagccagtggagaagacagcactgaggaggccctggcagctgccgctgcaccttgggaaggtggtcctgtgcctggagtggacacaagcccctttgcaaagtctctgggtcattccagaggggaggctgacctttttgattctggggacattttttccacgggcactggatctcagtccgtggagagaacaaaacccaaggcaaagatagcagagaatcctgccaacccaccagtgggtggtaaagcaaagagccccatgtttcctgctctaggcgaggccagcagtgatgatgatctctttcagtctgctaaaccaaaaccagcaaagaaaacaaatccctttcctctcctggaagatgaggatgacctctttacagatcagaaagtcaagaagaatgagacaaaatccagtagtcagcaggatgtcatattaacaacacaagatatttttgaggatgatatatttgctacggaagcaattaaaccctctcagaaaaccagagagaaggagaaaacattggaatctaatttatttgatgataacattgatatctttgctgacttaactgtaaaaccaaaagaaaagtccaaaaagaaagtggaagccaagtctatatttgatgatgatatggatgacatcttctccactggtatccaggctaagacaaccaaaccaaaaagccgatctgcacaggccgcacctgaaccaagatttgaacacaaggtgtccaacatctttgatgatcccctgaatgcctttggaggccagtagagcacacagggtatccacatgttaccctgcagctacattgttgagttagtgatgatattgtatatgctcatggtcttaactggattacaaaaagcaaatactagaacagctagctcatcttttacccaatgtacttagtatttttctgcactggtttaatcatgcttaatactacaaaacaaaaataaatatttcacagtggttggtttgttttgtttttaaaccacagtttgatttagttagccttgctggggccataatatgcttcagggtgtgtaaaagaagaaatctctttgtggctttcatgggcagggaatctcagagatagcaaatgccacctgaccagaagtctttgttatatggatgggaaccctaacttagggcttgggcaggggaaagagaaagaagatgagagattatacttcatgagtcttagcaatatgggagcaggttttcactgaattctgagggtgcctctgcatgtcctccaaggcaaagtttggcaaactgtggcccccccactgtcatattttgttaataaaattttattggaacacaatcaca

SEQ ID NO: 6635 - protein, 729 aa, Homo sapiens
MMNRTTPDQELVPASEPVWERPWSVEEIRRSSQSWSLAADAGLLQFLQEFSQQTISRTHEIKKQVDGLIRETKATDCRLHNVFNDFLMLSNTQFIENRVYDEEVEEPVLKAEAEKTEQEKTREQKEVDLIPKVQEAVNYGLQVLDSAFEQLDIKAGNSDSEEDDANGRVELILEPKDLYIDRPLPYLIGSKLFMEQEDVGLGELSSEEGSVGSDRGSIVDTEEEKEEEESDEDFAHHSDNEQNQHTTQMSDEEEDDDGCDLFADSEKEEEDIEDIEENTRPKRSRPTSFADELAARIKGDAMGRVDEEPTTLPSGEAKPRKTLKEKKERRTPSDDEEDNLFAPPKLTDEDFSPFGSGGGLFSGGKGLFDDEDEESDLFTEASQDRQAGASVKEESSSSKPGKKIPAGAVSVFLGDTDVFGAASVPSLKEPQKPEQPTPRKSPYGPPPTGLFDDDDGDDDDDFFSAPHSKPSKTRKVQSTADIFGDEEGDLFKEKAVASPEATVSQTDENKARAEKKVTLSYSKNLKPSSETKTQKGLFSDEEDSEDLFSSQSASNLKGASLLPGKLPTSVSLFDDEDEEDNLFGGTAAKKQTLSLQAQREEKAKASELSKKKASALLFSSDEEDQWNIPASQTHLASDSRSKGEPRDSGTLQSQEAKAVKKTSLFEEDKEDDLFAIAKDRYILPPIVPEVVCQVLCMESNSYLHQISKEALHTQEEVEPKEDPESVTPL

SEQ ID NO: 6636 - DNA, 4800 bp, Homo sapiens
acgccccgggcagcttggctggggctaggcttccggggctctgcggtcctcggcctgtgctggcagcctcggagcccaccgagccgggcggctgggatgatgaaccggacgacccccgaccaggagctggtgccggcgtcggagcccgtgtgggagcggccgtggtcggtggaggagatccgcaggagcagccagagctggtcgctggcggccgacgcgggcctactacagtttctacaggaattctcacagcaaactatctctaggacccatgaaatcaagaaacaagtggacggactaatccgggaaaccaaagccacagattgtcgcctgcataatgtcttcaatgacttccttatgctctctaatacccagttcatagagaatcgtgtatatgatgaagaagtggaggagccagtactcaaggctgaggcagaaaaaacagagcaggagaagacacgagagcagaaagaagtagatctcattcctaaagtccaggaggctgtgaactatggcttacaagtattggacagtgcctttgagcaacttgatatcaaagcaggaaactcagactccgaggaagatgatgctaatgggcgggtggaactgatccttgaaccaaagagtttcactcttgttgcccaagctggagtggcgcaatctcggctcactgcagcttctgtctcctgggttcaagcgattctcctgcctcagccttccaagtagctgggattacaggatctatacattgatcgtcctttaccatatctcattgggtcaaagctgttcatggaacaagaagatgtaggtcttggagagctgtccagtgaagaaggctctgtaggcagtgatcgtggcagtattgtggacactgaggaagagaaagaagaggaggagtcagatgaagattttgcccatcacagtgacaatgaacaaaaccagcacaccacacaaatgagtgatgaggaagaggatgatgatggctgtgacctttttgctgactctgagaaggaggaggaagatattgaggacattgaagaaaatactagacctaaaagaagcagacctacatcgtttgcagatgagctggctgcccgcatcaagggggatgccatgggtcgagtggacgaggagccgacaaccttaccctcaggagaagcaaaacctcggaagacactcaaagagaagaaggaaaggagaactccttcagacgatgaagaggataacttattcgcaccccccaagctgaccgacgaggacttctcgccatttggctctggaggtggcctgttcagtggcggcaaggggctatttgatgatgaggacgaggagagtgacctcttcacggaagcctcccaggatcggcaagctggagcctctgttaaggaggagtcttcatcatccaaacctggaaagaaaatcccagcaggagctgtttctgtatttttaggagacacggatgtgtttggtgctgcctccgttccatcactgaaggagccacagaagcctgagcagcccactccaaggaaaagcccctatggtccccctcccactggcctctttgatgatgatgatggtgatgatgatgacgactttttctcggcaccccacagcaaaccttctaaaacacgcaaagtccaatccactgccgatatctttggtgacgaagaaggagatctgttcaaagaaaaagccgtagcatcgccagaagccactgtgagtcagacagatgaaaataaagcaagagcagaaaaaaaggttaccttatcttacagcaaaaatctcaagccctcatcagaaacaaagactcaaaaaggcttattttcagatgaggaggactctgaggatttgttttcttctcaaagtgcgagtaacttaaaaggtgcatctctgctgcctggcaagctccccacgtcggtttccctgtttgatgatgaagatgaagaggataatctttttgggggtacagctgctaagaagcagacattgtctctacaagctcagagagaagagaaagcaaaagcctccgagctctccaaaaagaaagcatctgccctgttgttcagcagtgatgaggaggaccagtggaatattcctgcttcacagacccacttagcatctgacagcaggtctaaaggagaacccagggattctgggaccctccagagccaggaggccaaggctgtgaaaaagaccagtctctttgaggaagacaaagaagatgatctttttgccattgccaaggacagccaaaagaagacccagagagtgtcactcctctttgaagacgatgttgatagcggaggctctctgtttggctctcctcccacatctgttcctcctgcaacaaagaaaaaagagactgtctctgaggcaccacctttgctgttcagcgatgaagaagagaaggaggcacaacttggagtgaagtctgtggataagaaggttgagagtgccaaggagtcattaaaatttgggagaactgatgtggctgagtcagaaaaggaaggacttttgactagatctgctcaggaaacagtcaagcattctgatttattttcttcatcatccccatgggacaaaggaaccaagcctagaaccaaaactgttcttagcttgtttgatgaggaagaggataaaatggaagatcaaaacattatccaggctccacagaaagaagtaggaaagggctgcgatcctgatgcccaccccaagagcacaggtgtcttccaggatgaagagctgcttttcagccacaagctccaaaaggacaatgacccagatgttgacctttttgctggcaccaaaaaaaccaagctgttagagccaagtgttgggagcctgtttggggatgatgaagatgatgatcttttcagctctgccaagtcccagcctttggtacaagagaaaaagagagtagtgaaaaaagaccactctgttaactctttcaaaaaccagaaacatcctgaatccattcaaggtagtaaagaaaaaggcatatggaagccggaaacacctcaggactcatcaggtctcgctccatttaaaaccaaagaaccatccactcggatcgggaagatacaagcaaatttagcgatcaacccagcggccttgctgcccacagcggcttcccagatctctgaagtaaagcctgttttgccagaattggcttttccttcatctgaacacagaaggagccacggtctggaaagtgtgcctgtccttcccgggagtggggaggccggtgtgagttttgatcttccagctcaggcagacaccttacacagtgcaaacaagagccgtgtcaagatgagagggaagcgtagaccgcagacccgtgcagctaggcggctggctgctcaggagtccagcgaggctgaggacatgagcgtccccagaggacccattgcacagtgggctgatggcgccatttccccaaatggccatcggccacagctcagagcagccagtggagaagacagcactgaggaggccctggcagctgccgctgcaccttgggaaggtggtcctgtgcctggagtggacacaagcccctttgcaaagtctctgggtcattccagaggggaggctgacctttttgattctggggacattttttccacgggcactggatctcagtccgtggagagaacaaaacccaaggcaaagatagcagagaatcctgccaacccaccagtgggtggtaaagcaaagagccccatgtttcctgctctaggcgaggccagcagtgatgatgatctctttcagtctgctaaaccaaaaccagcaaagaaaacaaatccctttcctctcctggaagatgaggatgacctctttacagatcagaaagtcaagaagaatgagacaaaatccagtagtcagcaggatgtcatattaacaacacaagatatttttgaggatgatatatttgctacggaagcaattaaaccctctcagaaaaccagagagaaggagaaaacattggaatctaatttatttgatgataacattgatatctttgctgacttaactgtaaaaccaaaagaaaagtccaaaaagaaagtggaagccaagtctatatttgatgatgatatggatgacatcttctccactggtatccaggctaagacaaccaaaccaaaaagccgatctgcacaggccgcacctgaaccaagatttgaacacaaggtgtccaacatctttgatgatcccctgaatgcctttggaggccagtagagcacacagggtatccacatgttaccctgcagctacattgttgagttagtgatgatattgtatatgctcatggtcttaactggattacaaaaagcaaatactagaacagctagctcatcttttacccaatgtacttagtatttttctgcactggtttaatcatgcttaatactacaaaacaaaaataaatatttcacagtggttggtttgttttgtttttaaaccacagtttgatttagttagccttgctggggccataatatgcttcagggtgtgtaaaagaagaaatctctttgtggctttcatgggcagggaatctcagagatagcaaatgccacctgaccagaagtctttgttatatggatgggaaccctaacttagggcttgggcaggggaaagagaaagaagatgagagattatacttcatgagtcttagcaatatgggagcaggttttcactgaattctgagggtgcctctgcatgtcctccaaggcaaagtttggcaaactgtggcccccccactgtcatattttgttaataaaattttattggaacacaatcaca

SEQ ID NO: 6637 - protein, 1148 aa, Homo sapiens
MEQEDVGLGELSSEEGSVGSDRGSIVDTEEEKEEEESDEDFAHHSDNEQNQHTTQMSDEEEDDDGCDLFADSEKEEEDIEDIEENTRPKRSRPTSFADELAARIKGDAMGRVDEEPTTLPSGEAKPRKTLKEKKERRTPSDDEEDNLFAPPKLTDEDFSPFGSGGGLFSGGKGLFDDEDEESDLFTEASQDRQAGASVKEESSSSKPGKKIPAGAVSVFLGDTDVFGAASVPSLKEPQKPEQPTPRKSPYGPPPTGLFDDDDGDDDDDFFSAPHSKPSKTRKVQSTADIFGDEEGDLFKEKAVASPEATVSQTDENKARAEKKVTLSYSKNLKPSSETKTQKGLFSDEEDSEDLFSSQSASNLKGASLLPGKLPTSVSLFDDEDEEDNLFGGTAAKKQTLSLQAQREEKAKASELSKKKASALLFSSDEEDQWNIPASQTHLASDSRSKGEPRDSGTLQSQEAKAVKKTSLFEEDKEDDLFAIAKDSQKKTQRVSLLFEDDVDSGGSLFGSPPTSVPPATKKKETVSEAPPLLFSDEEEKEAQLGVKSVDKKVESAKESLKFGRTDVAESEKEGLLTRSAQETVKHSDLFSSSSPWDKGTKPRTKTVLSLFDEEEDKMEDQNIIQAPQKEVGKGCDPDAHPKSTGVFQDEELLFSHKLQKDNDPDVDLFAGTKKTKLLEPSVGSLFGDDEDDDLFSSAKSQPLVQEKKRVVKKDHSVNSFKNQKHPESIQGSKEKGIWKPETPQDSSGLAPFKTKEPSTRIGKIQANLAINPAALLPTAASQISEVKPVLPELAFPSSEHRRSHGLESVPVLPGSGEAGVSFDLPAQADTLHSANKSRVKMRGKRRPQTRAARRLAAQESSEAEDMSVPRGPIAQWADGAISPNGHRPQLRAASGEDSTEEALAAAAAPWEGGPVPGVDTSPFAKSLGHSRGEADLFDSGDIFSTGTGSQSVERTKPKAKIAENPANPPVGGKAKSPMFPALGEASSDDDLFQSAKPKPAKKTNPFPLLEDEDDLFTDQKVKKNETKSSSQQDVILTTQDIFEDDIFATEAIKPSQKTREKEKTLESNLFDDNIDIFADLTVKPKEKSKKKVEAKSIFDDDMDDIFSTGIQAKTTKPKSRSAQAAPEPRFEHKVSNIFDDPLNAFGGQ

SEQ ID NO: 6638 - DNA, 4512 bp, Homo sapiens
acgccccgggcagcttggctggggctaggcttccggggctctgcggtcctcggcctgtgctggcagcctcggagcccaccgagccgggcggctgggatgatgaaccggacgacccccgaccaggagctggtgccggcgtcggagcccgtgtgggagcggccgtggtcggtggaggagatccgcaggagcagccagagctggtcgctggcggccgacgcgggcctactacagtttctacaggaattctcacagcaaactatctctaggacccatgaaatcaagaaacaagtggacggactaatccgggaaaccaaagccacagattgtcgcctgcataatgtcttcaatgacttccttatgctctctaatacccagttcatagagaatcgtgtatatgatgaagaagtggaggagccagtactcaaggctgaggcagaaaaaacagagcaggagaagacacgagagcagaaagaagtagatctcattcctaaagtccaggaggctgtgaactatggcttacaagtattggacagtgcctttgagcaacttgatatcaaagcaggaaactcagactccgaggaagatgatgctaatgggcgggtggaactgatccttgaaccaaaggatctatacattgatcgtcctttaccatatctcattgggtcaaagctgttcatggaacaagaagatgtaggtcttggagagctgtccagtgaagaaggctctgtaggcagtgatcgtggcagtattgtggacactgaggaagagaaagaagaggaggagtcagatgaagattttgcccatcacagtgacaatgaacaaaaccagaaaagaagcagacctacatcgtttgcagatgagctggctgcccgcatcaagggggatgccatgggtcgagtggacgaggagccgacaaccttaccctcaggagaagcaaaacctcggaagacactcaaagagaagaaggaaaggagaactccttcagacgatgaagaggataacttattcgcaccccccaagctgaccgacgaggacttctcgccatttggctctggaggtggcctgttcagtggcggcaaggggctatttgatgatgaggacgaggagagtgacctcttcacggaagcctcccaggatcggcaagctggagcctctgttaaggaggagtcttcatcatccaaacctggaaagaaaatcccagcaggagctgtttctgtatttttaggagacacggatgtgtttggtgctgcctccgttccatcactgaaggagccacagaagcctgagcagcccactccaaggaaaagcccctatggtccccctcccactggcctctttgatgatgatgatggtgatgatgatgacgactttttctcggcaccccacagcaaaccttctaaaacacgcaaagtccaatccactgccgatatctttggtgacgaagaaggagatctgttcaaagaaaaagccgtagcatcgccagaagccactgtgagtcagacagatgaaaataaagcaagagcagaaaaaaaggttaccttatcttacagcaaaaatctcaagccctcatcagaaacaaagactcaaaaaggcttattttcagatgaggaggactctgaggatttgttttcttctcaaagtgcgagtaacttaaaaggtgcatctctgctgcctggcaagctccccacgtcggtttccctgtttgatgatgaagatgaagaggataatctttttgggggtacagctgctaagaagcagacattgtctctacaagctcagagagaagagaaagcaaaagcctccgagctctccaaaaagaaagcatctgccctgttgttcagcagtgatgaggaggaccagtggaatattcctgcttcacagacccacttagcatctgacagcaggtctaaaggagaacccagggattctgggaccctccagagccaggaggccaaggctgtgaaaaagaccagtctctttgaggaagacaaagaagatgatctttttgccattgccaaggacagccaaaagaagacccagagagtgtcactcctctttgaagacgatgttgatagcggaggctctctgtttggctctcctcccacatctgttcctcctgcaacaaagaaaaaagagactgtctctgaggcaccacctttgctgttcagcgatgaagaagagaaggaggcacaacttggagtgaagtctgtggataagaaggttgagagtgccaaggagtcattaaaatttgggagaactgatgtggctgagtcagaaaaggaaggacttttgactagatctgctcaggaaacagtcaagcattctgatttattttcttcatcatccccatgggacaaaggaaccaagcctagaaccaaaactgttcttagcttgtttgatgaggaagaggataaaatggaagatcaaaacattatccaggctccacagaaagaagtaggaaagggctgcgatcctgatgcccaccccaagagcacaggtgtcttccaggatgaagagctgcttttcagccacaagctccaaaaggacaatgacccagatgttgacctttttgctggcaccaaaaaaaccaagctgttagagccaagtgttgggagcctgtttggggatgatgaagatgatgatcttttcagctctgccaagtcccagcctttggtacaagagaaaaagagagtagtgaaaaaagaccactctgttaactctttcaaaaaccagaaacatcctgaatccattcaaggtagtaaagaaaaaggcatatggaagccggaaacacctcaggcaaatttagcgatcaacccagcggccttgctgcccacagcggcttcccagatctctgaagtaaagcctgttttgccagaattggcttttccttcatctgaacacagaaggagccacggtctggaaagtgtgcctgtccttcccgggagtggggaggccggtgtgagttttgatcttccagctcaggcagacaccttacacagtgcaaacaagagccgtgtcaagatgagagggaagcgtagaccgcagacccgtgcagctaggcggctggctgctcaggagtccagcgaggctgaggacatgagcgtccccagaggacccattgcacagtgggctgatggcgccatttccccaaatggccatcggccacagctcagagcagccagtggagaagacagcactgaggaggccctggcagctgccgctgcaccttgggaaggtggtcctgtgcctggagtggacacaagcccctttgcaaagtctctgggtcattccagaggggaggctgacctttttgattctggggacattttttccacgggcactggatctcagtccgtggagagaacaaaacccaaggcaaagatagcagagaatcctgccaacccaccagtgggtggtaaagcaaagagccccatgtttcctgctctaggcgaggccagcagtgatgatgatctctttcagtctgctaaaccaaaaccagcaaagaaaacaaatccctttcctctcctggaagatgaggatgacctctttacagatcagaaagtcaagaagaatgagacaaaatccagtagtcagcaggatgtcatattaacaacacaagatatttttgaggatgatatatttgctacggaagcaattaaaccctctcagaaaaccagagagaaggagaaaacattggaatctaatttatttgatgataacattgatatctttgctgacttaactgtaaaaccaaaagaaaagtccaaaaagaaagtggaagccaagtctatatttgatgatgatatggatgacatcttctccactggtatccaggctaagacaaccaaaccaaaaagccgatctgcacaggccgcacctgaaccaagatttgaacacaaggtgtccaacatctttgatgatcccctgaatgcctttggaggccagtagagcacacagggtatccacatgttaccctgcagctacattgttgagttagtgatgatattgtatatgctcatggtcttaactggattacaaaaagcaaatactagaacagctagctcatcttttacccaatgtacttagtatttttctgcactggtttaatcatgcttaatactacaaaacaaaaataaatatttcacagtggttggtttgttttgtttttaaaccacagtttgatttagttagccttgctggggccataatatgcttcagggtgtgtaaaagaagaaatctctttgtggctttcatgggcagggaatctcagagatagcaaatgccacctgaccagaagtctttgttatatggatgggaaccctaacttagggcttgggcaggggaaagagaaagaagatgagagattatacttcatgagtcttagcaatatgggagcaggttttcactgaattctgagggtgcctctgcatgtcctccaaggcaaagtttggcaaactgtggcccccccactgtcatattttgttaataaaattttattggaacacaatcaca

SEQ ID NO: 6639 - protein, 1283 aa, Homo sapiens
MMNRTTPDQELVPASEPVWERPWSVEEIRRSSQSWSLAADAGLLQFLQEFSQQTISRTHEIKKQVDGLIRETKATDCRLHNVFNDFLMLSNTQFIENRVYDEEVEEPVLKAEAEKTEQEKTREQKEVDLIPKVQEAVNYGLQVLDSAFEQLDIKAGNSDSEEDDANGRVELILEPKDLYIDRPLPYLIGSKLFMEQEDVGLGELSSEEGSVGSDRGSIVDTEEEKEEEESDEDFAHHSDNEQNQKRSRPTSFADELAARIKGDAMGRVDEEPTTLPSGEAKPRKTLKEKKERRTPSDDEEDNLFAPPKLTDEDFSPFGSGGGLFSGGKGLFDDEDEESDLFTEASQDRQAGASVKEESSSSKPGKKIPAGAVSVFLGDTDVFGAASVPSLKEPQKPEQPTPRKSPYGPPPTGLFDDDDGDDDDDFFSAPHSKPSKTRKVQSTADIFGDEEGDLFKEKAVASPEATVSQTDENKARAEKKVTLSYSKNLKPSSETKTQKGLFSDEEDSEDLFSSQSASNLKGASLLPGKLPTSVSLFDDEDEEDNLFGGTAAKKQTLSLQAQREEKAKASELSKKKASALLFSSDEEDQWNIPASQTHLASDSRSKGEPRDSGTLQSQEAKAVKKTSLFEEDKEDDLFAIAKDSQKKTQRVSLLFEDDVDSGGSLFGSPPTSVPPATKKKETVSEAPPLLFSDEEEKEAQLGVKSVDKKVESAKESLKFGRTDVAESEKEGLLTRSAQETVKHSDLFSSSSPWDKGTKPRTKTVLSLFDEEEDKMEDQNIIQAPQKEVGKGCDPDAHPKSTGVFQDEELLFSHKLQKDNDPDVDLFAGTKKTKLLEPSVGSLFGDDEDDDLFSSAKSQPLVQEKKRVVKKDHSVNSFKNQKHPESIQGSKEKGIWKPETPQANLAINPAALLPTAASQISEVKPVLPELAFPSSEHRRSHGLESVPVLPGSGEAGVSFDLPAQADTLHSANKSRVKMRGKRRPQTRAARRLAAQESSEAEDMSVPRGPIAQWADGAISPNGHRPQLRAASGEDSTEEALAAAAAPWEGGPVPGVDTSPFAKSLGHSRGEADLFDSGDIFSTGTGSQSVERTKPKAKIAENPANPPVGGKAKSPMFPALGEASSDDDLFQSAKPKPAKKTNPFPLLEDEDDLFTDQKVKKNETKSSSQQDVILTTQDIFEDDIFATEAIKPSQKTREKEKTLESNLFDDNIDIFADLTVKPKEKSKKKVEAKSIFDDDMDDIFSTGIQAKTTKPKSRSAQAAPEPRFEHKVSNIFDDPLNAFGGQ

SEQ ID NO: 6640 - DNA, 4300 bp, Homo sapiens
acgccccgggcagcttggctggggctaggcttccggggctctgcggtcctcggcctgtgctggcagcctcggagcccaccgagccgggcggctgggatgatgaaccggacgacccccgaccaggagctggtgccggcgtcggagcccgtgtgggagcggccgtggtcggtggaggagatccgcaggagcagccagagctggtcgctggcggccgacgcgggcctactacagtttctacaggaattctcacagcaaactatctctaggacccatgaaatcaagaaacaagtggacggactaatccgggaaaccaaagccacagattgtcgcctgcataatgtcttcaatgacttccttatgctctctaatacccagttcatagagaatcgtgtatatgatgaagaagtggaggagccagtactcaaggctgaggcagaaaaaacagagcaggagaagacacgagagcagaaagaagtagatctcattcctaaagtccaggaggctgtgaactatggcttacaagtattggacagtgcctttgagcaacttgatatcaaagcaggaaactcagactccgaggaagatgatgctaatgggcgggtggaactgatccttgaaccaaaggatctatacattgatcgtcctttaccatatctcattgggtcaaagctgttcatggaacaagaagatgtaggtcttggagagctgtccagtgaagaaggctctgtaggcagtgatcgtggcagtattgtggacactgaggaagagaaagaagaggaggagtcagatgaagattttgcccatcacagtgacaatgaacaaaaccagcacaccacacaaatgagtgatgaggaagaggatgatgatggctgtgacctttttgctgactctgagaaggaggaggaagatattgaggacattgaagaaaatactagacctaaaagaagcagacctacatcgtttgcagatgagctggctgcccgcatcaagggggatgccatgggtcgagtggacgaggagccgacaaccttaccctcaggagaagcaaaacctcggaagacactcaaagagaagaaggaaaggagaactccttcagacgatgaagaggataacttattcgcaccccccaagctgaccgacgaggacttctcgccatttggctctggaggtggcctgttcagtggcggcaaggggctatttgatgatgaggacgaggagagtgacctcttcacggaagcctcccaggatcggcaagctggagcctctgttaaggaggagtcttcatcatccaaacctggaaagaaaatcccagcaggagctgtttctgtatttttaggagacacggatgtgtttggtgctgcctccgttccatcactgaaggagccacagaagcctgagcagcccactccaaggaaaagcccctatggtccccctcccactggcctctttgatgatgatgatggtgatgatgatgacgactttttctcggcaccccacagcaaaccttctaaaacacgcaaagtccaatccactgccgatatctttggtgacgaagaaggagatctgttcaaagaaaaagccgtagcatcgccagaagccactgtgagtcagacagatgaaaataaagcaagagcagaaaaaaaggttaccttatcttacagcaaaaatctcaagccctcatcagaaacaaagactcaaaaaggcttattttcagatgaggaggactctgaggatttgttttcttctcaaagtgcgagtaacttaaaaggtgcatctctgctgcctggcaagctccccacgtcggtttccctgtttgatgatgaagatgaagaggataatctttttgggggtacagctgctaagaagcagacattgtctctacaagctcagagagaagagaaagcaaaagcctccgagctctccaaaaagaaagcatctgccctgttgttcagcagtgatgaggagccaaaagaagacccagagagtgtcactcctctttgaagacgatgttgatagcggaggctctctgtttggctctcctcccacatctgttcctcctgcaacaaaggaaggacttttgactagatctgctcaggaaacagtcaagcattctgatttattttcttcatcatccccatgggacaaaggaaccaagcctagaaccaaaactgttcttagcttgtttgatgaggaagaggataaaatggaagatcaaaacattatccaggctccacagaaagaagtaggaaagggctgcgatcctgatgcccaccccaagagcacaggtgtcttccaggatgaagagctgcttttcagccacaagctccaaaaggacaatgacccagatgttgacctttttgctggcaccaaaaaaaccaagctgttagagccaagtgttgggagcctgtttggggatgatgaagatgatgatcttttcagctctgccaagtcccagcctttggtacaagagaaaaagagagtagtgaaaaaagaccactctgttaactctttcaaaaaccagaaacatcctgaatccattcaaggtagtaaagaaaaaggcatatggaagccggaaacacctcaggcaaatttagcgatcaacccagcggccttgctgcccacagcggcttcccagatctctgaagtaaagcctgttttgccagaattggcttttccttcatctgaacacagaaggagccacggtctggaaagtgtgcctgtccttcccgggagtggggaggccggtgtgagttttgatcttccagctcaggcagacaccttacacagtgcaaacaagagccgtgtcaagatgagagggaagcgtagaccgcagacccgtgcagctaggcggctggctgctcaggagtccagcgaggctgaggacatgagcgtccccagaggacccattgcacagtgggctgatggcgccatttccccaaatggccatcggccacagctcagagcagccagtggagaagacagcactgaggaggccctggcagctgccgctgcaccttgggaaggtggtcctgtgcctggagtggacacaagcccctttgcaaagtctctgggtcattccagaggggaggctgacctttttgattctggggacattttttccacgggcactggatctcagtccgtggagagaacaaaacccaaggcaaagatagcagagaatcctgccaacccaccagtgggtggtaaagcaaagagccccatgtttcctgctctaggcgaggccagcagtgatgatgatctctttcagtctgctaaaccaaaaccagcaaagaaaacaaatccctttcctctcctggaagatgaggatgacctctttacagatcagaaagtcaagaagaatgagacaaaatccagtagtcagcaggatgtcatattaacaacacaagatatttttgaggatgatatatttgctacggaagcaattaaaccctctcagaaaaccagagagaaggagaaaacattggaatctaatttatttgatgataacattgatatctttgctgacttaactgtaaaaccaaaagaaaagtccaaaaagaaagtggaagccaagtctatatttgatgatgatatggatgacatcttctccactggtatccaggctaagacaaccaaaccaaaaagccgatctgcacaggccgcacctgaaccaagatttgaacacaaggtgtccaacatctttgatgatcccctgaatgcctttggaggccagtagagcacacagggtatccacatgttaccctgcagctacattgttgagttagtgatgatattgtatatgctcatggtcttaactggattacaaaaagcaaatactagaacagctagctcatcttttacccaatgtacttagtatttttctgcactggtttaatcatgcttaatactacaaaacaaaaataaatatttcacagtggttggtttgttttgtttttaaaccacagtttgatttagttagccttgctggggccataatatgcttcagggtgtgtaaaagaagaaatctctttgtggctttcatgggcagggaatctcagagatagcaaatgccacctgaccagaagtctttgttatatggatgggaaccctaacttagggcttgggcaggggaaagagaaagaagatgagagattatacttcatgagtcttagcaatatgggagcaggttttcactgaattctgagggtgcctctgcatgtcctccaaggcaaagtttggcaaactgtggcccccccactgtcatattttgttaataaaattttattggaacacaatcaca

SEQ ID NO: 6641 - protein, 639 aa, Homo sapiens; identical to SEQ ID NO: 6629

SEQ ID NO: 6642 - DNA, 4689 bp, Homo sapiens
acgccccgggcagcttggctggggctaggcttccggggctctgcggtcctcggcctgtgctggcagcctcggagcccaccgagccgggcggctgggatgatgaaccggacgacccccgaccaggagctggtgccggcgtcggagcccgtgtgggagcggccgtggtcggtggaggagatccgcaggagcagccagagctggtcgctggcggccgacgcgggcctactacagtttctacaggaattctcacagcaaactatctctaggacccatgaaatcaagaaacaagtggacggactaatccgggaaaccaaagccacagattgtcgcctgcataatgtcttcaatgacttccttatgctctctaatacccagttcatagagaatcgtgtatatgatgaagaagtggaggagccagtactcaaggctgaggcagaaaaaacagagcaggagaagacacgagagcagaaagaagtagatctcattcctaaagtccaggaggctgtgaactatggcttacaagtattggacagtgcctttgagcaacttgatatcaaagcaggaaactcagactccgaggaagatgatgctaatgggcgggtggaactgatccttgaaccaaagagtttcactcttgttgcccaagctggagtggcgcaatctcggctcactgcagcttctgtctcctgggttcaagcgattctcctgcctcagccttccaagtagctgggattacaggatctatacattgatcgtcctttaccatatctcattgggtcaaagctgttcatggaacaagaagatgtaggtcttggagagctgtccagtgaagaaggctctgtaggcagtgatcgtggcagtattgtggacactgaggaagagaaagaagaggaggagtcagatgaagattttgcccatcacagtgacaatgaacaaaaccagaaaagaagcagacctacatcgtttgcagatgagctggctgcccgcatcaagggggatgccatgggtcgagtggacgaggagccgacaaccttaccctcaggagaagcaaaacctcggaagacactcaaagagaagaaggaaaggagaactccttcagacgatgaagaggataacttattcgcaccccccaagctgaccgacgaggacttctcgccatttggctctggaggtggcctgttcagtggcggcaaggggctatttgatgatgaggacgaggagagtgacctcttcacggaagcctcccaggatcggcaagctggagcctctgttaaggaggagtcttcatcatccaaacctggaaagaaaatcccagcaggagctgtttctgtatttttaggagacacggatgtgtttggtgctgcctccgttccatcactgaaggagccacagaagcctgagcagcccactccaaggaaaagcccctatggtccccctcccactggcctctttgatgatgatgatggtgatgatgatgacgactttttctcggcaccccacagcaaaccttctaaaacacgcaaagtccaatccactgccgatatctttggtgacgaagaaggagatctgttcaaagaaaaagccgtagcatcgccagaagccactgtgagtcagacagatgaaaataaagcaagagcagaaaaaaaggttaccttatcttacagcaaaaatctcaagccctcatcagaaacaaagactcaaaaaggcttattttcagatgaggaggactctgaggatttgttttcttctcaaagtgcgagtaacttaaaaggtgcatctctgctgcctggcaagctccccacgtcggtttccctgtttgatgatgaagatgaagaggataatctttttgggggtacagctgctaagaagcagacattgtctctacaagctcagagagaagagaaagcaaaagcctccgagctctccaaaaagaaagcatctgccctgttgttcagcagtgatgaggaggaccagtggaatattcctgcttcacagacccacttagcatctgacagcaggtctaaaggagaacccagggattctgggaccctccagagccaggaggccaaggctgtgaaaaagaccagtctctttgaggaagacaaagaagatgatctttttgccattgccaaggacagccaaaagaagacccagagagtgtcactcctctttgaagacgatgttgatagcggaggctctctgtttggctctcctcccacatctgttcctcctgcaacaaagaaaaaagagactgtctctgaggcaccacctttgctgttcagcgatgaagaagagaaggaggcacaacttggagtgaagtctgtggataagaaggttgagagtgccaaggagtcattaaaatttgggagaactgatgtggctgagtcagaaaaggaaggacttttgactagatctgctcaggaaacagtcaagcattctgatttattttcttcatcatccccatgggacaaaggaaccaagcctagaaccaaaactgttcttagcttgtttgatgaggaagaggataaaatggaagatcaaaacattatccaggctccacagaaagaagtaggaaagggctgcgatcctgatgcccaccccaagagcacaggtgtcttccaggatgaagagctgcttttcagccacaagctccaaaaggacaatgacccagatgttgacctttttgctggcaccaaaaaaaccaagctgttagagccaagtgttgggagcctgtttggggatgatgaagatgatgatcttttcagctctgccaagtcccagcctttggtacaagagaaaaagagagtagtgaaaaaagaccactctgttaactctttcaaaaaccagaaacatcctgaatccattcaaggtagtaaagaaaaaggcatatggaagccggaaacacctcaggactcatcaggtctcgctccatttaaaaccaaagaaccatccactcggatcgggaagatacaagcaaatttagcgatcaacccagcggccttgctgcccacagcggcttcccagatctctgaagtaaagcctgttttgccagaattggcttttccttcatctgaacacagaaggagccacggtctggaaagtgtgcctgtccttcccgggagtggggaggccggtgtgagttttgatcttccagctcaggcagacaccttacacagtgcaaacaagagccgtgtcaagatgagagggaagcgtagaccgcagacccgtgcagctaggcggctggctgctcaggagtccagcgaggctgaggacatgagcgtccccagaggacccattgcacagtgggctgatggcgccatttccccaaatggccatcggccacagctcagagcagccagtggagaagacagcactgaggaggccctggcagctgccgctgcaccttgggaaggtggtcctgtgcctggagtggacacaagcccctttgcaaagtctctgggtcattccagaggggaggctgacctttttgattctggggacattttttccacgggcactggatctcagtccgtggagagaacaaaacccaaggcaaagatagcagagaatcctgccaacccaccagtgggtggtaaagcaaagagccccatgtttcctgctctaggcgaggccagcagtgatgatgatctctttcagtctgctaaaccaaaaccagcaaagaaaacaaatccctttcctctcctggaagatgaggatgacctctttacagatcagaaagtcaagaagaatgagacaaaatccagtagtcagcaggatgtcatattaacaacacaagatatttttgaggatgatatatttgctacggaagcaattaaaccctctcagaaaaccagagagaaggagaaaacattggaatctaatttatttgatgataacattgatatctttgctgacttaactgtaaaaccaaaagaaaagtccaaaaagaaagtggaagccaagtctatatttgatgatgatatggatgacatcttctccactggtatccaggctaagacaaccaaaccaaaaagccgatctgcacaggccgcacctgaaccaagatttgaacacaaggtgtccaacatctttgatgatcccctgaatgcctttggaggccagtagagcacacagggtatccacatgttaccctgcagctacattgttgagttagtgatgatattgtatatgctcatggtcttaactggattacaaaaagcaaatactagaacagctagctcatcttttacccaatgtacttagtatttttctgcactggtttaatcatgcttaatactacaaaacaaaaataaatatttcacagtggttggtttgttttgtttttaaaccacagtttgatttagttagccttgctggggccataatatgcttcagggtgtgtaaaagaagaaatctctttgtggctttcatgggcagggaatctcagagatagcaaatgccacctgaccagaagtctttgttatatggatgggaaccctaacttagggcttgggcaggggaaagagaaagaagatgagagattatacttcatgagtcttagcaatatgggagcaggttttcactgaattctgagggtgcctctgcatgtcctccaaggcaaagtttggcaaactgtggcccccccactgtcatattttgttaataaaattttattggaacacaatcaca

SEQ ID NO: 6643 - protein, 1111 aa, Homo sapiens
MEQEDVGLGELSSEEGSVGSDRGSIVDTEEEKEEEESDEDFAHHSDNEQNQKRSRPTSFADELAARIKGDAMGRVDEEPTTLPSGEAKPRKTLKEKKERRTPSDDEEDNLFAPPKLTDEDFSPFGSGGGLFSGGKGLFDDEDEESDLFTEASQDRQAGASVKEESSSSKPGKKIPAGAVSVFLGDTDVFGAASVPSLKEPQKPEQPTPRKSPYGPPPTGLFDDDDGDDDDDFFSAPHSKPSKTRKVQSTADIFGDEEGDLFKEKAVASPEATVSQTDENKARAEKKVTLSYSKNLKPSSETKTQKGLFSDEEDSEDLFSSQSASNLKGASLLPGKLPTSVSLFDDEDEEDNLFGGTAAKKQTLSLQAQREEKAKASELSKKKASALLFSSDEEDQWNIPASQTHLASDSRSKGEPRDSGTLQSQEAKAVKKTSLFEEDKEDDLFAIAKDSQKKTQRVSLLFEDDVDSGGSLFGSPPTSVPPATKKKETVSEAPPLLFSDEEEKEAQLGVKSVDKKVESAKESLKFGRTDVAESEKEGLLTRSAQETVKHSDLFSSSSPWDKGTKPRTKTVLSLFDEEEDKMEDQNIIQAPQKEVGKGCDPDAHPKSTGVFQDEELLFSHKLQKDNDPDVDLFAGTKKTKLLEPSVGSLFGDDEDDDLFSSAKSQPLVQEKKRVVKKDHSVNSFKNQKHPESIQGSKEKGIWKPETPQDSSGLAPFKTKEPSTRIGKIQANLAINPAALLPTAASQISEVKPVLPELAFPSSEHRRSHGLESVPVLPGSGEAGVSFDLPAQADTLHSANKSRVKMRGKRRPQTRAARRLAAQESSEAEDMSVPRGPIAQWADGAISPNGHRPQLRAASGEDSTEEALAAAAAPWEGGPVPGVDTSPFAKSLGHSRGEADLFDSGDIFSTGTGSQSVERTKPKAKIAENPANPPVGGKAKSPMFPALGEASSDDDLFQSAKPKPAKKTNPFPLLEDEDDLFTDQKVKKNETKSSSQQDVILTTQDIFEDDIFATEAIKPSQKTREKEKTLESNLFDDNIDIFADLTVKPKEKSKKKVEAKSIFDDDMDDIFSTGIQAKTTKPKSRSAQAAPEPRFEHKVSNIFDDPLNAFGGQ

SEQ ID NO: 6644 - DNA, 4915 bp, Homo sapiens
acgccccgggcagcttggctggggctaggcttccggggctctgcggtcctcggcctgtgctggcagcctcggagcccaccgagccgggcggctgggatgatgaaccggacgacccccgaccaggagctggtgccggcgtcggagcccgtgtgggagcggccgtggtcggtggaggagatccgcaggagcagccagagctggtcgctggcggccgacgcgggcctactacagtttctacaggaattctcacagcaaactatctctaggacccatgaaatcaagaaacaagtggacggactaatccgggaaaccaaagccacagattgtcgcctgcataatgtcttcaatgacttccttatgctctctaatacccagttcatagagaatcgtgtatatgatgaagaagtggaggagccagtactcaaggctgaggcagaaaaaacagagcaggagaagacacgagagcagaaagaagtagatctcattcctaaagtccaggaggctgtgaactatggcttacaagtattggacagtgcctttgagcaacttgatatcaaagcaggaaactcagactccgaggaagatgatgctaatgggcgggtggaactgatccttgaaccaaagagtttcactcttgttgcccaagctggagtggcgcaatctcggctcactgcagcttctgtctcctgggttcaagcgattctcctgcctcagccttccaagtagctgggattacaggatctatacattgatcgtcctttaccatatctcattgggtcaaagctgttcatggaacaagaagatgtaggtcttggagagctgtccagtgaagaaggctctgtaggcagtgatcgtggcagtattgtggacactgaggaagagaaagaagaggaggagtcagatgaagattttgcccatcacagtgacaatgaacaaaaccagcacaccacacaaatgagtgatgaggaagaggatgatgatggctgtgacctttttgctgactctgagaaggaggaggaagatattgaggacattgaagaaaatactagacctaaaagaagcagacctacatcgtttgcagatgagctggctgcccgcatcaagggggatgccatgggtcgagtggacgaggagccgacaaccttaccctcaggagaagcaaaacctcggaagacactcaaagagaagaaggaaaggagaactccttcagacgatgaagaggataacttattcgcaccccccaagctgaccgacgaggacttctcgccatttggctctggaggtggcctgttcagtggcggcaaggggctatttgatgatgaggacgaggagagtgacctcttcacggaagcctcccaggatcggcaagctggagcctctgttaaggaggagtcttcatcatccaaacctggaaagaaaatcccagcaggagctgtttctgtatttttaggagacacggatgtgtttggtgctgcctccgttccatcactgaaggagccacagaagcctgagcagcccactccaaggaaaagcccctatggtccccctcccactggcctctttgatgatgatgatggtgatgatgatgacgactttttctcggcaccccacagcaaaccttctaaaacacgcaaagtccaatccactgccgatatctttggtgacgaagaaggagatctgttcaaagaaaaagccgtagcatcgccagaagccactgtgagtcagacagatgaaaataaagcaagagcagaaaaaaaggttaccttatcttacagcaaaaatctcaagccctcatcagaaacaaagactcaaaaaggcttattttcagatgaggaggactctgaggatttgttttcttctcaaagtgcgagtaacttaaaaggtgcatctctgctgcctggcaagctccccacgtcggtttccctgtttgatgatgaagatgaagaggataatctttttgggggtacagctgctaagaagcagacattgtctctacaagctcagagagaagagaaagcaaaagcctccgagctctccaaaaagaaagcatctgccctgttgttcagcagtgatgaggaggaccagtggaatattcctgcttcacagacccacttagcatctgacagcaggtctaaaggagaacccagggattctgggaccctccagagccaggaggccaaggctgtgaaaaagaccagtctctttgaggaagacaaagaagatgatctttttgccattgccaaggacagatacatcctacctcctattgttcccgaagttgtctgtcaagttttgtgtatggaaagtaattcataccttcatcagatctcaaaagaagctttacacacacaagaagaagttgagccaaaagaagacccagagagtgtcactcctctttgaagacgatgttgatagcggaggctctctgtttggctctcctcccacatctgttcctcctgcaacaaagaaaaaagagactgtctctgaggcaccacctttgctgttcagcgatgaagaagagaaggaggcacaacttggagtgaagtctgtggataagaaggttgagagtgccaaggagtcattaaaatttgggagaactgatgtggctgagtcagaaaaggaaggacttttgactagatctgctcaggaaacagtcaagcattctgatttattttcttcatcatccccatgggacaaaggaaccaagcctagaaccaaaactgttcttagcttgtttgatgaggaagaggataaaatggaagatcaaaacattatccaggctccacagaaagaagtaggaaagggctgcgatcctgatgcccaccccaagagcacaggtgtcttccaggatgaagagctgcttttcagccacaagctccaaaaggacaatgacccagatgttgacctttttgctggcaccaaaaaaaccaagctgttagagccaagtgttgggagcctgtttggggatgatgaagatgatgatcttttcagctctgccaagtcccagcctttggtacaagagaaaaagagagtagtgaaaaaagaccactctgttaactctttcaaaaaccagaaacatcctgaatccattcaaggtagtaaagaaaaaggcatatggaagccggaaacacctcaggactcatcaggtctcgctccatttaaaaccaaagaaccatccactcggatcgggaagatacaagcaaatttagcgatcaacccagcggccttgctgcccacagcggcttcccagatctctgaagtaaagcctgttttgccagaattggcttttccttcatctgaacacagaaggagccacggtctggaaagtgtgcctgtccttcccgggagtggggaggccggtgtgagttttgatcttccagctcaggcagacaccttacacagtgcaaacaagagccgtgtcaagatgagagggaagcgtagaccgcagacccgtgcagctaggcggctggctgctcaggagtccagcgaggctgaggacatgagcgtccccagaggacccattgcacagtgggctgatggcgccatttccccaaatggccatcggccacagctcagagcagccagtggagaagacagcactgaggaggccctggcagctgccgctgcaccttgggaaggtggtcctgtgcctggagtggacacaagcccctttgcaaagtctctgggtcattccagaggggaggctgacctttttgattctggggacattttttccacgggcactggatctcagtccgtggagagaacaaaacccaaggcaaagatagcagagaatcctgccaacccaccagtgggtggtaaagcaaagagccccatgtttcctgctctaggcgaggccagcagtgatgatgatctctttcagtctgctaaaccaaaaccagcaaagaaaacaaatccctttcctctcctggaagatgaggatgacctctttacagatcagaaagtcaagaagaatgagacaaaatccagtagtcagcaggatgtcatattaacaacacaagatatttttgaggatgatatatttgctacggaagcaattaaaccctctcagaaaaccagagagaaggagaaaacattggaatctaatttatttgatgataacattgatatctttgctgacttaactgtaaaaccaaaagaaaagtccaaaaagaaagtggaagccaagtctatatttgatgatgatatggatgacatcttctccactggtatccaggctaagacaaccaaaccaaaaagccgatctgcacaggccgcacctgaaccaagatttgaacacaaggtgtccaacatctttgatgatcccctgaatgcctttggaggccagtagagcacacagggtatccacatgttaccctgcagctacattgttgagttagtgatgatattgtatatgctcatggtcttaactggattacaaaaagcaaatactagaacagctagctcatcttttacccaatgtacttagtatttttctgcactggtttaatcatgcttaatactacaaaacaaaaataaatatttcacagtggttggtttgttttgtttttaaaccacagtttgatttagttagccttgctggggccataatatgcttcagggtgtgtaaaagaagaaatctctttgtggctttcatgggcagggaatctcagagatagcaaatgccacctgaccagaagtctttgttatatggatgggaaccctaacttagggcttgggcaggggaaagagaaagaagatgagagattatacttcatgagtcttagcaatatgggagcaggttttcactgaattctgagggtgcctctgcatgtcctccaaggcaaagtttggcaaactgtggcccccccactgtcatattttgttaataaaattttattggaacacaatcaca

SEQ ID NO: 6645 - protein, 709 aa, Homo sapiens; identical to SEQ ID NO: 6611

SEQ ID NO: 6646 - DNA, 4828 bp, Homo sapiens
acgccccgggcagcttggctggggctaggcttccggggctctgcggtcctcggcctgtgctggcagcctcggagcccaccgagccgggcggctgggatgatgaaccggacgacccccgaccaggagctggtgccggcgtcggagcccgtgtgggagcggccgtggtcggtggaggagatccgcaggagcagccagagctggtcgctggcggccgacgcgggcctactacagtttctacaggaattctcacagcaaactatctctaggacccatgaaatcaagaaacaagtggacggactaatccgggaaaccaaagccacagattgtcgcctgcataatgtcttcaatgacttccttatgctctctaatacccagttcatagagaatcgtgtatatgatgaagaagtggaggagccagtactcaaggctgaggcagaaaaaacagagcaggagaagacacgagagcagaaagaagtagatctcattcctaaagtccaggaggctgtgaactatggcttacaagtattggacagtgcctttgagcaacttgatatcaaagcaggaaactcagactccgaggaagatgatgctaatgggcgggtggaactgatccttgaaccaaagagtttcactcttgttgcccaagctggagtggcgcaatctcggctcactgcagcttctgtctcctgggttcaagcgattctcctgcctcagccttccaagtagctgggattacaggatctatacattgatcgtcctttaccatatctcattgggtcaaagctgttcatggaacaagaagatgtaggtcttggagagctgtccagtgaagaaggctctgtaggcagtgatcgtggcagtattgtggacactgaggaagagaaagaagaggaggagtcagatgaagattttgcccatcacagtgacaatgaacaaaaccagcacaccacacaaatgagtgatgaggaagaggatgatgatggctgtgacctttttgctgactctgagaaggaggaggaagatattgaggacattgaagaaaatactagacctaaaagaagcagacctacatcgtttgcagatgagctggctgcccgcatcaagggggatgccatgggtcgagtggacgaggagccgacaaccttaccctcaggagaagcaaaacctcggaagacactcaaagagaagaaggaaaggagaactccttcagacgatgaagaggataacttattcgcaccccccaagctgaccgacgaggacttctcgccatttggctctggaggtggcctgttcagtggcggcaaggggctatttgatgatgaggacgaggagagtgacctcttcacggaagcctcccaggatcggcaagctggagcctctgttaaggaggagtcttcatcatccaaacctggaaagaaaatcccagcaggagctgtttctgtatttttaggagacacggatgtgtttggtgctgcctccgttccatcactgaaggagccacagaagcctgagcagcccactccaaggaaaagcccctatggtccccctcccactggcctctttgatgatgatgatggtgatgatgatgacgactttttctcggcaccccacagcaaaccttctaaaacacgcaaagtccaatccactgccgatatctttggtgacgaagaaggagatctgttcaaagaaaaagccgtagcatcgccagaagccactgtgagtcagacagatgaaaataaagcaagagcagaaaaaaaggatttgttttcttctcaaagtgcgagtaacttaaaaggtgcatctctgctgcctggcaagctccccacgtcggtttccctgtttgatgatgaagatgaagaggataatctttttgggggtacagctgctaagaagcagacattgtctctacaagctcagagagaagagaaagcaaaagcctccgagctctccaaaaagaaagcatctgccctgttgttcagcagtgatgaggaggaccagtggaatattcctgcttcacagacccacttagcatctgacagcaggtctaaaggagaacccagggattctgggaccctccagagccaggaggccaaggctgtgaaaaagaccagtctctttgaggaagacaaagaagatgatctttttgccattgccaaggacagatacatcctacctcctattgttcccgaagttgtctgtcaagttttgtgtatggaaagtaattcataccttcatcagatctcaaaagaagctttacacacacaagaagaagttgagccaaaagaagacccagagagtgtcactcctctttgaagacgatgttgatagcggaggctctctgtttggctctcctcccacatctgttcctcctgcaacaaagaaaaaagagactgtctctgaggcaccacctttgctgttcagcgatgaagaagagaaggaggcacaacttggagtgaagtctgtggataagaaggttgagagtgccaaggagtcattaaaatttgggagaactgatgtggctgagtcagaaaaggaaggacttttgactagatctgctcaggaaacagtcaagcattctgatttattttcttcatcatccccatgggacaaaggaaccaagcctagaaccaaaactgttcttagcttgtttgatgaggaagaggataaaatggaagatcaaaacattatccaggctccacagaaagaagtaggaaagggctgcgatcctgatgcccaccccaagagcacaggtgtcttccaggatgaagagctgcttttcagccacaagctccaaaaggacaatgacccagatgttgacctttttgctggcaccaaaaaaaccaagctgttagagccaagtgttgggagcctgtttggggatgatgaagatgatgatcttttcagctctgccaagtcccagcctttggtacaagagaaaaagagagtagtgaaaaaagaccactctgttaactctttcaaaaaccagaaacatcctgaatccattcaaggtagtaaagaaaaaggcatatggaagccggaaacacctcaggactcatcaggtctcgctccatttaaaaccaaagaaccatccactcggatcgggaagatacaagcaaatttagcgatcaacccagcggccttgctgcccacagcggcttcccagatctctgaagtaaagcctgttttgccagaattggcttttccttcatctgaacacagaaggagccacggtctggaaagtgtgcctgtccttcccgggagtggggaggccggtgtgagttttgatcttccagctcaggcagacaccttacacagtgcaaacaagagccgtgtcaagatgagagggaagcgtagaccgcagacccgtgcagctaggcggctggctgctcaggagtccagcgaggctgaggacatgagcgtccccagaggacccattgcacagtgggctgatggcgccatttccccaaatggccatcggccacagctcagagcagccagtggagaagacagcactgaggaggccctggcagctgccgctgcaccttgggaaggtggtcctgtgcctggagtggacacaagcccctttgcaaagtctctgggtcattccagaggggaggctgacctttttgattctggggacattttttccacgggcactggatctcagtccgtggagagaacaaaacccaaggcaaagatagcagagaatcctgccaacccaccagtgggtggtaaagcaaagagccccatgtttcctgctctaggcgaggccagcagtgatgatgatctctttcagtctgctaaaccaaaaccagcaaagaaaacaaatccctttcctctcctggaagatgaggatgacctctttacagatcagaaagtcaagaagaatgagacaaaatccagtagtcagcaggatgtcatattaacaacacaagatatttttgaggatgatatatttgctacggaagcaattaaaccctctcagaaaaccagagagaaggagaaaacattggaatctaatttatttgatgataacattgatatctttgctgacttaactgtaaaaccaaaagaaaagtccaaaaagaaagtggaagccaagtctatatttgatgatgatatggatgacatcttctccactggtatccaggctaagacaaccaaaccaaaaagccgatctgcacaggccgcacctgaaccaagatttgaacacaaggtgtccaacatctttgatgatcccctgaatgcctttggaggccagtagagcacacagggtatccacatgttaccctgcagctacattgttgagttagtgatgatattgtatatgctcatggtcttaactggattacaaaaagcaaatactagaacagctagctcatcttttacccaatgtacttagtatttttctgcactggtttaatcatgcttaatactacaaaacaaaaataaatatttcacagtggttggtttgttttgtttttaaaccacagtttgatttagttagccttgctggggccataatatgcttcagggtgtgtaaaagaagaaatctctttgtggctttcatgggcagggaatctcagagatagcaaatgccacctgaccagaagtctttgttatatggatgggaaccctaacttagggcttgggcaggggaaagagaaagaagatgagagattatacttcatgagtcttagcaatatgggagcaggttttcactgaattctgagggtgcctctgcatgtcctccaaggcaaagtttggcaaactgtggcccccccactgtcatattttgttaataaaattttattggaacacaatcaca

SEQ ID NO: 6647 - protein, 709 aa, Homo sapiens; identical to SEQ ID NO: 6611

SEQ ID NO: 6648 - DNA, 4626 bp, Homo sapiens
acgccccgggcagcttggctggggctaggcttccggggctctgcggtcctcggcctgtgctggcagcctcggagcccaccgagccgggcggctgggatgatgaaccggacgacccccgaccaggagctggtgccggcgtcggagcccgtgtgggagcggccgtggtcggtggaggagatccgcaggagcagccagagctggtcgctggcggccgacgcgggcctactacagtttctacaggaattctcacagcaaactatctctaggacccatgaaatcaagaaacaagtggacggactaatccgggaaaccaaagccacagattgtcgcctgcataatgtcttcaatgacttccttatgctctctaatacccagttcatagagaatcgtgtatatgatgaagaagtggaggagccagtactcaaggctgaggcagaaaaaacagagcaggagaagacacgagagcagaaagaagtagatctcattcctaaagtccaggaggctgtgaactatggcttacaagtattggacagtgcctttgagcaacttgatatcaaagcaggaaactcagactccgaggaagatgatgctaatgggcgggtggaactgatccttgaaccaaagagtttcactcttgttgcccaagctggagtggcgcaatctcggctcactgcagcttctgtctcctgggttcaagcgattctcctgcctcagccttccaagtagctgggattacaggatctatacattgatcgtcctttaccatatctcattgggtcaaagctgttcatggaacaagaagatgtaggtcttggagagctgtccagtgaagaaggctctgtaggcagtgatcgtggcagtattgtggacactgaggaagagaaagaagaggaggagtcagatgaagattttgcccatcacagtgacaatgaacaaaaccagaaaagaagcagacctacatcgtttgcagatgagctggctgcccgcatcaagggggatgccatgggtcgagtggacgaggagccgacaaccttaccctcaggagaagcaaaacctcggaagacactcaaagagaagaaggaaaggagaactccttcagacgatgaagaggataacttattcgcaccccccaagctgaccgacgaggacttctcgccatttggctctggaggtggcctgttcagtggcggcaaggggctatttgatgatgaggacgaggagagtgacctcttcacggaagcctcccaggatcggcaagctggagcctctgttaaggaggagtcttcatcatccaaacctggaaagaaaatcccagcaggagctgtttctgtatttttaggagacacggatgtgtttggtgctgcctccgttccatcactgaaggagccacagaagcctgagcagcccactccaaggaaaagcccctatggtccccctcccactggcctctttgatgatgatgatggtgatgatgatgacgactttttctcggcaccccacagcaaaccttctaaaacacgcaaagtccaatccactgccgatatctttggtgacgaagaaggagatctgttcaaagaaaaagccgtagcatcgccagaagccactgtgagtcagacagatgaaaataaagcaagagcagaaaaaaaggttaccttatcttacagcaaaaatctcaagccctcatcagaaacaaagactcaaaaaggcttattttcagatgaggaggactctgaggatttgttttcttctcaaagtgcgagtaacttaaaaggtgcatctctgctgcctggcaagctccccacgtcggtttccctgtttgatgatgaagatgaagaggataatctttttgggggtacagctgctaagaagcagacattgtctctacaagctcagagagaagagaaagcaaaagcctccgagctctccaaaaagaaagcatctgccctgttgttcagcagtgatgaggaggaccagtggaatattcctgcttcacagacccacttagcatctgacagcaggtctaaaggagaacccagggattctgggaccctccagagccaggaggccaaggctgtgaaaaagaccagtctctttgaggaagacaaagaagatgatctttttgccattgccaaggacagccaaaagaagacccagagagtgtcactcctctttgaagacgatgttgatagcggaggctctctgtttggctctcctcccacatctgttcctcctgcaacaaagaaaaaagagactgtctctgaggcaccacctttgctgttcagcgatgaagaagagaaggaggcacaacttggagtgaagtctgtggataagaaggttgagagtgccaaggagtcattaaaatttgggagaactgatgtggctgagtcagaaaaggaaggacttttgactagatctgctcaggaaacagtcaagcattctgatttattttcttcatcatccccatgggacaaaggaaccaagcctagaaccaaaactgttcttagcttgtttgatgaggaagaggataaaatggaagatcaaaacattatccaggctccacagaaagaagtaggaaagggctgcgatcctgatgcccaccccaagagcacaggtgtcttccaggatgaagagctgcttttcagccacaagctccaaaaggacaatgacccagatgttgacctttttgctggcaccaaaaaaaccaagctgttagagccaagtgttgggagcctgtttggggatgatgaagatgatgatcttttcagctctgccaagtcccagcctttggtacaagagaaaaagagagtagtgaaaaaagaccactctgttaactctttcaaaaaccagaaacatcctgaatccattcaaggtagtaaagaaaaaggcatatggaagccggaaacacctcaggcaaatttagcgatcaacccagcggccttgctgcccacagcggcttcccagatctctgaagtaaagcctgttttgccagaattggcttttccttcatctgaacacagaaggagccacggtctggaaagtgtgcctgtccttcccgggagtggggaggccggtgtgagttttgatcttccagctcaggcagacaccttacacagtgcaaacaagagccgtgtcaagatgagagggaagcgtagaccgcagacccgtgcagctaggcggctggctgctcaggagtccagcgaggctgaggacatgagcgtccccagaggacccattgcacagtgggctgatggcgccatttccccaaatggccatcggccacagctcagagcagccagtggagaagacagcactgaggaggccctggcagctgccgctgcaccttgggaaggtggtcctgtgcctggagtggacacaagcccctttgcaaagtctctgggtcattccagaggggaggctgacctttttgattctggggacattttttccacgggcactggatctcagtccgtggagagaacaaaacccaaggcaaagatagcagagaatcctgccaacccaccagtgggtggtaaagcaaagagccccatgtttcctgctctaggcgaggccagcagtgatgatgatctctttcagtctgctaaaccaaaaccagcaaagaaaacaaatccctttcctctcctggaagatgaggatgacctctttacagatcagaaagtcaagaagaatgagacaaaatccagtagtcagcaggatgtcatattaacaacacaagatatttttgaggatgatatatttgctacggaagcaattaaaccctctcagaaaaccagagagaaggagaaaacattggaatctaatttatttgatgataacattgatatctttgctgacttaactgtaaaaccaaaagaaaagtccaaaaagaaagtggaagccaagtctatatttgatgatgatatggatgacatcttctccactggtatccaggctaagacaaccaaaccaaaaagccgatctgcacaggccgcacctgaaccaagatttgaacacaaggtgtccaacatctttgatgatcccctgaatgcctttggaggccagtagagcacacagggtatccacatgttaccctgcagctacattgttgagttagtgatgatattgtatatgctcatggtcttaactggattacaaaaagcaaatactagaacagctagctcatcttttacccaatgtacttagtatttttctgcactggtttaatcatgcttaatactacaaaacaaaaataaatatttcacagtggttggtttgttttgtttttaaaccacagtttgatttagttagccttgctggggccataatatgcttcagggtgtgtaaaagaagaaatctctttgtggctttcatgggcagggaatctcagagatagcaaatgccacctgaccagaagtctttgttatatggatgggaaccctaacttagggcttgggcaggggaaagagaaagaagatgagagattatacttcatgagtcttagcaatatgggagcaggttttcactgaattctgagggtgcctctgcatgtcctccaaggcaaagtttggcaaactgtggcccccccactgtcatattttgttaataaaattttattggaacacaatcaca

SEQ ID NO: 6649 - protein, 1090 aa, Homo sapiens
MEQEDVGLGELSSEEGSVGSDRGSIVDTEEEKEEEESDEDFAHHSDNEQNQKRSRPTSFADELAARIKGDAMGRVDEEPTTLPSGEAKPRKTLKEKKERRTPSDDEEDNLFAPPKLTDEDFSPFGSGGGLFSGGKGLFDDEDEESDLFTEASQDRQAGASVKEESSSSKPGKKIPAGAVSVFLGDTDVFGAASVPSLKEPQKPEQPTPRKSPYGPPPTGLFDDDDGDDDDDFFSAPHSKPSKTRKVQSTADIFGDEEGDLFKEKAVASPEATVSQTDENKARAEKKVTLSYSKNLKPSSETKTQKGLFSDEEDSEDLFSSQSASNLKGASLLPGKLPTSVSLFDDEDEEDNLFGGTAAKKQTLSLQAQREEKAKASELSKKKASALLFSSDEEDQWNIPASQTHLASDSRSKGEPRDSGTLQSQEAKAVKKTSLFEEDKEDDLFAIAKDSQKKTQRVSLLFEDDVDSGGSLFGSPPTSVPPATKKKETVSEAPPLLFSDEEEKEAQLGVKSVDKKVESAKESLKFGRTDVAESEKEGLLTRSAQETVKHSDLFSSSSPWDKGTKPRTKTVLSLFDEEEDKMEDQNIIQAPQKEVGKGCDPDAHPKSTGVFQDEELLFSHKLQKDNDPDVDLFAGTKKTKLLEPSVGSLFGDDEDDDLFSSAKSQPLVQEKKRVVKKDHSVNSFKNQKHPESIQGSKEKGIWKPETPQANLAINPAALLPTAASQISEVKPVLPELAFPSSEHRRSHGLESVPVLPGSGEAGVSFDLPAQADTLHSANKSRVKMRGKRRPQTRAARRLAAQESSEAEDMSVPRGPIAQWADGAISPNGHRPQLRAASGEDSTEEALAAAAAPWEGGPVPGVDTSPFAKSLGHSRGEADLFDSGDIFSTGTGSQSVERTKPKAKIAENPANPPVGGKAKSPMFPALGEASSDDDLFQSAKPKPAKKTNPFPLLEDEDDLFTDQKVKKNETKSSSQQDVILTTQDIFEDDIFATEAIKPSQKTREKEKTLESNLFDDNIDIFADLTVKPKEKSKKKVEAKSIFDDDMDDIFSTGIQAKTTKPKSRSAQAAPEPRFEHKVSNIFDDPLNAFGGQ

SEQ ID NO: 6650 - DNA, 4602 bp, Homo sapiens
acgccccgggcagcttggctggggctaggcttccggggctctgcggtcctcggcctgtgctggcagcctcggagcccaccgagccgggcggctgggatgatgaaccggacgacccccgaccaggagctggtgccggcgtcggagcccgtgtgggagcggccgtggtcggtggaggagatccgcaggagcagccagagctggtcgctggcggccgacgcgggcctactacagtttctacaggaattctcacagcaaactatctctaggacccatgaaatcaagaaacaagtggacggactaatccgggaaaccaaagccacagattgtcgcctgcataatgtcttcaatgacttccttatgctctctaatacccagttcatagagaatcgtgtatatgatgaagaagtggaggagccagtactcaaggctgaggcagaaaaaacagagcaggagaagacacgagagcagaaagaagtagatctcattcctaaagtccaggaggctgtgaactatggcttacaagtattggacagtgcctttgagcaacttgatatcaaagcaggaaactcagactccgaggaagatgatgctaatgggcgggtggaactgatccttgaaccaaagagtttcactcttgttgcccaagctggagtggcgcaatctcggctcactgcagcttctgtctcctgggttcaagcgattctcctgcctcagccttccaagtagctgggattacaggatctatacattgatcgtcctttaccatatctcattgggtcaaagctgttcatggaacaagaagatgtaggtcttggagagctgtccagtgaagaaggctctgtaggcagtgatcgtggcagtattgtggacactgaggaagagaaagaagaggaggagtcagatgaagattttgcccatcacagtgacaatgaacaaaaccagaaaagaagcagacctacatcgtttgcagatgagctggctgcccgcatcaagggggatgccatgggtcgagtggacgaggagccgacaaccttaccctcaggagaagcaaaacctcggaagacactcaaagagaagaaggaaaggagaactccttcagacgatgaagaggataacttattcgcaccccccaagctgaccgacgaggacttctcgccatttggctctggaggtggcctgttcagtggcggcaaggggctatttgatgatgaggacgaggagagtgacctcttcacggaagcctcccaggatcggcaagctggagcctctgttaaggaggagtcttcatcatccaaacctggaaagaaaatcccagcaggagctgtttctgtatttttaggagacacggatgtgtttggtgctgcctccgttccatcactgaaggagccacagaagcctgagcagcccactccaaggaaaagcccctatggtccccctcccactggcctctttgatgatgatgatggtgatgatgatgacgactttttctcggcaccccacagcaaaccttctaaaacacgcaaagtccaatccactgccgatatctttggtgacgaagaaggagatctgttcaaagaaaaagccgtagcatcgccagaagccactgtgagtcagacagatgaaaataaagcaagagcagaaaaaaaggatttgttttcttctcaaagtgcgagtaacttaaaaggtgcatctctgctgcctggcaagctccccacgtcggtttccctgtttgatgatgaagatgaagaggataatctttttgggggtacagctgctaagaagcagacattgtctctacaagctcagagagaagagaaagcaaaagcctccgagctctccaaaaagaaagcatctgccctgttgttcagcagtgatgaggaggaccagtggaatattcctgcttcacagacccacttagcatctgacagcaggtctaaaggagaacccagggattctgggaccctccagagccaggaggccaaggctgtgaaaaagaccagtctctttgaggaagacaaagaagatgatctttttgccattgccaaggacagccaaaagaagacccagagagtgtcactcctctttgaagacgatgttgatagcggaggctctctgtttggctctcctcccacatctgttcctcctgcaacaaagaaaaaagagactgtctctgaggcaccacctttgctgttcagcgatgaagaagagaaggaggcacaacttggagtgaagtctgtggataagaaggttgagagtgccaaggagtcattaaaatttgggagaactgatgtggctgagtcagaaaaggaaggacttttgactagatctgctcaggaaacagtcaagcattctgatttattttcttcatcatccccatgggacaaaggaaccaagcctagaaccaaaactgttcttagcttgtttgatgaggaagaggataaaatggaagatcaaaacattatccaggctccacagaaagaagtaggaaagggctgcgatcctgatgcccaccccaagagcacaggtgtcttccaggatgaagagctgcttttcagccacaagctccaaaaggacaatgacccagatgttgacctttttgctggcaccaaaaaaaccaagctgttagagccaagtgttgggagcctgtttggggatgatgaagatgatgatcttttcagctctgccaagtcccagcctttggtacaagagaaaaagagagtagtgaaaaaagaccactctgttaactctttcaaaaaccagaaacatcctgaatccattcaaggtagtaaagaaaaaggcatatggaagccggaaacacctcaggactcatcaggtctcgctccatttaaaaccaaagaaccatccactcggatcgggaagatacaagcaaatttagcgatcaacccagcggccttgctgcccacagcggcttcccagatctctgaagtaaagcctgttttgccagaattggcttttccttcatctgaacacagaaggagccacggtctggaaagtgtgcctgtccttcccgggagtggggaggccggtgtgagttttgatcttccagctcaggcagacaccttacacagtgcaaacaagagccgtgtcaagatgagagggaagcgtagaccgcagacccgtgcagctaggcggctggctgctcaggagtccagcgaggctgaggacatgagcgtccccagaggacccattgcacagtgggctgatggcgccatttccccaaatggccatcggccacagctcagagcagccagtggagaagacagcactgaggaggccctggcagctgccgctgcaccttgggaaggtggtcctgtgcctggagtggacacaagcccctttgcaaagtctctgggtcattccagaggggaggctgacctttttgattctggggacattttttccacgggcactggatctcagtccgtggagagaacaaaacccaaggcaaagatagcagagaatcctgccaacccaccagtgggtggtaaagcaaagagccccatgtttcctgctctaggcgaggccagcagtgatgatgatctctttcagtctgctaaaccaaaaccagcaaagaaaacaaatccctttcctctcctggaagatgaggatgacctctttacagatcagaaagtcaagaagaatgagacaaaatccagtagtcagcaggatgtcatattaacaacacaagatatttttgaggatgatatatttgctacggaagcaattaaaccctctcagaaaaccagagagaaggagaaaacattggaatctaatttatttgatgataacattgatatctttgctgacttaactgtaaaaccaaaagaaaagtccaaaaagaaagtggaagccaagtctatatttgatgatgatatggatgacatcttctccactggtatccaggctaagacaaccaaaccaaaaagccgatctgcacaggccgcacctgaaccaagatttgaacacaaggtgtccaacatctttgatgatcccctgaatgcctttggaggccagtagagcacacagggtatccacatgttaccctgcagctacattgttgagttagtgatgatattgtatatgctcatggtcttaactggattacaaaaagcaaatactagaacagctagctcatcttttacccaatgtacttagtatttttctgcactggtttaatcatgcttaatactacaaaacaaaaataaatatttcacagtggttggtttgttttgtttttaaaccacagtttgatttagttagccttgctggggccataatatgcttcagggtgtgtaaaagaagaaatctctttgtggctttcatgggcagggaatctcagagatagcaaatgccacctgaccagaagtctttgttatatggatgggaaccctaacttagggcttgggcaggggaaagagaaagaagatgagagattatacttcatgagtcttagcaatatgggagcaggttttcactgaattctgagggtgcctctgcatgtcctccaaggcaaagtttggcaaactgtggcccccccactgtcatattttgttaataaaattttattggaacacaatcaca

SEQ ID NO: 6651 - protein, 1082 aa, Homo sapiens
MEQEDVGLGELSSEEGSVGSDRGSIVDTEEEKEEEESDEDFAHHSDNEQNQKRSRPTSFADELAARIKGDAMGRVDEEPTTLPSGEAKPRKTLKEKKERRTPSDDEEDNLFAPPKLTDEDFSPFGSGGGLFSGGKGLFDDEDEESDLFTEASQDRQAGASVKEESSSSKPGKKIPAGAVSVFLGDTDVFGAASVPSLKEPQKPEQPTPRKSPYGPPPTGLFDDDDGDDDDDFFSAPHSKPSKTRKVQSTADIFGDEEGDLFKEKAVASPEATVSQTDENKARAEKKDLFSSQSASNLKGASLLPGKLPTSVSLFDDEDEEDNLFGGTAAKKQTLSLQAQREEKAKASELSKKKASALLFSSDEEDQWNIPASQTHLASDSRSKGEPRDSGTLQSQEAKAVKKTSLFEEDKEDDLFAIAKDSQKKTQRVSLLFEDDVDSGGSLFGSPPTSVPPATKKKETVSEAPPLLFSDEEEKEAQLGVKSVDKKVESAKESLKFGRTDVAESEKEGLLTRSAQETVKHSDLFSSSSPWDKGTKPRTKTVLSLFDEEEDKMEDQNIIQAPQKEVGKGCDPDAHPKSTGVFQDEELLFSHKLQKDNDPDVDLFAGTKKTKLLEPSVGSLFGDDEDDDLFSSAKSQPLVQEKKRVVKKDHSVNSFKNQKHPESIQGSKEKGIWKPETPQDSSGLAPFKTKEPSTRIGKIQANLAINPAALLPTAASQISEVKPVLPELAFPSSEHRRSHGLESVPVLPGSGEAGVSFDLPAQADTLHSANKSRVKMRGKRRPQTRAARRLAAQESSEAEDMSVPRGPIAQWADGAISPNGHRPQLRAASGEDSTEEALAAAAAPWEGGPVPGVDTSPFAKSLGHSRGEADLFDSGDIFSTGTGSQSVERTKPKAKIAENPANPPVGGKAKSPMFPALGEASSDDDLFQSAKPKPAKKTNPFPLLEDEDDLFTDQKVKKNETKSSSQQDVILTTQDIFEDDIFATEAIKPSQKTREKEKTLESNLFDDNIDIFADLTVKPKEKSKKKVEAKSIFDDDMDDIFSTGIQAKTTKPKSRSAQAAPEPRFEHKVSNIFDDPLNAFGGQ

SEQ ID NO: 6652 - DNA, 4737 bp, Homo sapiens
acgccccgggcagcttggctggggctaggcttccggggctctgcggtcctcggcctgtgctggcagcctcggagcccaccgagccgggcggctgggatgatgaaccggacgacccccgaccaggagctggtgccggcgtcggagcccgtgtgggagcggccgtggtcggtggaggagatccgcaggagcagccagagctggtcgctggcggccgacgcgggcctactacagtttctacaggaattctcacagcaaactatctctaggacccatgaaatcaagaaacaagtggacggactaatccgggaaaccaaagccacagattgtcgcctgcataatgtcttcaatgacttccttatgctctctaatacccagttcatagagaatcgtgtatatgatgaagaagtggaggagccagtactcaaggctgaggcagaaaaaacagagcaggagaagacacgagagcagaaagaagtagatctcattcctaaagtccaggaggctgtgaactatggcttacaagtattggacagtgcctttgagcaacttgatatcaaagcaggaaactcagactccgaggaagatgatgctaatgggcgggtggaactgatccttgaaccaaagagtttcactcttgttgcccaagctggagtggcgcaatctcggctcactgcagcttctgtctcctgggttcaagcgattctcctgcctcagccttccaagtagctgggattacaggatctatacattgatcgtcctttaccatatctcattgggtcaaagctgttcatggaacaagaagatgtaggtcttggagagctgtccagtgaagaaggctctgtaggcagtgatcgtggcagtattgtggacactgaggaagagaaagaagaggaggagtcagatgaagattttgcccatcacagtgacaatgaacaaaaccagcacaccacacaaatgagtgatgaggaagaggatgatgatggctgtgacctttttgctgactctgagaaggaggaggaagatattgaggacattgaagaaaatactagacctaaaagaagcagacctacatcgtttgcagatgagctggctgcccgcatcaagggggatgccatgggtcgagtggacgaggagccgacaaccttaccctcaggagaagcaaaacctcggaagacactcaaagagaagaaggaaaggagaactccttcagacgatgaagaggataacttattcgcaccccccaagctgaccgacgaggacttctcgccatttggctctggaggtggcctgttcagtggcggcaaggggctatttgatgatgaggacgaggagagtgacctcttcacggaagcctcccaggatcggcaagctggagcctctgttaaggaggagtcttcatcatccaaacctggaaagaaaatcccagcaggagctgtttctgtatttttaggagacacggatgtgtttggtgctgcctccgttccatcactgaaggagccacagaagcctgagcagcccactccaaggaaaagcccctatggtccccctcccactggcctctttgatgatgatgatggtgatgatgatgacgactttttctcggcaccccacagcaaaccttctaaaacacgcaaagtccaatccactgccgatatctttggtgacgaagaaggagatctgttcaaagaaaaagccgtagcatcgccagaagccactgtgagtcagacagatgaaaataaagcaagagcagaaaaaaaggttaccttatcttacagcaaaaatctcaagccctcatcagaaacaaagactcaaaaaggcttattttcagatgaggaggactctgaggatttgttttcttctcaaagtgcgagtaacttaaaaggtgcatctctgctgcctggcaagctccccacgtcggtttccctgtttgatgatgaagatgaagaggataatctttttgggggtacagctgctaagaagcagacattgtctctacaagctcagagagaagagaaagcaaaagcctccgagctctccaaaaagaaagcatctgccctgttgttcagcagtgatgaggaggaccagtggaatattcctgcttcacagacccacttagcatctgacagcaggtctaaaggagaacccagggattctgggaccctccagagccaggaggccaaggctgtgaaaaagaccagtctctttgaggaagacaaagaagatgatctttttgccattgccaaggacagccaaaagaagacccagagagtgtcactcctctttgaagacgatgttgatagcggaggctctctgtttggctctcctcccacatctgttcctcctgcaacaaagaaaaaagagactgtctctgaggcaccacctttgctgttcagcgatgaagaagagaaggaggcacaacttggagtgaagtctgtggataagaaggttgagagtgccaaggagtcattaaaatttgggagaactgatgtggctgagtcagaaaaggaaggacttttgactagatctgctcaggaaacagtcaagcattctgatttattttcttcatcatccccatgggacaaaggaaccaagcctagaaccaaaactgttcttagcttgtttgatgaggaagaggataaaatggaagatcaaaacattatccaggctccacagaaagaagtaggaaagggctgcgatcctgatgcccaccccaagagcacaggtgtcttccaggatgaagagctgcttttcagccacaagctccaaaaggacaatgacccagatgttgacctttttgctggcaccaaaaaaaccaagctgttagagccaagtgttgggagcctgtttggggatgatgaagatgatgatcttttcagctctgccaagtcccagcctttggtacaagagaaaaagagagtagtgaaaaaagaccactctgttaactctttcaaaaaccagaaacatcctgaatccattcaaggtagtaaagaaaaaggcatatggaagccggaaacacctcaggcaaatttagcgatcaacccagcggccttgctgcccacagcggcttcccagatctctgaagtaaagcctgttttgccagaattggcttttccttcatctgaacacagaaggagccacggtctggaaagtgtgcctgtccttcccgggagtggggaggccggtgtgagttttgatcttccagctcaggcagacaccttacacagtgcaaacaagagccgtgtcaagatgagagggaagcgtagaccgcagacccgtgcagctaggcggctggctgctcaggagtccagcgaggctgaggacatgagcgtccccagaggacccattgcacagtgggctgatggcgccatttccccaaatggccatcggccacagctcagagcagccagtggagaagacagcactgaggaggccctggcagctgccgctgcaccttgggaaggtggtcctgtgcctggagtggacacaagcccctttgcaaagtctctgggtcattccagaggggaggctgacctttttgattctggggacattttttccacgggcactggatctcagtccgtggagagaacaaaacccaaggcaaagatagcagagaatcctgccaacccaccagtgggtggtaaagcaaagagccccatgtttcctgctctaggcgaggccagcagtgatgatgatctctttcagtctgctaaaccaaaaccagcaaagaaaacaaatccctttcctctcctggaagatgaggatgacctctttacagatcagaaagtcaagaagaatgagacaaaatccagtagtcagcaggatgtcatattaacaacacaagatatttttgaggatgatatatttgctacggaagcaattaaaccctctcagaaaaccagagagaaggagaaaacattggaatctaatttatttgatgataacattgatatctttgctgacttaactgtaaaaccaaaagaaaagtccaaaaagaaagtggaagccaagtctatatttgatgatgatatggatgacatcttctccactggtatccaggctaagacaaccaaaccaaaaagccgatctgcacaggccgcacctgaaccaagatttgaacacaaggtgtccaacatctttgatgatcccctgaatgcctttggaggccagtagagcacacagggtatccacatgttaccctgcagctacattgttgagttagtgatgatattgtatatgctcatggtcttaactggattacaaaaagcaaatactagaacagctagctcatcttttacccaatgtacttagtatttttctgcactggtttaatcatgcttaatactacaaaacaaaaataaatatttcacagtggttggtttgttttgtttttaaaccacagtttgatttagttagccttgctggggccataatatgcttcagggtgtgtaaaagaagaaatctctttgtggctttcatgggcagggaatctcagagatagcaaatgccacctgaccagaagtctttgttatatggatgggaaccctaacttagggcttgggcaggggaaagagaaagaagatgagagattatacttcatgagtcttagcaatatgggagcaggttttcactgaattctgagggtgcctctgcatgtcctccaaggcaaagtttggcaaactgtggcccccccactgtcatattttgttaataaaattttattggaacacaatcaca

SEQ ID NO: 6653 - protein, 1127 aa, Homo sapiens
MEQEDVGLGELSSEEGSVGSDRGSIVDTEEEKEEEESDEDFAHHSDNEQNQHTTQMSDEEEDDDGCDLFADSEKEEEDIEDIEENTRPKRSRPTSFADELAARIKGDAMGRVDEEPTTLPSGEAKPRKTLKEKKERRTPSDDEEDNLFAPPKLTDEDFSPFGSGGGLFSGGKGLFDDEDEESDLFTEASQDRQAGASVKEESSSSKPGKKIPAGAVSVFLGDTDVFGAASVPSLKEPQKPEQPTPRKSPYGPPPTGLFDDDDGDDDDDFFSAPHSKPSKTRKVQSTADIFGDEEGDLFKEKAVASPEATVSQTDENKARAEKKVTLSYSKNLKPSSETKTQKGLFSDEEDSEDLFSSQSASNLKGASLLPGKLPTSVSLFDDEDEEDNLFGGTAAKKQTLSLQAQREEKAKASELSKKKASALLFSSDEEDQWNIPASQTHLASDSRSKGEPRDSGTLQSQEAKAVKKTSLFEEDKEDDLFAIAKDSQKKTQRVSLLFEDDVDSGGSLFGSPPTSVPPATKKKETVSEAPPLLFSDEEEKEAQLGVKSVDKKVESAKESLKFGRTDVAESEKEGLLTRSAQETVKHSDLFSSSSPWDKGTKPRTKTVLSLFDEEEDKMEDQNIIQAPQKEVGKGCDPDAHPKSTGVFQDEELLFSHKLQKDNDPDVDLFAGTKKTKLLEPSVGSLFGDDEDDDLFSSAKSQPLVQEKKRVVKKDHSVNSFKNQKHPESIQGSKEKGIWKPETPQANLAINPAALLPTAASQISEVKPVLPELAFPSSEHRRSHGLESVPVLPGSGEAGVSFDLPAQADTLHSANKSRVKMRGKRRPQTRAARRLAAQESSEAEDMSVPRGPIAQWADGAISPNGHRPQLRAASGEDSTEEALAAAAAPWEGGPVPGVDTSPFAKSLGHSRGEADLFDSGDIFSTGTGSQSVERTKPKAKIAENPANPPVGGKAKSPMFPALGEASSDDDLFQSAKPKPAKKTNPFPLLEDEDDLFTDQKVKKNETKSSSQQDVILTTQDIFEDDIFATEAIKPSQKTREKEKTLESNLFDDNIDIFADLTVKPKEKSKKKVEAKSIFDDDMDDIFSTGIQAKTTKPKSRSAQAAPEPRFEHKVSNIFDDPLNAFGGQ

SEQ ID NO: 6654 - DNA, 4488 bp, Homo sapiens
acgccccgggcagcttggctggggctaggcttccggggctctgcggtcctcggcctgtgctggcagcctcggagcccaccgagccgggcggctgggatgatgaaccggacgacccccgaccaggagctggtgccggcgtcggagcccgtgtgggagcggccgtggtcggtggaggagatccgcaggagcagccagagctggtcgctggcggccgacgcgggcctactacagtttctacaggaattctcacagcaaactatctctaggacccatgaaatcaagaaacaagtggacggactaatccgggaaaccaaagccacagattgtcgcctgcataatgtcttcaatgacttccttatgctctctaatacccagttcatagagaatcgtgtatatgatgaagaagtggaggagccagtactcaaggctgaggcagaaaaaacagagcaggagaagacacgagagcagaaagaagtagatctcattcctaaagtccaggaggctgtgaactatggcttacaagtattggacagtgcctttgagcaacttgatatcaaagcaggaaactcagactccgaggaagatgatgctaatgggcgggtggaactgatccttgaaccaaaggatctatacattgatcgtcctttaccatatctcattgggtcaaagctgttcatggaacaagaagatgtaggtcttggagagctgtccagtgaagaaggctctgtaggcagtgatcgtggcagtattgtggacactgaggaagagaaagaagaggaggagtcagatgaagattttgcccatcacagtgacaatgaacaaaaccagaaaagaagcagacctacatcgtttgcagatgagctggctgcccgcatcaagggggatgccatgggtcgagtggacgaggagccgacaaccttaccctcaggagaagcaaaacctcggaagacactcaaagagaagaaggaaaggagaactccttcagacgatgaagaggataacttattcgcaccccccaagctgaccgacgaggacttctcgccatttggctctggaggtggcctgttcagtggcggcaaggggctatttgatgatgaggacgaggagagtgacctcttcacggaagcctcccaggatcggcaagctggagcctctgttaaggaggagtcttcatcatccaaacctggaaagaaaatcccagcaggagctgtttctgtatttttaggagacacggatgtgtttggtgctgcctccgttccatcactgaaggagccacagaagcctgagcagcccactccaaggaaaagcccctatggtccccctcccactggcctctttgatgatgatgatggtgatgatgatgacgactttttctcggcaccccacagcaaaccttctaaaacacgcaaagtccaatccactgccgatatctttggtgacgaagaaggagatctgttcaaagaaaaagccgtagcatcgccagaagccactgtgagtcagacagatgaaaataaagcaagagcagaaaaaaaggatttgttttcttctcaaagtgcgagtaacttaaaaggtgcatctctgctgcctggcaagctccccacgtcggtttccctgtttgatgatgaagatgaagaggataatctttttgggggtacagctgctaagaagcagacattgtctctacaagctcagagagaagagaaagcaaaagcctccgagctctccaaaaagaaagcatctgccctgttgttcagcagtgatgaggaggaccagtggaatattcctgcttcacagacccacttagcatctgacagcaggtctaaaggagaacccagggattctgggaccctccagagccaggaggccaaggctgtgaaaaagaccagtctctttgaggaagacaaagaagatgatctttttgccattgccaaggacagccaaaagaagacccagagagtgtcactcctctttgaagacgatgttgatagcggaggctctctgtttggctctcctcccacatctgttcctcctgcaacaaagaaaaaagagactgtctctgaggcaccacctttgctgttcagcgatgaagaagagaaggaggcacaacttggagtgaagtctgtggataagaaggttgagagtgccaaggagtcattaaaatttgggagaactgatgtggctgagtcagaaaaggaaggacttttgactagatctgctcaggaaacagtcaagcattctgatttattttcttcatcatccccatgggacaaaggaaccaagcctagaaccaaaactgttcttagcttgtttgatgaggaagaggataaaatggaagatcaaaacattatccaggctccacagaaagaagtaggaaagggctgcgatcctgatgcccaccccaagagcacaggtgtcttccaggatgaagagctgcttttcagccacaagctccaaaaggacaatgacccagatgttgacctttttgctggcaccaaaaaaaccaagctgttagagccaagtgttgggagcctgtttggggatgatgaagatgatgatcttttcagctctgccaagtcccagcctttggtacaagagaaaaagagagtagtgaaaaaagaccactctgttaactctttcaaaaaccagaaacatcctgaatccattcaaggtagtaaagaaaaaggcatatggaagccggaaacacctcaggactcatcaggtctcgctccatttaaaaccaaagaaccatccactcggatcgggaagatacaagcaaatttagcgatcaacccagcggccttgctgcccacagcggcttcccagatctctgaagtaaagcctgttttgccagaattggcttttccttcatctgaacacagaaggagccacggtctggaaagtgtgcctgtccttcccgggagtggggaggccggtgtgagttttgatcttccagctcaggcagacaccttacacagtgcaaacaagagccgtgtcaagatgagagggaagcgtagaccgcagacccgtgcagctaggcggctggctgctcaggagtccagcgaggctgaggacatgagcgtccccagaggacccattgcacagtgggctgatggcgccatttccccaaatggccatcggccacagctcagagcagccagtggagaagacagcactgaggaggccctggcagctgccgctgcaccttgggaaggtggtcctgtgcctggagtggacacaagcccctttgcaaagtctctgggtcattccagaggggaggctgacctttttgattctggggacattttttccacgggcactggatctcagtccgtggagagaacaaaacccaaggcaaagatagcagagaatcctgccaacccaccagtgggtggtaaagcaaagagccccatgtttcctgctctaggcgaggccagcagtgatgatgatctctttcagtctgctaaaccaaaaccagcaaagaaaacaaatccctttcctctcctggaagatgaggatgacctctttacagatcagaaagtcaagaagaatgagacaaaatccagtagtcagcaggatgtcatattaacaacacaagatatttttgaggatgatatatttgctacggaagcaattaaaccctctcagaaaaccagagagaaggagaaaacattggaatctaatttatttgatgataacattgatatctttgctgacttaactgtaaaaccaaaagaaaagtccaaaaagaaagtggaagccaagtctatatttgatgatgatatggatgacatcttctccactggtatccaggctaagacaaccaaaccaaaaagccgatctgcacaggccgcacctgaaccaagatttgaacacaaggtgtccaacatctttgatgatcccctgaatgcctttggaggccagtagagcacacagggtatccacatgttaccctgcagctacattgttgagttagtgatgatattgtatatgctcatggtcttaactggattacaaaaagcaaatactagaacagctagctcatcttttacccaatgtacttagtatttttctgcactggtttaatcatgcttaatactacaaaacaaaaataaatatttcacagtggttggtttgttttgtttttaaaccacagtttgatttagttagccttgctggggccataatatgcttcagggtgtgtaaaagaagaaatctctttgtggctttcatgggcagggaatctcagagatagcaaatgccacctgaccagaagtctttgttatatggatgggaaccctaacttagggcttgggcaggggaaagagaaagaagatgagagattatacttcatgagtcttagcaatatgggagcaggttttcactgaattctgagggtgcctctgcatgtcctccaaggcaaagtttggcaaactgtggcccccccactgtcatattttgttaataaaattttattggaacacaatcaca

SEQ ID NO: 6655 - protein, 1275 aa, Homo sapiens
MMNRTTPDQELVPASEPVWERPWSVEEIRRSSQSWSLAADAGLLQFLQEFSQQTISRTHEIKKQVDGLIRETKATDCRLHNVFNDFLMLSNTQFIENRVYDEEVEEPVLKAEAEKTEQEKTREQKEVDLIPKVQEAVNYGLQVLDSAFEQLDIKAGNSDSEEDDANGRVELILEPKDLYIDRPLPYLIGSKLFMEQEDVGLGELSSEEGSVGSDRGSIVDTEEEKEEEESDEDFAHHSDNEQNQKRSRPTSFADELAARIKGDAMGRVDEEPTTLPSGEAKPRKTLKEKKERRTPSDDEEDNLFAPPKLTDEDFSPFGSGGGLFSGGKGLFDDEDEESDLFTEASQDRQAGASVKEESSSSKPGKKIPAGAVSVFLGDTDVFGAASVPSLKEPQKPEQPTPRKSPYGPPPTGLFDDDDGDDDDDFFSAPHSKPSKTRKVQSTADIFGDEEGDLFKEKAVASPEATVSQTDENKARAEKKDLFSSQSASNLKGASLLPGKLPTSVSLFDDEDEEDNLFGGTAAKKQTLSLQAQREEKAKASELSKKKASALLFSSDEEDQWNIPASQTHLASDSRSKGEPRDSGTLQSQEAKAVKKTSLFEEDKEDDLFAIAKDSQKKTQRVSLLFEDDVDSGGSLFGSPPTSVPPATKKKETVSEAPPLLFSDEEEKEAQLGVKSVDKKVESAKESLKFGRTDVAESEKEGLLTRSAQETVKHSDLFSSSSPWDKGTKPRTKTVLSLFDEEEDKMEDQNIIQAPQKEVGKGCDPDAHPKSTGVFQDEELLFSHKLQKDNDPDVDLFAGTKKTKLLEPSVGSLFGDDEDDDLFSSAKSQPLVQEKKRVVKKDHSVNSFKNQKHPESIQGSKEKGIWKPETPQDSSGLAPFKTKEPSTRIGKIQANLAINPAALLPTAASQISEVKPVLPELAFPSSEHRRSHGLESVPVLPGSGEAGVSFDLPAQADTLHSANKSRVKMRGKRRPQTRAARRLAAQESSEAEDMSVPRGPIAQWADGAISPNGHRPQLRAASGEDSTEEALAAAAAPWEGGPVPGVDTSPFAKSLGHSRGEADLFDSGDIFSTGTGSQSVERTKPKAKIAENPANPPVGGKAKSPMFPALGEASSDDDLFQSAKPKPAKKTNPFPLLEDEDDLFTDQKVKKNETKSSSQQDVILTTQDIFEDDIFATEAIKPSQKTREKEKTLESNLFDDNIDIFADLTVKPKEKSKKKVEAKSIFDDDMDDIFSTGIQAKTTKPKSRSAQAAPEPRFEHKVSNIFDDPLNAFGGQ

SEQ ID NO: 6656 - DNA, 4363 bp, Homo sapiens
acgccccgggcagcttggctggggctaggcttccggggctctgcggtcctcggcctgtgctggcagcctcggagcccaccgagccgggcggctgggatgatgaaccggacgacccccgaccaggagctggtgccggcgtcggagcccgtgtgggagcggccgtggtcggtggaggagatccgcaggagcagccagagctggtcgctggcggccgacgcgggcctactacagtttctacaggaattctcacagcaaactatctctaggacccatgaaatcaagaaacaagtggacggactaatccgggaaaccaaagccacagattgtcgcctgcataatgtcttcaatgacttccttatgctctctaatacccagttcatagagaatcgtgtatatgatgaagaagtggaggagccagtactcaaggctgaggcagaaaaaacagagcaggagaagacacgagagcagaaagaagtagatctcattcctaaagtccaggaggctgtgaactatggcttacaagtattggacagtgcctttgagcaacttgatatcaaagcaggaaactcagactccgaggaagatgatgctaatgggcgggtggaactgatccttgaaccaaaggatctatacattgatcgtcctttaccatatctcattgggtcaaagctgttcatggaacaagaagatgtaggtcttggagagctgtccagtgaagaaggctctgtaggcagtgatcgtggcagtattgtggacactgaggaagagaaagaagaggaggagtcagatgaagattttgcccatcacagtgacaatgaacaaaaccagcacaccacacaaatgagtgatgaggaagaggatgatgatggctgtgacctttttgctgactctgagaaggaggaggaagatattgaggacattgaagaaaatactagacctaaaagaagcagacctacatcgtttgcagatgagctggctgcccgcatcaagggggatgccatgggtcgagtggacgaggagccgacaaccttaccctcaggagaagcaaaacctcggaagacactcaaagagaagaaggaaaggagaactccttcagacgatgaagaggataacttattcgcaccccccaagctgaccgacgaggacttctcgccatttggctctggaggtggcctgttcagtggcggcaaggggctatttgatgatgaggacgaggagagtgacctcttcacggaagcctcccaggatcggcaagctggagcctctgttaaggaggagtcttcatcatccaaacctggaaagaaaatcccagcaggagctgtttctgtatttttaggagacacggatgtgtttggtgctgcctccgttccatcactgaaggagccacagaagcctgagcagcccactccaaggaaaagcccctatggtccccctcccactggcctctttgatgatgatgatggtgatgatgatgacgactttttctcggcaccccacagcaaaccttctaaaacacgcaaagtccaatccactgccgatatctttggtgacgaagaaggagatctgttcaaagaaaaagccgtagcatcgccagaagccactgtgagtcagacagatgaaaataaagcaagagcagaaaaaaaggttaccttatcttacagcaaaaatctcaagccctcatcagaaacaaagactcaaaaaggcttattttcagatgaggaggactctgaggatttgttttcttctcaaagtgcgagtaacttaaaaggtgcatctctgctgcctggcaagctccccacgtcggtttccctgtttgatgatgaagatgaagaggataatctttttgggggtacagctgctaagaagcagacattgtctctacaagctcagagagaagagaaagcaaaagcctccgagctctccaaaaagaaagcatctgccctgttgttcagcagtgatgaggagccaaaagaagacccagagagtgtcactcctctttgaagacgatgttgatagcggaggctctctgtttggctctcctcccacatctgttcctcctgcaacaaaggaaggacttttgactagatctgctcaggaaacagtcaagcattctgatttattttcttcatcatccccatgggacaaaggaaccaagcctagaaccaaaactgttcttagcttgtttgatgaggaagaggataaaatggaagatcaaaacattatccaggctccacagaaagaagtaggaaagggctgcgatcctgatgcccaccccaagagcacaggtgtcttccaggatgaagagctgcttttcagccacaagctccaaaaggacaatgacccagatgttgacctttttgctggcaccaaaaaaaccaagctgttagagccaagtgttgggagcctgtttggggatgatgaagatgatgatcttttcagctctgccaagtcccagcctttggtacaagagaaaaagagagtagtgaaaaaagaccactctgttaactctttcaaaaaccagaaacatcctgaatccattcaaggtagtaaagaaaaaggcatatggaagccggaaacacctcaggactcatcaggtctcgctccatttaaaaccaaagaaccatccactcggatcgggaagatacaagcaaatttagcgatcaacccagcggccttgctgcccacagcggcttcccagatctctgaagtaaagcctgttttgccagaattggcttttccttcatctgaacacagaaggagccacggtctggaaagtgtgcctgtccttcccgggagtggggaggccggtgtgagttttgatcttccagctcaggcagacaccttacacagtgcaaacaagagccgtgtcaagatgagagggaagcgtagaccgcagacccgtgcagctaggcggctggctgctcaggagtccagcgaggctgaggacatgagcgtccccagaggacccattgcacagtgggctgatggcgccatttccccaaatggccatcggccacagctcagagcagccagtggagaagacagcactgaggaggccctggcagctgccgctgcaccttgggaaggtggtcctgtgcctggagtggacacaagcccctttgcaaagtctctgggtcattccagaggggaggctgacctttttgattctggggacattttttccacgggcactggatctcagtccgtggagagaacaaaacccaaggcaaagatagcagagaatcctgccaacccaccagtgggtggtaaagcaaagagccccatgtttcctgctctaggcgaggccagcagtgatgatgatctctttcagtctgctaaaccaaaaccagcaaagaaaacaaatccctttcctctcctggaagatgaggatgacctctttacagatcagaaagtcaagaagaatgagacaaaatccagtagtcagcaggatgtcatattaacaacacaagatatttttgaggatgatatatttgctacggaagcaattaaaccctctcagaaaaccagagagaaggagaaaacattggaatctaatttatttgatgataacattgatatctttgctgacttaactgtaaaaccaaaagaaaagtccaaaaagaaagtggaagccaagtctatatttgatgatgatatggatgacatcttctccactggtatccaggctaagacaaccaaaccaaaaagccgatctgcacaggccgcacctgaaccaagatttgaacacaaggtgtccaacatctttgatgatcccctgaatgcctttggaggccagtagagcacacagggtatccacatgttaccctgcagctacattgttgagttagtgatgatattgtatatgctcatggtcttaactggattacaaaaagcaaatactagaacagctagctcatcttttacccaatgtacttagtatttttctgcactggtttaatcatgcttaatactacaaaacaaaaataaatatttcacagtggttggtttgttttgtttttaaaccacagtttgatttagttagccttgctggggccataatatgcttcagggtgtgtaaaagaagaaatctctttgtggctttcatgggcagggaatctcagagatagcaaatgccacctgaccagaagtctttgttatatggatgggaaccctaacttagggcttgggcaggggaaagagaaagaagatgagagattatacttcatgagtcttagcaatatgggagcaggttttcactgaattctgagggtgcctctgcatgtcctccaaggcaaagtttggcaaactgtggcccccccactgtcatattttgttaataaaattttattggaacacaatcaca

SEQ ID NO: 6657 - protein, 660 aa, Homo sapiens; identical to SEQ ID NO: 6621

SEQ ID NO: 6658 - DNA, 4713 bp, Homo sapiens
acgccccgggcagcttggctggggctaggcttccggggctctgcggtcctcggcctgtgctggcagcctcggagcccaccgagccgggcggctgggatgatgaaccggacgacccccgaccaggagctggtgccggcgtcggagcccgtgtgggagcggccgtggtcggtggaggagatccgcaggagcagccagagctggtcgctggcggccgacgcgggcctactacagtttctacaggaattctcacagcaaactatctctaggacccatgaaatcaagaaacaagtggacggactaatccgggaaaccaaagccacagattgtcgcctgcataatgtcttcaatgacttccttatgctctctaatacccagttcatagagaatcgtgtatatgatgaagaagtggaggagccagtactcaaggctgaggcagaaaaaacagagcaggagaagacacgagagcagaaagaagtagatctcattcctaaagtccaggaggctgtgaactatggcttacaagtattggacagtgcctttgagcaacttgatatcaaagcaggaaactcagactccgaggaagatgatgctaatgggcgggtggaactgatccttgaaccaaagagtttcactcttgttgcccaagctggagtggcgcaatctcggctcactgcagcttctgtctcctgggttcaagcgattctcctgcctcagccttccaagtagctgggattacaggatctatacattgatcgtcctttaccatatctcattgggtcaaagctgttcatggaacaagaagatgtaggtcttggagagctgtccagtgaagaaggctctgtaggcagtgatcgtggcagtattgtggacactgaggaagagaaagaagaggaggagtcagatgaagattttgcccatcacagtgacaatgaacaaaaccagcacaccacacaaatgagtgatgaggaagaggatgatgatggctgtgacctttttgctgactctgagaaggaggaggaagatattgaggacattgaagaaaatactagacctaaaagaagcagacctacatcgtttgcagatgagctggctgcccgcatcaagggggatgccatgggtcgagtggacgaggagccgacaaccttaccctcaggagaagcaaaacctcggaagacactcaaagagaagaaggaaaggagaactccttcagacgatgaagaggataacttattcgcaccccccaagctgaccgacgaggacttctcgccatttggctctggaggtggcctgttcagtggcggcaaggggctatttgatgatgaggacgaggagagtgacctcttcacggaagcctcccaggatcggcaagctggagcctctgttaaggaggagtcttcatcatccaaacctggaaagaaaatcccagcaggagctgtttctgtatttttaggagacacggatgtgtttggtgctgcctccgttccatcactgaaggagccacagaagcctgagcagcccactccaaggaaaagcccctatggtccccctcccactggcctctttgatgatgatgatggtgatgatgatgacgactttttctcggcaccccacagcaaaccttctaaaacacgcaaagtccaatccactgccgatatctttggtgacgaagaaggagatctgttcaaagaaaaagccgtagcatcgccagaagccactgtgagtcagacagatgaaaataaagcaagagcagaaaaaaaggatttgttttcttctcaaagtgcgagtaacttaaaaggtgcatctctgctgcctggcaagctccccacgtcggtttccctgtttgatgatgaagatgaagaggataatctttttgggggtacagctgctaagaagcagacattgtctctacaagctcagagagaagagaaagcaaaagcctccgagctctccaaaaagaaagcatctgccctgttgttcagcagtgatgaggaggaccagtggaatattcctgcttcacagacccacttagcatctgacagcaggtctaaaggagaacccagggattctgggaccctccagagccaggaggccaaggctgtgaaaaagaccagtctctttgaggaagacaaagaagatgatctttttgccattgccaaggacagccaaaagaagacccagagagtgtcactcctctttgaagacgatgttgatagcggaggctctctgtttggctctcctcccacatctgttcctcctgcaacaaagaaaaaagagactgtctctgaggcaccacctttgctgttcagcgatgaagaagagaaggaggcacaacttggagtgaagtctgtggataagaaggttgagagtgccaaggagtcattaaaatttgggagaactgatgtggctgagtcagaaaaggaaggacttttgactagatctgctcaggaaacagtcaagcattctgatttattttcttcatcatccccatgggacaaaggaaccaagcctagaaccaaaactgttcttagcttgtttgatgaggaagaggataaaatggaagatcaaaacattatccaggctccacagaaagaagtaggaaagggctgcgatcctgatgcccaccccaagagcacaggtgtcttccaggatgaagagctgcttttcagccacaagctccaaaaggacaatgacccagatgttgacctttttgctggcaccaaaaaaaccaagctgttagagccaagtgttgggagcctgtttggggatgatgaagatgatgatcttttcagctctgccaagtcccagcctttggtacaagagaaaaagagagtagtgaaaaaagaccactctgttaactctttcaaaaaccagaaacatcctgaatccattcaaggtagtaaagaaaaaggcatatggaagccggaaacacctcaggactcatcaggtctcgctccatttaaaaccaaagaaccatccactcggatcgggaagatacaagcaaatttagcgatcaacccagcggccttgctgcccacagcggcttcccagatctctgaagtaaagcctgttttgccagaattggcttttccttcatctgaacacagaaggagccacggtctggaaagtgtgcctgtccttcccgggagtggggaggccggtgtgagttttgatcttccagctcaggcagacaccttacacagtgcaaacaagagccgtgtcaagatgagagggaagcgtagaccgcagacccgtgcagctaggcggctggctgctcaggagtccagcgaggctgaggacatgagcgtccccagaggacccattgcacagtgggctgatggcgccatttccccaaatggccatcggccacagctcagagcagccagtggagaagacagcactgaggaggccctggcagctgccgctgcaccttgggaaggtggtcctgtgcctggagtggacacaagcccctttgcaaagtctctgggtcattccagaggggaggctgacctttttgattctggggacattttttccacgggcactggatctcagtccgtggagagaacaaaacccaaggcaaagatagcagagaatcctgccaacccaccagtgggtggtaaagcaaagagccccatgtttcctgctctaggcgaggccagcagtgatgatgatctctttcagtctgctaaaccaaaaccagcaaagaaaacaaatccctttcctctcctggaagatgaggatgacctctttacagatcagaaagtcaagaagaatgagacaaaatccagtagtcagcaggatgtcatattaacaacacaagatatttttgaggatgatatatttgctacggaagcaattaaaccctctcagaaaaccagagagaaggagaaaacattggaatctaatttatttgatgataacattgatatctttgctgacttaactgtaaaaccaaaagaaaagtccaaaaagaaagtggaagccaagtctatatttgatgatgatatggatgacatcttctccactggtatccaggctaagacaaccaaaccaaaaagccgatctgcacaggccgcacctgaaccaagatttgaacacaaggtgtccaacatctttgatgatcccctgaatgcctttggaggccagtagagcacacagggtatccacatgttaccctgcagctacattgttgagttagtgatgatattgtatatgctcatggtcttaactggattacaaaaagcaaatactagaacagctagctcatcttttacccaatgtacttagtatttttctgcactggtttaatcatgcttaatactacaaaacaaaaataaatatttcacagtggttggtttgttttgtttttaaaccacagtttgatttagttagccttgctggggccataatatgcttcagggtgtgtaaaagaagaaatctctttgtggctttcatgggcagggaatctcagagatagcaaatgccacctgaccagaagtctttgttatatggatgggaaccctaacttagggcttgggcaggggaaagagaaagaagatgagagattatacttcatgagtcttagcaatatgggagcaggttttcactgaattctgagggtgcctctgcatgtcctccaaggcaaagtttggcaaactgtggcccccccactgtcatattttgttaataaaattttattggaacacaatcaca

SEQ ID NO: 6659 - protein, 1119 aa, Homo sapiens
MEQEDVGLGELSSEEGSVGSDRGSIVDTEEEKEEEESDEDFAHHSDNEQNQHTTQMSDEEEDDDGCDLFADSEKEEEDIEDIEENTRPKRSRPTSFADELAARIKGDAMGRVDEEPTTLPSGEAKPRKTLKEKKERRTPSDDEEDNLFAPPKLTDEDFSPFGSGGGLFSGGKGLFDDEDEESDLFTEASQDRQAGASVKEESSSSKPGKKIPAGAVSVFLGDTDVFGAASVPSLKEPQKPEQPTPRKSPYGPPPTGLFDDDDGDDDDDFFSAPHSKPSKTRKVQSTADIFGDEEGDLFKEKAVASPEATVSQTDENKARAEKKDLFSSQSASNLKGASLLPGKLPTSVSLFDDEDEEDNLFGGTAAKKQTLSLQAQREEKAKASELSKKKASALLFSSDEEDQWNIPASQTHLASDSRSKGEPRDSGTLQSQEAKAVKKTSLFEEDKEDDLFAIAKDSQKKTQRVSLLFEDDVDSGGSLFGSPPTSVPPATKKKETVSEAPPLLFSDEEEKEAQLGVKSVDKKVESAKESLKFGRTDVAESEKEGLLTRSAQETVKHSDLFSSSSPWDKGTKPRTKTVLSLFDEEEDKMEDQNIIQAPQKEVGKGCDPDAHPKSTGVFQDEELLFSHKLQKDNDPDVDLFAGTKKTKLLEPSVGSLFGDDEDDDLFSSAKSQPLVQEKKRVVKKDHSVNSFKNQKHPESIQGSKEKGIWKPETPQDSSGLAPFKTKEPSTRIGKIQANLAINPAALLPTAASQISEVKPVLPELAFPSSEHRRSHGLESVPVLPGSGEAGVSFDLPAQADTLHSANKSRVKMRGKRRPQTRAARRLAAQESSEAEDMSVPRGPIAQWADGAISPNGHRPQLRAASGEDSTEEALAAAAAPWEGGPVPGVDTSPFAKSLGHSRGEADLFDSGDIFSTGTGSQSVERTKPKAKIAENPANPPVGGKAKSPMFPALGEASSDDDLFQSAKPKPAKKTNPFPLLEDEDDLFTDQKVKKNETKSSSQQDVILTTQDIFEDDIFATEAIKPSQKTREKEKTLESNLFDDNIDIFADLTVKPKEKSKKKVEAKSIFDDDMDDIFSTGIQAKTTKPKSRSAQAAPEPRFEHKVSNIFDDPLNAFGGQ

SEQ ID NO: 6660 - DNA, 4540 bp, Homo sapiens
acgccccgggcagcttggctggggctaggcttccggggctctgcggtcctcggcctgtgctggcagcctcggagcccaccgagccgggcggctgggatgatgaaccggacgacccccgaccaggagctggtgccggcgtcggagcccgtgtgggagcggccgtggtcggtggaggagatccgcaggagcagccagagctggtcgctggcggccgacgcgggcctactacagtttctacaggaattctcacagcaaactatctctaggacccatgaaatcaagaaacaagtggacggactaatccgggaaaccaaagccacagattgtcgcctgcataatgtcttcaatgacttccttatgctctctaatacccagttcatagagaatcgtgtatatgatgaagaagtggaggagccagtactcaaggctgaggcagaaaaaacagagcaggagaagacacgagagcagaaagaagtagatctcattcctaaagtccaggaggctgtgaactatggcttacaagtattggacagtgcctttgagcaacttgatatcaaagcaggaaactcagactccgaggaagatgatgctaatgggcgggtggaactgatccttgaaccaaaggatctatacattgatcgtcctttaccatatctcattgggtcaaagctgttcatggaacaagaagatgtaggtcttggagagctgtccagtgaagaaggctctgtaggcagtgatcgtggcagtattgtggacactgaggaagagaaagaagaggaggagtcagatgaagattttgcccatcacagtgacaatgaacaaaaccagaaaagaagcagacctacatcgtttgcagatgagctggctgcccgcatcaagggggatgccatgggtcgagtggacgaggagccgacaaccttaccctcaggagaagcaaaacctcggaagacactcaaagagaagaaggaaaggagaactccttcagacgatgaagaggataacttattcgcaccccccaagctgaccgacgaggacttctcgccatttggctctggaggtggcctgttcagtggcggcaaggggctatttgatgatgaggacgaggagagtgacctcttcacggaagcctcccaggatcggcaagctggagcctctgttaaggaggagtcttcatcatccaaacctggaaagaaaatcccagcaggagctgtttctgtatttttaggagacacggatgtgtttggtgctgcctccgttccatcactgaaggagccacagaagcctgagcagcccactccaaggaaaagcccctatggtccccctcccactggcctctttgatgatgatgatggtgatgatgatgacgactttttctcggcaccccacagcaaaccttctaaaacacgcaaagtccaatccactgccgatatctttggtgacgaagaaggagatctgttcaaagaaaaagccgtagcatcgccagaagccactgtgagtcagacagatgaaaataaagcaagagcagaaaaaaaggatttgttttcttctcaaagtgcgagtaacttaaaaggtgcatctctgctgcctggcaagctccccacgtcggtttccctgtttgatgatgaagatgaagaggataatctttttgggggtacagctgctaagaagcagacattgtctctacaagctcagagagaagagaaagcaaaagcctccgagctctccaaaaagaaagcatctgccctgttgttcagcagtgatgaggaggaccagtggaatattcctgcttcacagacccacttagcatctgacagcaggtctaaaggagaacccagggattctgggaccctccagagccaggaggccaaggctgtgaaaaagaccagtctctttgaggaagacaaagaagatgatctttttgccattgccaaggacagatacatcctacctcctattgttcccgaagttgtctgtcaagttttgtgtatggaaagtaattcataccttcatcagatctcaaaagaagctttacacacacaagaagaagttgagccaaaagaagacccagagagtgtcactcctctttgaagacgatgttgatagcggaggctctctgtttggctctcctcccacatctgttcctcctgcaacaaagaaaaaagagactgtctctgaggcaccacctttgctgttcagcgatgaagaagagaaggaggcacaacttggagtgaagtctgtggataagaaggttgagagtgccaaggagtcattaaaatttgggagaactgatgtggctgagtcagaaaaggaaggacttttgactagatctgctcaggaaacagtcaagcattctgatttattttcttcatcatccccatgggacaaaggaaccaagcctagaaccaaaactgttcttagcttgtttgatgaggaagaggataaaatggaagatcaaaacattatccaggctccacagaaagaagtaggaaagggctgcgatcctgatgcccaccccaagagcacaggtgtcttccaggatgaagagctgcttttcagccacaagctccaaaaggacaatgacccagatgttgacctttttgctggcaccaaaaaaaccaagctgttagagccaagtgttgggagcctgtttggggatgatgaagatgatgatcttttcagctctgccaagtcccagcctttggtacaagagaaaaagagagtagtgaaaaaagaccactctgttaactctttcaaaaaccagaaacatcctgaatccattcaaggtagtaaagaaaaaggcatatggaagccggaaacacctcaggcaaatttagcgatcaacccagcggccttgctgcccacagcggcttcccagatctctgaagtaaagcctgttttgccagaattggcttttccttcatctgaacacagaaggagccacggtctggaaagtgtgcctgtccttcccgggagtggggaggccggtgtgagttttgatcttccagctcaggcagacaccttacacagtgcaaacaagagccgtgtcaagatgagagggaagcgtagaccgcagacccgtgcagctaggcggctggctgctcaggagtccagcgaggctgaggacatgagcgtccccagaggacccattgcacagtgggctgatggcgccatttccccaaatggccatcggccacagctcagagcagccagtggagaagacagcactgaggaggccctggcagctgccgctgcaccttgggaaggtggtcctgtgcctggagtggacacaagcccctttgcaaagtctctgggtcattccagaggggaggctgacctttttgattctggggacattttttccacgggcactggatctcagtccgtggagagaacaaaacccaaggcaaagatagcagagaatcctgccaacccaccagtgggtggtaaagcaaagagccccatgtttcctgctctaggcgaggccagcagtgatgatgatctctttcagtctgctaaaccaaaaccagcaaagaaaacaaatccctttcctctcctggaagatgaggatgacctctttacagatcagaaagtcaagaagaatgagacaaaatccagtagtcagcaggatgtcatattaacaacacaagatatttttgaggatgatatatttgctacggaagcaattaaaccctctcagaaaaccagagagaaggagaaaacattggaatctaatttatttgatgataacattgatatctttgctgacttaactgtaaaaccaaaagaaaagtccaaaaagaaagtggaagccaagtctatatttgatgatgatatggatgacatcttctccactggtatccaggctaagacaaccaaaccaaaaagccgatctgcacaggccgcacctgaaccaagatttgaacacaaggtgtccaacatctttgatgatcccctgaatgcctttggaggccagtagagcacacagggtatccacatgttaccctgcagctacattgttgagttagtgatgatattgtatatgctcatggtcttaactggattacaaaaagcaaatactagaacagctagctcatcttttacccaatgtacttagtatttttctgcactggtttaatcatgcttaatactacaaaacaaaaataaatatttcacagtggttggtttgttttgtttttaaaccacagtttgatttagttagccttgctggggccataatatgcttcagggtgtgtaaaagaagaaatctctttgtggctttcatgggcagggaatctcagagatagcaaatgccacctgaccagaagtctttgttatatggatgggaaccctaacttagggcttgggcaggggaaagagaaagaagatgagagattatacttcatgagtcttagcaatatgggagcaggttttcactgaattctgagggtgcctctgcatgtcctccaaggcaaagtttggcaaactgtggcccccccactgtcatattttgttaataaaattttattggaacacaatcaca

SEQ ID NO: 6661 - protein, 688 aa, Homo sapiens; identical to SEQ ID NO: 6613

SEQ ID NO: 6662 - DNA, 4425 bp, Homo sapiens
acgccccgggcagcttggctggggctaggcttccggggctctgcggtcctcggcctgtgctggcagcctcggagcccaccgagccgggcggctgggatgatgaaccggacgacccccgaccaggagctggtgccggcgtcggagcccgtgtgggagcggccgtggtcggtggaggagatccgcaggagcagccagagctggtcgctggcggccgacgcgggcctactacagtttctacaggaattctcacagcaaactatctctaggacccatgaaatcaagaaacaagtggacggactaatccgggaaaccaaagccacagattgtcgcctgcataatgtcttcaatgacttccttatgctctctaatacccagttcatagagaatcgtgtatatgatgaagaagtggaggagccagtactcaaggctgaggcagaaaaaacagagcaggagaagacacgagagcagaaagaagtagatctcattcctaaagtccaggaggctgtgaactatggcttacaagtattggacagtgcctttgagcaacttgatatcaaagcaggaaactcagactccgaggaagatgatgctaatgggcgggtggaactgatccttgaaccaaaggatctatacattgatcgtcctttaccatatctcattgggtcaaagctgttcatggaacaagaagatgtaggtcttggagagctgtccagtgaagaaggctctgtaggcagtgatcgtggcagtattgtggacactgaggaagagaaagaagaggaggagtcagatgaagattttgcccatcacagtgacaatgaacaaaaccagaaaagaagcagacctacatcgtttgcagatgagctggctgcccgcatcaagggggatgccatgggtcgagtggacgaggagccgacaaccttaccctcaggagaagcaaaacctcggaagacactcaaagagaagaaggaaaggagaactccttcagacgatgaagaggataacttattcgcaccccccaagctgaccgacgaggacttctcgccatttggctctggaggtggcctgttcagtggcggcaaggggctatttgatgatgaggacgaggagagtgacctcttcacggaagcctcccaggatcggcaagctggagcctctgttaaggaggagtcttcatcatccaaacctggaaagaaaatcccagcaggagctgtttctgtatttttaggagacacggatgtgtttggtgctgcctccgttccatcactgaaggagccacagaagcctgagcagcccactccaaggaaaagcccctatggtccccctcccactggcctctttgatgatgatgatggtgatgatgatgacgactttttctcggcaccccacagcaaaccttctaaaacacgcaaagtccaatccactgccgatatctttggtgacgaagaaggagatctgttcaaagaaaaagccgtagcatcgccagaagccactgtgagtcagacagatgaaaataaagcaagagcagaaaaaaaggatttgttttcttctcaaagtgcgagtaacttaaaaggtgcatctctgctgcctggcaagctccccacgtcggtttccctgtttgatgatgaagatgaagaggataatctttttgggggtacagctgctaagaagcagacattgtctctacaagctcagagagaagagaaagcaaaagcctccgagctctccaaaaagaaagcatctgccctgttgttcagcagtgatgaggaggaccagtggaatattcctgcttcacagacccacttagcatctgacagcaggtctaaaggagaacccagggattctgggaccctccagagccaggaggccaaggctgtgaaaaagaccagtctctttgaggaagacaaagaagatgatctttttgccattgccaaggacagccaaaagaagacccagagagtgtcactcctctttgaagacgatgttgatagcggaggctctctgtttggctctcctcccacatctgttcctcctgcaacaaagaaaaaagagactgtctctgaggcaccacctttgctgttcagcgatgaagaagagaaggaggcacaacttggagtgaagtctgtggataagaaggttgagagtgccaaggagtcattaaaatttgggagaactgatgtggctgagtcagaaaaggaaggacttttgactagatctgctcaggaaacagtcaagcattctgatttattttcttcatcatccccatgggacaaaggaaccaagcctagaaccaaaactgttcttagcttgtttgatgaggaagaggataaaatggaagatcaaaacattatccaggctccacagaaagaagtaggaaagggctgcgatcctgatgcccaccccaagagcacaggtgtcttccaggatgaagagctgcttttcagccacaagctccaaaaggacaatgacccagatgttgacctttttgctggcaccaaaaaaaccaagctgttagagccaagtgttgggagcctgtttggggatgatgaagatgatgatcttttcagctctgccaagtcccagcctttggtacaagagaaaaagagagtagtgaaaaaagaccactctgttaactctttcaaaaaccagaaacatcctgaatccattcaaggtagtaaagaaaaaggcatatggaagccggaaacacctcaggcaaatttagcgatcaacccagcggccttgctgcccacagcggcttcccagatctctgaagtaaagcctgttttgccagaattggcttttccttcatctgaacacagaaggagccacggtctggaaagtgtgcctgtccttcccgggagtggggaggccggtgtgagttttgatcttccagctcaggcagacaccttacacagtgcaaacaagagccgtgtcaagatgagagggaagcgtagaccgcagacccgtgcagctaggcggctggctgctcaggagtccagcgaggctgaggacatgagcgtccccagaggacccattgcacagtgggctgatggcgccatttccccaaatggccatcggccacagctcagagcagccagtggagaagacagcactgaggaggccctggcagctgccgctgcaccttgggaaggtggtcctgtgcctggagtggacacaagcccctttgcaaagtctctgggtcattccagaggggaggctgacctttttgattctggggacattttttccacgggcactggatctcagtccgtggagagaacaaaacccaaggcaaagatagcagagaatcctgccaacccaccagtgggtggtaaagcaaagagccccatgtttcctgctctaggcgaggccagcagtgatgatgatctctttcagtctgctaaaccaaaaccagcaaagaaaacaaatccctttcctctcctggaagatgaggatgacctctttacagatcagaaagtcaagaagaatgagacaaaatccagtagtcagcaggatgtcatattaacaacacaagatatttttgaggatgatatatttgctacggaagcaattaaaccctctcagaaaaccagagagaaggagaaaacattggaatctaatttatttgatgataacattgatatctttgctgacttaactgtaaaaccaaaagaaaagtccaaaaagaaagtggaagccaagtctatatttgatgatgatatggatgacatcttctccactggtatccaggctaagacaaccaaaccaaaaagccgatctgcacaggccgcacctgaaccaagatttgaacacaaggtgtccaacatctttgatgatcccctgaatgcctttggaggccagtagagcacacagggtatccacatgttaccctgcagctacattgttgagttagtgatgatattgtatatgctcatggtcttaactggattacaaaaagcaaatactagaacagctagctcatcttttacccaatgtacttagtatttttctgcactggtttaatcatgcttaatactacaaaacaaaaataaatatttcacagtggttggtttgttttgtttttaaaccacagtttgatttagttagccttgctggggccataatatgcttcagggtgtgtaaaagaagaaatctctttgtggctttcatgggcagggaatctcagagatagcaaatgccacctgaccagaagtctttgttatatggatgggaaccctaacttagggcttgggcaggggaaagagaaagaagatgagagattatacttcatgagtcttagcaatatgggagcaggttttcactgaattctgagggtgcctctgcatgtcctccaaggcaaagtttggcaaactgtggcccccccactgtcatattttgttaataaaattttattggaacacaatcaca

SEQ ID NO: 6663 - protein, 1254 aa, Homo sapiens
MMNRTTPDQELVPASEPVWERPWSVEEIRRSSQSWSLAADAGLLQFLQEFSQQTISRTHEIKKQVDGLIRETKATDCRLHNVFNDFLMLSNTQFIENRVYDEEVEEPVLKAEAEKTEQEKTREQKEVDLIPKVQEAVNYGLQVLDSAFEQLDIKAGNSDSEEDDANGRVELILEPKDLYIDRPLPYLIGSKLFMEQEDVGLGELSSEEGSVGSDRGSIVDTEEEKEEEESDEDFAHHSDNEQNQKRSRPTSFADELAARIKGDAMGRVDEEPTTLPSGEAKPRKTLKEKKERRTPSDDEEDNLFAPPKLTDEDFSPFGSGGGLFSGGKGLFDDEDEESDLFTEASQDRQAGASVKEESSSSKPGKKIPAGAVSVFLGDTDVFGAASVPSLKEPQKPEQPTPRKSPYGPPPTGLFDDDDGDDDDDFFSAPHSKPSKTRKVQSTADIFGDEEGDLFKEKAVASPEATVSQTDENKARAEKKDLFSSQSASNLKGASLLPGKLPTSVSLFDDEDEEDNLFGGTAAKKQTLSLQAQREEKAKASELSKKKASALLFSSDEEDQWNIPASQTHLASDSRSKGEPRDSGTLQSQEAKAVKKTSLFEEDKEDDLFAIAKDSQKKTQRVSLLFEDDVDSGGSLFGSPPTSVPPATKKKETVSEAPPLLFSDEEEKEAQLGVKSVDKKVESAKESLKFGRTDVAESEKEGLLTRSAQETVKHSDLFSSSSPWDKGTKPRTKTVLSLFDEEEDKMEDQNIIQAPQKEVGKGCDPDAHPKSTGVFQDEELLFSHKLQKDNDPDVDLFAGTKKTKLLEPSVGSLFGDDEDDDLFSSAKSQPLVQEKKRVVKKDHSVNSFKNQKHPESIQGSKEKGIWKPETPQANLAINPAALLPTAASQISEVKPVLPELAFPSSEHRRSHGLESVPVLPGSGEAGVSFDLPAQADTLHSANKSRVKMRGKRRPQTRAARRLAAQESSEAEDMSVPRGPIAQWADGAISPNGHRPQLRAASGEDSTEEALAAAAAPWEGGPVPGVDTSPFAKSLGHSRGEADLFDSGDIFSTGTGSQSVERTKPKAKIAENPANPPVGGKAKSPMFPALGEASSDDDLFQSAKPKPAKKTNPFPLLEDEDDLFTDQKVKKNETKSSSQQDVILTTQDIFEDDIFATEAIKPSQKTREKEKTLESNLFDDNIDIFADLTVKPKEKSKKKVEAKSIFDDDMDDIFSTGIQAKTTKPKSRSAQAAPEPRFEHKVSNIFDDPLNAFGGQ

SEQ ID NO: 6664 - DNA, 4603 bp, Homo sapiens
acgccccgggcagcttggctggggctaggcttccggggctctgcggtcctcggcctgtgctggcagcctcggagcccaccgagccgggcggctgggatgatgaaccggacgacccccgaccaggagctggtgccggcgtcggagcccgtgtgggagcggccgtggtcggtggaggagatccgcaggagcagccagagctggtcgctggcggccgacgcgggcctactacagtttctacaggaattctcacagcaaactatctctaggacccatgaaatcaagaaacaagtggacggactaatccgggaaaccaaagccacagattgtcgcctgcataatgtcttcaatgacttccttatgctctctaatacccagttcatagagaatcgtgtatatgatgaagaagtggaggagccagtactcaaggctgaggcagaaaaaacagagcaggagaagacacgagagcagaaagaagtagatctcattcctaaagtccaggaggctgtgaactatggcttacaagtattggacagtgcctttgagcaacttgatatcaaagcaggaaactcagactccgaggaagatgatgctaatgggcgggtggaactgatccttgaaccaaaggatctatacattgatcgtcctttaccatatctcattgggtcaaagctgttcatggaacaagaagatgtaggtcttggagagctgtccagtgaagaaggctctgtaggcagtgatcgtggcagtattgtggacactgaggaagagaaagaagaggaggagtcagatgaagattttgcccatcacagtgacaatgaacaaaaccagaaaagaagcagacctacatcgtttgcagatgagctggctgcccgcatcaagggggatgccatgggtcgagtggacgaggagccgacaaccttaccctcaggagaagcaaaacctcggaagacactcaaagagaagaaggaaaggagaactccttcagacgatgaagaggataacttattcgcaccccccaagctgaccgacgaggacttctcgccatttggctctggaggtggcctgttcagtggcggcaaggggctatttgatgatgaggacgaggagagtgacctcttcacggaagcctcccaggatcggcaagctggagcctctgttaaggaggagtcttcatcatccaaacctggaaagaaaatcccagcaggagctgtttctgtatttttaggagacacggatgtgtttggtgctgcctccgttccatcactgaaggagccacagaagcctgagcagcccactccaaggaaaagcccctatggtccccctcccactggcctctttgatgatgatgatggtgatgatgatgacgactttttctcggcaccccacagcaaaccttctaaaacacgcaaagtccaatccactgccgatatctttggtgacgaagaaggagatctgttcaaagaaaaagccgtagcatcgccagaagccactgtgagtcagacagatgaaaataaagcaagagcagaaaaaaaggatttgttttcttctcaaagtgcgagtaacttaaaaggtgcatctctgctgcctggcaagctccccacgtcggtttccctgtttgatgatgaagatgaagaggataatctttttgggggtacagctgctaagaagcagacattgtctctacaagctcagagagaagagaaagcaaaagcctccgagctctccaaaaagaaagcatctgccctgttgttcagcagtgatgaggaggaccagtggaatattcctgcttcacagacccacttagcatctgacagcaggtctaaaggagaacccagggattctgggaccctccagagccaggaggccaaggctgtgaaaaagaccagtctctttgaggaagacaaagaagatgatctttttgccattgccaaggacagatacatcctacctcctattgttcccgaagttgtctgtcaagttttgtgtatggaaagtaattcataccttcatcagatctcaaaagaagctttacacacacaagaagaagttgagccaaaagaagacccagagagtgtcactcctctttgaagacgatgttgatagcggaggctctctgtttggctctcctcccacatctgttcctcctgcaacaaagaaaaaagagactgtctctgaggcaccacctttgctgttcagcgatgaagaagagaaggaggcacaacttggagtgaagtctgtggataagaaggttgagagtgccaaggagtcattaaaatttgggagaactgatgtggctgagtcagaaaaggaaggacttttgactagatctgctcaggaaacagtcaagcattctgatttattttcttcatcatccccatgggacaaaggaaccaagcctagaaccaaaactgttcttagcttgtttgatgaggaagaggataaaatggaagatcaaaacattatccaggctccacagaaagaagtaggaaagggctgcgatcctgatgcccaccccaagagcacaggtgtcttccaggatgaagagctgcttttcagccacaagctccaaaaggacaatgacccagatgttgacctttttgctggcaccaaaaaaaccaagctgttagagccaagtgttgggagcctgtttggggatgatgaagatgatgatcttttcagctctgccaagtcccagcctttggtacaagagaaaaagagagtagtgaaaaaagaccactctgttaactctttcaaaaaccagaaacatcctgaatccattcaaggtagtaaagaaaaaggcatatggaagccggaaacacctcaggactcatcaggtctcgctccatttaaaaccaaagaaccatccactcggatcgggaagatacaagcaaatttagcgatcaacccagcggccttgctgcccacagcggcttcccagatctctgaagtaaagcctgttttgccagaattggcttttccttcatctgaacacagaaggagccacggtctggaaagtgtgcctgtccttcccgggagtggggaggccggtgtgagttttgatcttccagctcaggcagacaccttacacagtgcaaacaagagccgtgtcaagatgagagggaagcgtagaccgcagacccgtgcagctaggcggctggctgctcaggagtccagcgaggctgaggacatgagcgtccccagaggacccattgcacagtgggctgatggcgccatttccccaaatggccatcggccacagctcagagcagccagtggagaagacagcactgaggaggccctggcagctgccgctgcaccttgggaaggtggtcctgtgcctggagtggacacaagcccctttgcaaagtctctgggtcattccagaggggaggctgacctttttgattctggggacattttttccacgggcactggatctcagtccgtggagagaacaaaacccaaggcaaagatagcagagaatcctgccaacccaccagtgggtggtaaagcaaagagccccatgtttcctgctctaggcgaggccagcagtgatgatgatctctttcagtctgctaaaccaaaaccagcaaagaaaacaaatccctttcctctcctggaagatgaggatgacctctttacagatcagaaagtcaagaagaatgagacaaaatccagtagtcagcaggatgtcatattaacaacacaagatatttttgaggatgatatatttgctacggaagcaattaaaccctctcagaaaaccagagagaaggagaaaacattggaatctaatttatttgatgataacattgatatctttgctgacttaactgtaaaaccaaaagaaaagtccaaaaagaaagtggaagccaagtctatatttgatgatgatatggatgacatcttctccactggtatccaggctaagacaaccaaaccaaaaagccgatctgcacaggccgcacctgaaccaagatttgaacacaaggtgtccaacatctttgatgatcccctgaatgcctttggaggccagtagagcacacagggtatccacatgttaccctgcagctacattgttgagttagtgatgatattgtatatgctcatggtcttaactggattacaaaaagcaaatactagaacagctagctcatcttttacccaatgtacttagtatttttctgcactggtttaatcatgcttaatactacaaaacaaaaataaatatttcacagtggttggtttgttttgtttttaaaccacagtttgatttagttagccttgctggggccataatatgcttcagggtgtgtaaaagaagaaatctctttgtggctttcatgggcagggaatctcagagatagcaaatgccacctgaccagaagtctttgttatatggatgggaaccctaacttagggcttgggcaggggaaagagaaagaagatgagagattatacttcatgagtcttagcaatatgggagcaggttttcactgaattctgagggtgcctctgcatgtcctccaaggcaaagtttggcaaactgtggcccccccactgtcatattttgttaataaaattttattggaacacaatcaca

SEQ ID NO: 6665 - protein, 709 aa, Homo sapiens; identical to SEQ ID NO: 6611

SEQ ID NO: 6666 - DNA, 4741 bp, Homo sapiens
acgccccgggcagcttggctggggctaggcttccggggctctgcggtcctcggcctgtgctggcagcctcggagcccaccgagccgggcggctgggatgatgaaccggacgacccccgaccaggagctggtgccggcgtcggagcccgtgtgggagcggccgtggtcggtggaggagatccgcaggagcagccagagctggtcgctggcggccgacgcgggcctactacagtttctacaggaattctcacagcaaactatctctaggacccatgaaatcaagaaacaagtggacggactaatccgggaaaccaaagccacagattgtcgcctgcataatgtcttcaatgacttccttatgctctctaatacccagttcatagagaatcgtgtatatgatgaagaagtggaggagccagtactcaaggctgaggcagaaaaaacagagcaggagaagacacgagagcagaaagaagtagatctcattcctaaagtccaggaggctgtgaactatggcttacaagtattggacagtgcctttgagcaacttgatatcaaagcaggaaactcagactccgaggaagatgatgctaatgggcgggtggaactgatccttgaaccaaagagtttcactcttgttgcccaagctggagtggcgcaatctcggctcactgcagcttctgtctcctgggttcaagcgattctcctgcctcagccttccaagtagctgggattacaggatctatacattgatcgtcctttaccatatctcattgggtcaaagctgttcatggaacaagaagatgtaggtcttggagagctgtccagtgaagaaggctctgtaggcagtgatcgtggcagtattgtggacactgaggaagagaaagaagaggaggagtcagatgaagattttgcccatcacagtgacaatgaacaaaaccagaaaagaagcagacctacatcgtttgcagatgagctggctgcccgcatcaagggggatgccatgggtcgagtggacgaggagccgacaaccttaccctcaggagaagcaaaacctcggaagacactcaaagagaagaaggaaaggagaactccttcagacgatgaagaggataacttattcgcaccccccaagctgaccgacgaggacttctcgccatttggctctggaggtggcctgttcagtggcggcaaggggctatttgatgatgaggacgaggagagtgacctcttcacggaagcctcccaggatcggcaagctggagcctctgttaaggaggagtcttcatcatccaaacctggaaagaaaatcccagcaggagctgtttctgtatttttaggagacacggatgtgtttggtgctgcctccgttccatcactgaaggagccacagaagcctgagcagcccactccaaggaaaagcccctatggtccccctcccactggcctctttgatgatgatgatggtgatgatgatgacgactttttctcggcaccccacagcaaaccttctaaaacacgcaaagtccaatccactgccgatatctttggtgacgaagaaggagatctgttcaaagaaaaagccgtagcatcgccagaagccactgtgagtcagacagatgaaaataaagcaagagcagaaaaaaaggttaccttatcttacagcaaaaatctcaagccctcatcagaaacaaagactcaaaaaggcttattttcagatgaggaggactctgaggatttgttttcttctcaaagtgcgagtaacttaaaaggtgcatctctgctgcctggcaagctccccacgtcggtttccctgtttgatgatgaagatgaagaggataatctttttgggggtacagctgctaagaagcagacattgtctctacaagctcagagagaagagaaagcaaaagcctccgagctctccaaaaagaaagcatctgccctgttgttcagcagtgatgaggaggaccagtggaatattcctgcttcacagacccacttagcatctgacagcaggtctaaaggagaacccagggattctgggaccctccagagccaggaggccaaggctgtgaaaaagaccagtctctttgaggaagacaaagaagatgatctttttgccattgccaaggacagatacatcctacctcctattgttcccgaagttgtctgtcaagttttgtgtatggaaagtaattcataccttcatcagatctcaaaagaagctttacacacacaagaagaagttgagccaaaagaagacccagagagtgtcactcctctttgaagacgatgttgatagcggaggctctctgtttggctctcctcccacatctgttcctcctgcaacaaagaaaaaagagactgtctctgaggcaccacctttgctgttcagcgatgaagaagagaaggaggcacaacttggagtgaagtctgtggataagaaggttgagagtgccaaggagtcattaaaatttgggagaactgatgtggctgagtcagaaaaggaaggacttttgactagatctgctcaggaaacagtcaagcattctgatttattttcttcatcatccccatgggacaaaggaaccaagcctagaaccaaaactgttcttagcttgtttgatgaggaagaggataaaatggaagatcaaaacattatccaggctccacagaaagaagtaggaaagggctgcgatcctgatgcccaccccaagagcacaggtgtcttccaggatgaagagctgcttttcagccacaagctccaaaaggacaatgacccagatgttgacctttttgctggcaccaaaaaaaccaagctgttagagccaagtgttgggagcctgtttggggatgatgaagatgatgatcttttcagctctgccaagtcccagcctttggtacaagagaaaaagagagtagtgaaaaaagaccactctgttaactctttcaaaaaccagaaacatcctgaatccattcaaggtagtaaagaaaaaggcatatggaagccggaaacacctcaggcaaatttagcgatcaacccagcggccttgctgcccacagcggcttcccagatctctgaagtaaagcctgttttgccagaattggcttttccttcatctgaacacagaaggagccacggtctggaaagtgtgcctgtccttcccgggagtggggaggccggtgtgagttttgatcttccagctcaggcagacaccttacacagtgcaaacaagagccgtgtcaagatgagagggaagcgtagaccgcagacccgtgcagctaggcggctggctgctcaggagtccagcgaggctgaggacatgagcgtccccagaggacccattgcacagtgggctgatggcgccatttccccaaatggccatcggccacagctcagagcagccagtggagaagacagcactgaggaggccctggcagctgccgctgcaccttgggaaggtggtcctgtgcctggagtggacacaagcccctttgcaaagtctctgggtcattccagaggggaggctgacctttttgattctggggacattttttccacgggcactggatctcagtccgtggagagaacaaaacccaaggcaaagatagcagagaatcctgccaacccaccagtgggtggtaaagcaaagagccccatgtttcctgctctaggcgaggccagcagtgatgatgatctctttcagtctgctaaaccaaaaccagcaaagaaaacaaatccctttcctctcctggaagatgaggatgacctctttacagatcagaaagtcaagaagaatgagacaaaatccagtagtcagcaggatgtcatattaacaacacaagatatttttgaggatgatatatttgctacggaagcaattaaaccctctcagaaaaccagagagaaggagaaaacattggaatctaatttatttgatgataacattgatatctttgctgacttaactgtaaaaccaaaagaaaagtccaaaaagaaagtggaagccaagtctatatttgatgatgatatggatgacatcttctccactggtatccaggctaagacaaccaaaccaaaaagccgatctgcacaggccgcacctgaaccaagatttgaacacaaggtgtccaacatctttgatgatcccctgaatgcctttggaggccagtagagcacacagggtatccacatgttaccctgcagctacattgttgagttagtgatgatattgtatatgctcatggtcttaactggattacaaaaagcaaatactagaacagctagctcatcttttacccaatgtacttagtatttttctgcactggtttaatcatgcttaatactacaaaacaaaaataaatatttcacagtggttggtttgttttgtttttaaaccacagtttgatttagttagccttgctggggccataatatgcttcagggtgtgtaaaagaagaaatctctttgtggctttcatgggcagggaatctcagagatagcaaatgccacctgaccagaagtctttgttatatggatgggaaccctaacttagggcttgggcaggggaaagagaaagaagatgagagattatacttcatgagtcttagcaatatgggagcaggttttcactgaattctgagggtgcctctgcatgtcctccaaggcaaagtttggcaaactgtggcccccccactgtcatattttgttaataaaattttattggaacacaatcaca

SEQ ID NO: 6667 - protein, 688 aa, Homo sapiens; identical to SEQ ID NO: 6613

SEQ ID NO: 6668 - DNA, 4252 bp, Homo sapiens
acgccccgggcagcttggctggggctaggcttccggggctctgcggtcctcggcctgtgctggcagcctcggagcccaccgagccgggcggctgggatgatgaaccggacgacccccgaccaggagctggtgccggcgtcggagcccgtgtgggagcggccgtggtcggtggaggagatccgcaggagcagccagagctggtcgctggcggccgacgcgggcctactacagtttctacaggaattctcacagcaaactatctctaggacccatgaaatcaagaaacaagtggacggactaatccgggaaaccaaagccacagattgtcgcctgcataatgtcttcaatgacttccttatgctctctaatacccagttcatagagaatcgtgtatatgatgaagaagtggaggagccagtactcaaggctgaggcagaaaaaacagagcaggagaagacacgagagcagaaagaagtagatctcattcctaaagtccaggaggctgtgaactatggcttacaagtattggacagtgcctttgagcaacttgatatcaaagcaggaaactcagactccgaggaagatgatgctaatgggcgggtggaactgatccttgaaccaaaggatctatacattgatcgtcctttaccatatctcattgggtcaaagctgttcatggaacaagaagatgtaggtcttggagagctgtccagtgaagaaggctctgtaggcagtgatcgtggcagtattgtggacactgaggaagagaaagaagaggaggagtcagatgaagattttgcccatcacagtgacaatgaacaaaaccagaaaagaagcagacctacatcgtttgcagatgagctggctgcccgcatcaagggggatgccatgggtcgagtggacgaggagccgacaaccttaccctcaggagaagcaaaacctcggaagacactcaaagagaagaaggaaaggagaactccttcagacgatgaagaggataacttattcgcaccccccaagctgaccgacgaggacttctcgccatttggctctggaggtggcctgttcagtggcggcaaggggctatttgatgatgaggacgaggagagtgacctcttcacggaagcctcccaggatcggcaagctggagcctctgttaaggaggagtcttcatcatccaaacctggaaagaaaatcccagcaggagctgtttctgtatttttaggagacacggatgtgtttggtgctgcctccgttccatcactgaaggagccacagaagcctgagcagcccactccaaggaaaagcccctatggtccccctcccactggcctctttgatgatgatgatggtgatgatgatgacgactttttctcggcaccccacagcaaaccttctaaaacacgcaaagtccaatccactgccgatatctttggtgacgaagaaggagatctgttcaaagaaaaagccgtagcatcgccagaagccactgtgagtcagacagatgaaaataaagcaagagcagaaaaaaaggttaccttatcttacagcaaaaatctcaagccctcatcagaaacaaagactcaaaaaggcttattttcagatgaggaggactctgaggatttgttttcttctcaaagtgcgagtaacttaaaaggtgcatctctgctgcctggcaagctccccacgtcggtttccctgtttgatgatgaagatgaagaggataatctttttgggggtacagctgctaagaagcagacattgtctctacaagctcagagagaagagaaagcaaaagcctccgagctctccaaaaagaaagcatctgccctgttgttcagcagtgatgaggagccaaaagaagacccagagagtgtcactcctctttgaagacgatgttgatagcggaggctctctgtttggctctcctcccacatctgttcctcctgcaacaaaggaaggacttttgactagatctgctcaggaaacagtcaagcattctgatttattttcttcatcatccccatgggacaaaggaaccaagcctagaaccaaaactgttcttagcttgtttgatgaggaagaggataaaatggaagatcaaaacattatccaggctccacagaaagaagtaggaaagggctgcgatcctgatgcccaccccaagagcacaggtgtcttccaggatgaagagctgcttttcagccacaagctccaaaaggacaatgacccagatgttgacctttttgctggcaccaaaaaaaccaagctgttagagccaagtgttgggagcctgtttggggatgatgaagatgatgatcttttcagctctgccaagtcccagcctttggtacaagagaaaaagagagtagtgaaaaaagaccactctgttaactctttcaaaaaccagaaacatcctgaatccattcaaggtagtaaagaaaaaggcatatggaagccggaaacacctcaggactcatcaggtctcgctccatttaaaaccaaagaaccatccactcggatcgggaagatacaagcaaatttagcgatcaacccagcggccttgctgcccacagcggcttcccagatctctgaagtaaagcctgttttgccagaattggcttttccttcatctgaacacagaaggagccacggtctggaaagtgtgcctgtccttcccgggagtggggaggccggtgtgagttttgatcttccagctcaggcagacaccttacacagtgcaaacaagagccgtgtcaagatgagagggaagcgtagaccgcagacccgtgcagctaggcggctggctgctcaggagtccagcgaggctgaggacatgagcgtccccagaggacccattgcacagtgggctgatggcgccatttccccaaatggccatcggccacagctcagagcagccagtggagaagacagcactgaggaggccctggcagctgccgctgcaccttgggaaggtggtcctgtgcctggagtggacacaagcccctttgcaaagtctctgggtcattccagaggggaggctgacctttttgattctggggacattttttccacgggcactggatctcagtccgtggagagaacaaaacccaaggcaaagatagcagagaatcctgccaacccaccagtgggtggtaaagcaaagagccccatgtttcctgctctaggcgaggccagcagtgatgatgatctctttcagtctgctaaaccaaaaccagcaaagaaaacaaatccctttcctctcctggaagatgaggatgacctctttacagatcagaaagtcaagaagaatgagacaaaatccagtagtcagcaggatgtcatattaacaacacaagatatttttgaggatgatatatttgctacggaagcaattaaaccctctcagaaaaccagagagaaggagaaaacattggaatctaatttatttgatgataacattgatatctttgctgacttaactgtaaaaccaaaagaaaagtccaaaaagaaagtggaagccaagtctatatttgatgatgatatggatgacatcttctccactggtatccaggctaagacaaccaaaccaaaaagccgatctgcacaggccgcacctgaaccaagatttgaacacaaggtgtccaacatctttgatgatcccctgaatgcctttggaggccagtagagcacacagggtatccacatgttaccctgcagctacattgttgagttagtgatgatattgtatatgctcatggtcttaactggattacaaaaagcaaatactagaacagctagctcatcttttacccaatgtacttagtatttttctgcactggtttaatcatgcttaatactacaaaacaaaaataaatatttcacagtggttggtttgttttgtttttaaaccacagtttgatttagttagccttgctggggccataatatgcttcagggtgtgtaaaagaagaaatctctttgtggctttcatgggcagggaatctcagagatagcaaatgccacctgaccagaagtctttgttatatggatgggaaccctaacttagggcttgggcaggggaaagagaaagaagatgagagattatacttcatgagtcttagcaatatgggagcaggttttcactgaattctgagggtgcctctgcatgtcctccaaggcaaagtttggcaaactgtggcccccccactgtcatattttgttaataaaattttattggaacacaatcaca

SEQ ID NO: 6669 - protein, 660 aa, Homo sapiens; identical to SEQ ID NO: 6621

SEQ ID NO: 6670 - DNA, 4575 bp, Homo sapiens
acgccccgggcagcttggctggggctaggcttccggggctctgcggtcctcggcctgtgctggcagcctcggagcccaccgagccgggcggctgggatgatgaaccggacgacccccgaccaggagctggtgccggcgtcggagcccgtgtgggagcggccgtggtcggtggaggagatccgcaggagcagccagagctggtcgctggcggccgacgcgggcctactacagtttctacaggaattctcacagcaaactatctctaggacccatgaaatcaagaaacaagtggacggactaatccgggaaaccaaagccacagattgtcgcctgcataatgtcttcaatgacttccttatgctctctaatacccagttcatagagaatcgtgtatatgatgaagaagtggaggagccagtactcaaggctgaggcagaaaaaacagagcaggagaagacacgagagcagaaagaagtagatctcattcctaaagtccaggaggctgtgaactatggcttacaagtattggacagtgcctttgagcaacttgatatcaaagcaggaaactcagactccgaggaagatgatgctaatgggcgggtggaactgatccttgaaccaaaggatctatacattgatcgtcctttaccatatctcattgggtcaaagctgttcatggaacaagaagatgtaggtcttggagagctgtccagtgaagaaggctctgtaggcagtgatcgtggcagtattgtggacactgaggaagagaaagaagaggaggagtcagatgaagattttgcccatcacagtgacaatgaacaaaaccagaaaagaagcagacctacatcgtttgcagatgagctggctgcccgcatcaagggggatgccatgggtcgagtggacgaggagccgacaaccttaccctcaggagaagcaaaacctcggaagacactcaaagagaagaaggaaaggagaactccttcagacgatgaagaggataacttattcgcaccccccaagctgaccgacgaggacttctcgccatttggctctggaggtggcctgttcagtggcggcaaggggctatttgatgatgaggacgaggagagtgacctcttcacggaagcctcccaggatcggcaagctggagcctctgttaaggaggagtcttcatcatccaaacctggaaagaaaatcccagcaggagctgtttctgtatttttaggagacacggatgtgtttggtgctgcctccgttccatcactgaaggagccacagaagcctgagcagcccactccaaggaaaagcccctatggtccccctcccactggcctctttgatgatgatgatggtgatgatgatgacgactttttctcggcaccccacagcaaaccttctaaaacacgcaaagtccaatccactgccgatatctttggtgacgaagaaggagatctgttcaaagaaaaagccgtagcatcgccagaagccactgtgagtcagacagatgaaaataaagcaagagcagaaaaaaaggttaccttatcttacagcaaaaatctcaagccctcatcagaaacaaagactcaaaaaggcttattttcagatgaggaggactctgaggatttgttttcttctcaaagtgcgagtaacttaaaaggtgcatctctgctgcctggcaagctccccacgtcggtttccctgtttgatgatgaagatgaagaggataatctttttgggggtacagctgctaagaagcagacattgtctctacaagctcagagagaagagaaagcaaaagcctccgagctctccaaaaagaaagcatctgccctgttgttcagcagtgatgaggaggaccagtggaatattcctgcttcacagacccacttagcatctgacagcaggtctaaaggagaacccagggattctgggaccctccagagccaggaggccaaggctgtgaaaaagaccagtctctttgaggaagacaaagaagatgatctttttgccattgccaaggacagccaaaagaagacccagagagtgtcactcctctttgaagacgatgttgatagcggaggctctctgtttggctctcctcccacatctgttcctcctgcaacaaagaaaaaagagactgtctctgaggcaccacctttgctgttcagcgatgaagaagagaaggaggcacaacttggagtgaagtctgtggataagaaggttgagagtgccaaggagtcattaaaatttgggagaactgatgtggctgagtcagaaaaggaaggacttttgactagatctgctcaggaaacagtcaagcattctgatttattttcttcatcatccccatgggacaaaggaaccaagcctagaaccaaaactgttcttagcttgtttgatgaggaagaggataaaatggaagatcaaaacattatccaggctccacagaaagaagtaggaaagggctgcgatcctgatgcccaccccaagagcacaggtgtcttccaggatgaagagctgcttttcagccacaagctccaaaaggacaatgacccagatgttgacctttttgctggcaccaaaaaaaccaagctgttagagccaagtgttgggagcctgtttggggatgatgaagatgatgatcttttcagctctgccaagtcccagcctttggtacaagagaaaaagagagtagtgaaaaaagaccactctgttaactctttcaaaaaccagaaacatcctgaatccattcaaggtagtaaagaaaaaggcatatggaagccggaaacacctcaggactcatcaggtctcgctccatttaaaaccaaagaaccatccactcggatcgggaagatacaagcaaatttagcgatcaacccagcggccttgctgcccacagcggcttcccagatctctgaagtaaagcctgttttgccagaattggcttttccttcatctgaacacagaaggagccacggtctggaaagtgtgcctgtccttcccgggagtggggaggccggtgtgagttttgatcttccagctcaggcagacaccttacacagtgcaaacaagagccgtgtcaagatgagagggaagcgtagaccgcagacccgtgcagctaggcggctggctgctcaggagtccagcgaggctgaggacatgagcgtccccagaggacccattgcacagtgggctgatggcgccatttccccaaatggccatcggccacagctcagagcagccagtggagaagacagcactgaggaggccctggcagctgccgctgcaccttgggaaggtggtcctgtgcctggagtggacacaagcccctttgcaaagtctctgggtcattccagaggggaggctgacctttttgattctggggacattttttccacgggcactggatctcagtccgtggagagaacaaaacccaaggcaaagatagcagagaatcctgccaacccaccagtgggtggtaaagcaaagagccccatgtttcctgctctaggcgaggccagcagtgatgatgatctctttcagtctgctaaaccaaaaccagcaaagaaaacaaatccctttcctctcctggaagatgaggatgacctctttacagatcagaaagtcaagaagaatgagacaaaatccagtagtcagcaggatgtcatattaacaacacaagatatttttgaggatgatatatttgctacggaagcaattaaaccctctcagaaaaccagagagaaggagaaaacattggaatctaatttatttgatgataacattgatatctttgctgacttaactgtaaaaccaaaagaaaagtccaaaaagaaagtggaagccaagtctatatttgatgatgatatggatgacatcttctccactggtatccaggctaagacaaccaaaccaaaaagccgatctgcacaggccgcacctgaaccaagatttgaacacaaggtgtccaacatctttgatgatcccctgaatgcctttggaggccagtagagcacacagggtatccacatgttaccctgcagctacattgttgagttagtgatgatattgtatatgctcatggtcttaactggattacaaaaagcaaatactagaacagctagctcatcttttacccaatgtacttagtatttttctgcactggtttaatcatgcttaatactacaaaacaaaaataaatatttcacagtggttggtttgttttgtttttaaaccacagtttgatttagttagccttgctggggccataatatgcttcagggtgtgtaaaagaagaaatctctttgtggctttcatgggcagggaatctcagagatagcaaatgccacctgaccagaagtctttgttatatggatgggaaccctaacttagggcttgggcaggggaaagagaaagaagatgagagattatacttcatgagtcttagcaatatgggagcaggttttcactgaattctgagggtgcctctgcatgtcctccaaggcaaagtttggcaaactgtggcccccccactgtcatattttgttaataaaattttattggaacacaatcaca

SEQ ID NO: 6671 - protein, 1304 aa, Homo sapiens
MMNRTTPDQELVPASEPVWERPWSVEEIRRSSQSWSLAADAGLLQFLQEFSQQTISRTHEIKKQVDGLIRETKATDCRLHNVFNDFLMLSNTQFIENRVYDEEVEEPVLKAEAEKTEQEKTREQKEVDLIPKVQEAVNYGLQVLDSAFEQLDIKAGNSDSEEDDANGRVELILEPKDLYIDRPLPYLIGSKLFMEQEDVGLGELSSEEGSVGSDRGSIVDTEEEKEEEESDEDFAHHSDNEQNQKRSRPTSFADELAARIKGDAMGRVDEEPTTLPSGEAKPRKTLKEKKERRTPSDDEEDNLFAPPKLTDEDFSPFGSGGGLFSGGKGLFDDEDEESDLFTEASQDRQAGASVKEESSSSKPGKKIPAGAVSVFLGDTDVFGAASVPSLKEPQKPEQPTPRKSPYGPPPTGLFDDDDGDDDDDFFSAPHSKPSKTRKVQSTADIFGDEEGDLFKEKAVASPEATVSQTDENKARAEKKVTLSYSKNLKPSSETKTQKGLFSDEEDSEDLFSSQSASNLKGASLLPGKLPTSVSLFDDEDEEDNLFGGTAAKKQTLSLQAQREEKAKASELSKKKASALLFSSDEEDQWNIPASQTHLASDSRSKGEPRDSGTLQSQEAKAVKKTSLFEEDKEDDLFAIAKDSQKKTQRVSLLFEDDVDSGGSLFGSPPTSVPPATKKKETVSEAPPLLFSDEEEKEAQLGVKSVDKKVESAKESLKFGRTDVAESEKEGLLTRSAQETVKHSDLFSSSSPWDKGTKPRTKTVLSLFDEEEDKMEDQNIIQAPQKEVGKGCDPDAHPKSTGVFQDEELLFSHKLQKDNDPDVDLFAGTKKTKLLEPSVGSLFGDDEDDDLFSSAKSQPLVQEKKRVVKKDHSVNSFKNQKHPESIQGSKEKGIWKPETPQDSSGLAPFKTKEPSTRIGKIQANLAINPAALLPTAASQISEVKPVLPELAFPSSEHRRSHGLESVPVLPGSGEAGVSFDLPAQADTLHSANKSRVKMRGKRRPQTRAARRLAAQESSEAEDMSVPRGPIAQWADGAISPNGHRPQLRAASGEDSTEEALAAAAAPWEGGPVPGVDTSPFAKSLGHSRGEADLFDSGDIFSTGTGSQSVERTKPKAKIAENPANPPVGGKAKSPMFPALGEASSDDDLFQSAKPKPAKKTNPFPLLEDEDDLFTDQKVKKNETKSSSQQDVILTTQDIFEDDIFATEAIKPSQKTREKEKTLESNLFDDNIDIFADLTVKPKEKSKKKVEAKSIFDDDMDDIFSTGIQAKTTKPKSRSAQAAPEPRFEHKVSNIFDDPLNAFGGQ

SEQ ID NO: 6672 - DNA, 4627 bp, Homo sapiens
acgccccgggcagcttggctggggctaggcttccggggctctgcggtcctcggcctgtgctggcagcctcggagcccaccgagccgggcggctgggatgatgaaccggacgacccccgaccaggagctggtgccggcgtcggagcccgtgtgggagcggccgtggtcggtggaggagatccgcaggagcagccagagctggtcgctggcggccgacgcgggcctactacagtttctacaggaattctcacagcaaactatctctaggacccatgaaatcaagaaacaagtggacggactaatccgggaaaccaaagccacagattgtcgcctgcataatgtcttcaatgacttccttatgctctctaatacccagttcatagagaatcgtgtatatgatgaagaagtggaggagccagtactcaaggctgaggcagaaaaaacagagcaggagaagacacgagagcagaaagaagtagatctcattcctaaagtccaggaggctgtgaactatggcttacaagtattggacagtgcctttgagcaacttgatatcaaagcaggaaactcagactccgaggaagatgatgctaatgggcgggtggaactgatccttgaaccaaaggatctatacattgatcgtcctttaccatatctcattgggtcaaagctgttcatggaacaagaagatgtaggtcttggagagctgtccagtgaagaaggctctgtaggcagtgatcgtggcagtattgtggacactgaggaagagaaagaagaggaggagtcagatgaagattttgcccatcacagtgacaatgaacaaaaccagaaaagaagcagacctacatcgtttgcagatgagctggctgcccgcatcaagggggatgccatgggtcgagtggacgaggagccgacaaccttaccctcaggagaagcaaaacctcggaagacactcaaagagaagaaggaaaggagaactccttcagacgatgaagaggataacttattcgcaccccccaagctgaccgacgaggacttctcgccatttggctctggaggtggcctgttcagtggcggcaaggggctatttgatgatgaggacgaggagagtgacctcttcacggaagcctcccaggatcggcaagctggagcctctgttaaggaggagtcttcatcatccaaacctggaaagaaaatcccagcaggagctgtttctgtatttttaggagacacggatgtgtttggtgctgcctccgttccatcactgaaggagccacagaagcctgagcagcccactccaaggaaaagcccctatggtccccctcccactggcctctttgatgatgatgatggtgatgatgatgacgactttttctcggcaccccacagcaaaccttctaaaacacgcaaagtccaatccactgccgatatctttggtgacgaagaaggagatctgttcaaagaaaaagccgtagcatcgccagaagccactgtgagtcagacagatgaaaataaagcaagagcagaaaaaaaggttaccttatcttacagcaaaaatctcaagccctcatcagaaacaaagactcaaaaaggcttattttcagatgaggaggactctgaggatttgttttcttctcaaagtgcgagtaacttaaaaggtgcatctctgctgcctggcaagctccccacgtcggtttccctgtttgatgatgaagatgaagaggataatctttttgggggtacagctgctaagaagcagacattgtctctacaagctcagagagaagagaaagcaaaagcctccgagctctccaaaaagaaagcatctgccctgttgttcagcagtgatgaggaggaccagtggaatattcctgcttcacagacccacttagcatctgacagcaggtctaaaggagaacccagggattctgggaccctccagagccaggaggccaaggctgtgaaaaagaccagtctctttgaggaagacaaagaagatgatctttttgccattgccaaggacagatacatcctacctcctattgttcccgaagttgtctgtcaagttttgtgtatggaaagtaattcataccttcatcagatctcaaaagaagctttacacacacaagaagaagttgagccaaaagaagacccagagagtgtcactcctctttgaagacgatgttgatagcggaggctctctgtttggctctcctcccacatctgttcctcctgcaacaaagaaaaaagagactgtctctgaggcaccacctttgctgttcagcgatgaagaagagaaggaggcacaacttggagtgaagtctgtggataagaaggttgagagtgccaaggagtcattaaaatttgggagaactgatgtggctgagtcagaaaaggaaggacttttgactagatctgctcaggaaacagtcaagcattctgatttattttcttcatcatccccatgggacaaaggaaccaagcctagaaccaaaactgttcttagcttgtttgatgaggaagaggataaaatggaagatcaaaacattatccaggctccacagaaagaagtaggaaagggctgcgatcctgatgcccaccccaagagcacaggtgtcttccaggatgaagagctgcttttcagccacaagctccaaaaggacaatgacccagatgttgacctttttgctggcaccaaaaaaaccaagctgttagagccaagtgttgggagcctgtttggggatgatgaagatgatgatcttttcagctctgccaagtcccagcctttggtacaagagaaaaagagagtagtgaaaaaagaccactctgttaactctttcaaaaaccagaaacatcctgaatccattcaaggtagtaaagaaaaaggcatatggaagccggaaacacctcaggcaaatttagcgatcaacccagcggccttgctgcccacagcggcttcccagatctctgaagtaaagcctgttttgccagaattggcttttccttcatctgaacacagaaggagccacggtctggaaagtgtgcctgtccttcccgggagtggggaggccggtgtgagttttgatcttccagctcaggcagacaccttacacagtgcaaacaagagccgtgtcaagatgagagggaagcgtagaccgcagacccgtgcagctaggcggctggctgctcaggagtccagcgaggctgaggacatgagcgtccccagaggacccattgcacagtgggctgatggcgccatttccccaaatggccatcggccacagctcagagcagccagtggagaagacagcactgaggaggccctggcagctgccgctgcaccttgggaaggtggtcctgtgcctggagtggacacaagcccctttgcaaagtctctgggtcattccagaggggaggctgacctttttgattctggggacattttttccacgggcactggatctcagtccgtggagagaacaaaacccaaggcaaagatagcagagaatcctgccaacccaccagtgggtggtaaagcaaagagccccatgtttcctgctctaggcgaggccagcagtgatgatgatctctttcagtctgctaaaccaaaaccagcaaagaaaacaaatccctttcctctcctggaagatgaggatgacctctttacagatcagaaagtcaagaagaatgagacaaaatccagtagtcagcaggatgtcatattaacaacacaagatatttttgaggatgatatatttgctacggaagcaattaaaccctctcagaaaaccagagagaaggagaaaacattggaatctaatttatttgatgataacattgatatctttgctgacttaactgtaaaaccaaaagaaaagtccaaaaagaaagtggaagccaagtctatatttgatgatgatatggatgacatcttctccactggtatccaggctaagacaaccaaaccaaaaagccgatctgcacaggccgcacctgaaccaagatttgaacacaaggtgtccaacatctttgatgatcccctgaatgcctttggaggccagtagagcacacagggtatccacatgttaccctgcagctacattgttgagttagtgatgatattgtatatgctcatggtcttaactggattacaaaaagcaaatactagaacagctagctcatcttttacccaatgtacttagtatttttctgcactggtttaatcatgcttaatactacaaaacaaaaataaatatttcacagtggttggtttgttttgtttttaaaccacagtttgatttagttagccttgctggggccataatatgcttcagggtgtgtaaaagaagaaatctctttgtggctttcatgggcagggaatctcagagatagcaaatgccacctgaccagaagtctttgttatatggatgggaaccctaacttagggcttgggcaggggaaagagaaagaagatgagagattatacttcatgagtcttagcaatatgggagcaggttttcactgaattctgagggtgcctctgcatgtcctccaaggcaaagtttggcaaactgtggcccccccactgtcatattttgttaataaaattttattggaacacaatcaca

SEQ ID NO: 6673 - protein, 692 aa, Homo sapiens
MMNRTTPDQELVPASEPVWERPWSVEEIRRSSQSWSLAADAGLLQFLQEFSQQTISRTHEIKKQVDGLIRETKATDCRLHNVFNDFLMLSNTQFIENRVYDEEVEEPVLKAEAEKTEQEKTREQKEVDLIPKVQEAVNYGLQVLDSAFEQLDIKAGNSDSEEDDANGRVELILEPKDLYIDRPLPYLIGSKLFMEQEDVGLGELSSEEGSVGSDRGSIVDTEEEKEEEESDEDFAHHSDNEQNQKRSRPTSFADELAARIKGDAMGRVDEEPTTLPSGEAKPRKTLKEKKERRTPSDDEEDNLFAPPKLTDEDFSPFGSGGGLFSGGKGLFDDEDEESDLFTEASQDRQAGASVKEESSSSKPGKKIPAGAVSVFLGDTDVFGAASVPSLKEPQKPEQPTPRKSPYGPPPTGLFDDDDGDDDDDFFSAPHSKPSKTRKVQSTADIFGDEEGDLFKEKAVASPEATVSQTDENKARAEKKVTLSYSKNLKPSSETKTQKGLFSDEEDSEDLFSSQSASNLKGASLLPGKLPTSVSLFDDEDEEDNLFGGTAAKKQTLSLQAQREEKAKASELSKKKASALLFSSDEEDQWNIPASQTHLASDSRSKGEPRDSGTLQSQEAKAVKKTSLFEEDKEDDLFAIAKDRYILPPIVPEVVCQVLCMESNSYLHQISKEALHTQEEVEPKEDPESVTPL

SEQ ID NO: 6674 - DNA, 4414 bp, Homo sapiens
acgccccgggcagcttggctggggctaggcttccggggctctgcggtcctcggcctgtgctggcagcctcggagcccaccgagccgggcggctgggatgatgaaccggacgacccccgaccaggagctggtgccggcgtcggagcccgtgtgggagcggccgtggtcggtggaggagatccgcaggagcagccagagctggtcgctggcggccgacgcgggcctactacagtttctacaggaattctcacagcaaactatctctaggacccatgaaatcaagaaacaagtggacggactaatccgggaaaccaaagccacagattgtcgcctgcataatgtcttcaatgacttccttatgctctctaatacccagttcatagagaatcgtgtatatgatgaagaagtggaggagccagtactcaaggctgaggcagaaaaaacagagcaggagaagacacgagagcagaaagaagtagatctcattcctaaagtccaggaggctgtgaactatggcttacaagtattggacagtgcctttgagcaacttgatatcaaagcaggaaactcagactccgaggaagatgatgctaatgggcgggtggaactgatccttgaaccaaagagtttcactcttgttgcccaagctggagtggcgcaatctcggctcactgcagcttctgtctcctgggttcaagcgattctcctgcctcagccttccaagtagctgggattacaggatctatacattgatcgtcctttaccatatctcattgggtcaaagctgttcatggaacaagaagatgtaggtcttggagagctgtccagtgaagaaggctctgtaggcagtgatcgtggcagtattgtggacactgaggaagagaaagaagaggaggagtcagatgaagattttgcccatcacagtgacaatgaacaaaaccagcacaccacacaaatgagtgatgaggaagaggatgatgatggctgtgacctttttgctgactctgagaaggaggaggaagatattgaggacattgaagaaaatactagacctaaaagaagcagacctacatcgtttgcagatgagctggctgcccgcatcaagggggatgccatgggtcgagtggacgaggagccgacaaccttaccctcaggagaagcaaaacctcggaagacactcaaagagaagaaggaaaggagaactccttcagacgatgaagaggataacttattcgcaccccccaagctgaccgacgaggacttctcgccatttggctctggaggtggcctgttcagtggcggcaaggggctatttgatgatgaggacgaggagagtgacctcttcacggaagcctcccaggatcggcaagctggagcctctgttaaggaggagtcttcatcatccaaacctggaaagaaaatcccagcaggagctgtttctgtatttttaggagacacggatgtgtttggtgctgcctccgttccatcactgaaggagccacagaagcctgagcagcccactccaaggaaaagcccctatggtccccctcccactggcctctttgatgatgatgatggtgatgatgatgacgactttttctcggcaccccacagcaaaccttctaaaacacgcaaagtccaatccactgccgatatctttggtgacgaagaaggagatctgttcaaagaaaaagccgtagcatcgccagaagccactgtgagtcagacagatgaaaataaagcaagagcagaaaaaaaggttaccttatcttacagcaaaaatctcaagccctcatcagaaacaaagactcaaaaaggcttattttcagatgaggaggactctgaggatttgttttcttctcaaagtgcgagtaacttaaaaggtgcatctctgctgcctggcaagctccccacgtcggtttccctgtttgatgatgaagatgaagaggataatctttttgggggtacagctgctaagaagcagacattgtctctacaagctcagagagaagagaaagcaaaagcctccgagctctccaaaaagaaagcatctgccctgttgttcagcagtgatgaggagccaaaagaagacccagagagtgtcactcctctttgaagacgatgttgatagcggaggctctctgtttggctctcctcccacatctgttcctcctgcaacaaaggaaggacttttgactagatctgctcaggaaacagtcaagcattctgatttattttcttcatcatccccatgggacaaaggaaccaagcctagaaccaaaactgttcttagcttgtttgatgaggaagaggataaaatggaagatcaaaacattatccaggctccacagaaagaagtaggaaagggctgcgatcctgatgcccaccccaagagcacaggtgtcttccaggatgaagagctgcttttcagccacaagctccaaaaggacaatgacccagatgttgacctttttgctggcaccaaaaaaaccaagctgttagagccaagtgttgggagcctgtttggggatgatgaagatgatgatcttttcagctctgccaagtcccagcctttggtacaagagaaaaagagagtagtgaaaaaagaccactctgttaactctttcaaaaaccagaaacatcctgaatccattcaaggtagtaaagaaaaaggcatatggaagccggaaacacctcaggcaaatttagcgatcaacccagcggccttgctgcccacagcggcttcccagatctctgaagtaaagcctgttttgccagaattggcttttccttcatctgaacacagaaggagccacggtctggaaagtgtgcctgtccttcccgggagtggggaggccggtgtgagttttgatcttccagctcaggcagacaccttacacagtgcaaacaagagccgtgtcaagatgagagggaagcgtagaccgcagacccgtgcagctaggcggctggctgctcaggagtccagcgaggctgaggacatgagcgtccccagaggacccattgcacagtgggctgatggcgccatttccccaaatggccatcggccacagctcagagcagccagtggagaagacagcactgaggaggccctggcagctgccgctgcaccttgggaaggtggtcctgtgcctggagtggacacaagcccctttgcaaagtctctgggtcattccagaggggaggctgacctttttgattctggggacattttttccacgggcactggatctcagtccgtggagagaacaaaacccaaggcaaagatagcagagaatcctgccaacccaccagtgggtggtaaagcaaagagccccatgtttcctgctctaggcgaggccagcagtgatgatgatctctttcagtctgctaaaccaaaaccagcaaagaaaacaaatccctttcctctcctggaagatgaggatgacctctttacagatcagaaagtcaagaagaatgagacaaaatccagtagtcagcaggatgtcatattaacaacacaagatatttttgaggatgatatatttgctacggaagcaattaaaccctctcagaaaaccagagagaaggagaaaacattggaatctaatttatttgatgataacattgatatctttgctgacttaactgtaaaaccaaaagaaaagtccaaaaagaaagtggaagccaagtctatatttgatgatgatatggatgacatcttctccactggtatccaggctaagacaaccaaaccaaaaagccgatctgcacaggccgcacctgaaccaagatttgaacacaaggtgtccaacatctttgatgatcccctgaatgcctttggaggccagtagagcacacagggtatccacatgttaccctgcagctacattgttgagttagtgatgatattgtatatgctcatggtcttaactggattacaaaaagcaaatactagaacagctagctcatcttttacccaatgtacttagtatttttctgcactggtttaatcatgcttaatactacaaaacaaaaataaatatttcacagtggttggtttgttttgtttttaaaccacagtttgatttagttagccttgctggggccataatatgcttcagggtgtgtaaaagaagaaatctctttgtggctttcatgggcagggaatctcagagatagcaaatgccacctgaccagaagtctttgttatatggatgggaaccctaacttagggcttgggcaggggaaagagaaagaagatgagagattatacttcatgagtcttagcaatatgggagcaggttttcactgaattctgagggtgcctctgcatgtcctccaaggcaaagtttggcaaactgtggcccccccactgtcatattttgttaataaaattttattggaacacaatcaca

SEQ ID NO: 6675 - protein, 639 aa, Homo sapiens; identical to SEQ ID NO: 6629

SEQ ID NO: 6676 - DNA, 4686 bp, Homo sapiens
acgccccgggcagcttggctggggctaggcttccggggctctgcggtcctcggcctgtgctggcagcctcggagcccaccgagccgggcggctgggatgatgaaccggacgacccccgaccaggagctggtgccggcgtcggagcccgtgtgggagcggccgtggtcggtggaggagatccgcaggagcagccagagctggtcgctggcggccgacgcgggcctactacagtttctacaggaattctcacagcaaactatctctaggacccatgaaatcaagaaacaagtggacggactaatccgggaaaccaaagccacagattgtcgcctgcataatgtcttcaatgacttccttatgctctctaatacccagttcatagagaatcgtgtatatgatgaagaagtggaggagccagtactcaaggctgaggcagaaaaaacagagcaggagaagacacgagagcagaaagaagtagatctcattcctaaagtccaggaggctgtgaactatggcttacaagtattggacagtgcctttgagcaacttgatatcaaagcaggaaactcagactccgaggaagatgatgctaatgggcgggtggaactgatccttgaaccaaaggatctatacattgatcgtcctttaccatatctcattgggtcaaagctgttcatggaacaagaagatgtaggtcttggagagctgtccagtgaagaaggctctgtaggcagtgatcgtggcagtattgtggacactgaggaagagaaagaagaggaggagtcagatgaagattttgcccatcacagtgacaatgaacaaaaccagcacaccacacaaatgagtgatgaggaagaggatgatgatggctgtgacctttttgctgactctgagaaggaggaggaagatattgaggacattgaagaaaatactagacctaaaagaagcagacctacatcgtttgcagatgagctggctgcccgcatcaagggggatgccatgggtcgagtggacgaggagccgacaaccttaccctcaggagaagcaaaacctcggaagacactcaaagagaagaaggaaaggagaactccttcagacgatgaagaggataacttattcgcaccccccaagctgaccgacgaggacttctcgccatttggctctggaggtggcctgttcagtggcggcaaggggctatttgatgatgaggacgaggagagtgacctcttcacggaagcctcccaggatcggcaagctggagcctctgttaaggaggagtcttcatcatccaaacctggaaagaaaatcccagcaggagctgtttctgtatttttaggagacacggatgtgtttggtgctgcctccgttccatcactgaaggagccacagaagcctgagcagcccactccaaggaaaagcccctatggtccccctcccactggcctctttgatgatgatgatggtgatgatgatgacgactttttctcggcaccccacagcaaaccttctaaaacacgcaaagtccaatccactgccgatatctttggtgacgaagaaggagatctgttcaaagaaaaagccgtagcatcgccagaagccactgtgagtcagacagatgaaaataaagcaagagcagaaaaaaaggttaccttatcttacagcaaaaatctcaagccctcatcagaaacaaagactcaaaaaggcttattttcagatgaggaggactctgaggatttgttttcttctcaaagtgcgagtaacttaaaaggtgcatctctgctgcctggcaagctccccacgtcggtttccctgtttgatgatgaagatgaagaggataatctttttgggggtacagctgctaagaagcagacattgtctctacaagctcagagagaagagaaagcaaaagcctccgagctctccaaaaagaaagcatctgccctgttgttcagcagtgatgaggaggaccagtggaatattcctgcttcacagacccacttagcatctgacagcaggtctaaaggagaacccagggattctgggaccctccagagccaggaggccaaggctgtgaaaaagaccagtctctttgaggaagacaaagaagatgatctttttgccattgccaaggacagccaaaagaagacccagagagtgtcactcctctttgaagacgatgttgatagcggaggctctctgtttggctctcctcccacatctgttcctcctgcaacaaagaaaaaagagactgtctctgaggcaccacctttgctgttcagcgatgaagaagagaaggaggcacaacttggagtgaagtctgtggataagaaggttgagagtgccaaggagtcattaaaatttgggagaactgatgtggctgagtcagaaaaggaaggacttttgactagatctgctcaggaaacagtcaagcattctgatttattttcttcatcatccccatgggacaaaggaaccaagcctagaaccaaaactgttcttagcttgtttgatgaggaagaggataaaatggaagatcaaaacattatccaggctccacagaaagaagtaggaaagggctgcgatcctgatgcccaccccaagagcacaggtgtcttccaggatgaagagctgcttttcagccacaagctccaaaaggacaatgacccagatgttgacctttttgctggcaccaaaaaaaccaagctgttagagccaagtgttgggagcctgtttggggatgatgaagatgatgatcttttcagctctgccaagtcccagcctttggtacaagagaaaaagagagtagtgaaaaaagaccactctgttaactctttcaaaaaccagaaacatcctgaatccattcaaggtagtaaagaaaaaggcatatggaagccggaaacacctcaggactcatcaggtctcgctccatttaaaaccaaagaaccatccactcggatcgggaagatacaagcaaatttagcgatcaacccagcggccttgctgcccacagcggcttcccagatctctgaagtaaagcctgttttgccagaattggcttttccttcatctgaacacagaaggagccacggtctggaaagtgtgcctgtccttcccgggagtggggaggccggtgtgagttttgatcttccagctcaggcagacaccttacacagtgcaaacaagagccgtgtcaagatgagagggaagcgtagaccgcagacccgtgcagctaggcggctggctgctcaggagtccagcgaggctgaggacatgagcgtccccagaggacccattgcacagtgggctgatggcgccatttccccaaatggccatcggccacagctcagagcagccagtggagaagacagcactgaggaggccctggcagctgccgctgcaccttgggaaggtggtcctgtgcctggagtggacacaagcccctttgcaaagtctctgggtcattccagaggggaggctgacctttttgattctggggacattttttccacgggcactggatctcagtccgtggagagaacaaaacccaaggcaaagatagcagagaatcctgccaacccaccagtgggtggtaaagcaaagagccccatgtttcctgctctaggcgaggccagcagtgatgatgatctctttcagtctgctaaaccaaaaccagcaaagaaaacaaatccctttcctctcctggaagatgaggatgacctctttacagatcagaaagtcaagaagaatgagacaaaatccagtagtcagcaggatgtcatattaacaacacaagatatttttgaggatgatatatttgctacggaagcaattaaaccctctcagaaaaccagagagaaggagaaaacattggaatctaatttatttgatgataacattgatatctttgctgacttaactgtaaaaccaaaagaaaagtccaaaaagaaagtggaagccaagtctatatttgatgatgatatggatgacatcttctccactggtatccaggctaagacaaccaaaccaaaaagccgatctgcacaggccgcacctgaaccaagatttgaacacaaggtgtccaacatctttgatgatcccctgaatgcctttggaggccagtagagcacacagggtatccacatgttaccctgcagctacattgttgagttagtgatgatattgtatatgctcatggtcttaactggattacaaaaagcaaatactagaacagctagctcatcttttacccaatgtacttagtatttttctgcactggtttaatcatgcttaatactacaaaacaaaaataaatatttcacagtggttggtttgttttgtttttaaaccacagtttgatttagttagccttgctggggccataatatgcttcagggtgtgtaaaagaagaaatctctttgtggctttcatgggcagggaatctcagagatagcaaatgccacctgaccagaagtctttgttatatggatgggaaccctaacttagggcttgggcaggggaaagagaaagaagatgagagattatacttcatgagtcttagcaatatgggagcaggttttcactgaattctgagggtgcctctgcatgtcctccaaggcaaagtttggcaaactgtggcccccccactgtcatattttgttaataaaattttattggaacacaatcaca

SEQ ID NO: 6677 - protein, 1341 aa, Homo sapiens
MMNRTTPDQELVPASEPVWERPWSVEEIRRSSQSWSLAADAGLLQFLQEFSQQTISRTHEIKKQVDGLIRETKATDCRLHNVFNDFLMLSNTQFIENRVYDEEVEEPVLKAEAEKTEQEKTREQKEVDLIPKVQEAVNYGLQVLDSAFEQLDIKAGNSDSEEDDANGRVELILEPKDLYIDRPLPYLIGSKLFMEQEDVGLGELSSEEGSVGSDRGSIVDTEEEKEEEESDEDFAHHSDNEQNQHTTQMSDEEEDDDGCDLFADSEKEEEDIEDIEENTRPKRSRPTSFADELAARIKGDAMGRVDEEPTTLPSGEAKPRKTLKEKKERRTPSDDEEDNLFAPPKLTDEDFSPFGSGGGLFSGGKGLFDDEDEESDLFTEASQDRQAGASVKEESSSSKPGKKIPAGAVSVFLGDTDVFGAASVPSLKEPQKPEQPTPRKSPYGPPPTGLFDDDDGDDDDDFFSAPHSKPSKTRKVQSTADIFGDEEGDLFKEKAVASPEATVSQTDENKARAEKKVTLSYSKNLKPSSETKTQKGLFSDEEDSEDLFSSQSASNLKGASLLPGKLPTSVSLFDDEDEEDNLFGGTAAKKQTLSLQAQREEKAKASELSKKKASALLFSSDEEDQWNIPASQTHLASDSRSKGEPRDSGTLQSQEAKAVKKTSLFEEDKEDDLFAIAKDSQKKTQRVSLLFEDDVDSGGSLFGSPPTSVPPATKKKETVSEAPPLLFSDEEEKEAQLGVKSVDKKVESAKESLKFGRTDVAESEKEGLLTRSAQETVKHSDLFSSSSPWDKGTKPRTKTVLSLFDEEEDKMEDQNIIQAPQKEVGKGCDPDAHPKSTGVFQDEELLFSHKLQKDNDPDVDLFAGTKKTKLLEPSVGSLFGDDEDDDLFSSAKSQPLVQEKKRVVKKDHSVNSFKNQKHPESIQGSKEKGIWKPETPQDSSGLAPFKTKEPSTRIGKIQANLAINPAALLPTAASQISEVKPVLPELAFPSSEHRRSHGLESVPVLPGSGEAGVSFDLPAQADTLHSANKSRVKMRGKRRPQTRAARRLAAQESSEAEDMSVPRGPIAQWADGAISPNGHRPQLRAASGEDSTEEALAAAAAPWEGGPVPGVDTSPFAKSLGHSRGEADLFDSGDIFSTGTGSQSVERTKPKAKIAENPANPPVGGKAKSPMFPALGEASSDDDLFQSAKPKPAKKTNPFPLLEDEDDLFTDQKVKKNETKSSSQQDVILTTQDIFEDDIFATEAIKPSQKTREKEKTLESNLFDDNIDIFADLTVKPKEKSKKKVEAKSIFDDDMDDIFSTGIQAKTTKPKSRSAQAAPEPRFEHKVSNIFDDPLNAFGGQ

SEQ ID NO: 6678 - DNA, 4852 bp, Homo sapiens
acgccccgggcagcttggctggggctaggcttccggggctctgcggtcctcggcctgtgctggcagcctcggagcccaccgagccgggcggctgggatgatgaaccggacgacccccgaccaggagctggtgccggcgtcggagcccgtgtgggagcggccgtggtcggtggaggagatccgcaggagcagccagagctggtcgctggcggccgacgcgggcctactacagtttctacaggaattctcacagcaaactatctctaggacccatgaaatcaagaaacaagtggacggactaatccgggaaaccaaagccacagattgtcgcctgcataatgtcttcaatgacttccttatgctctctaatacccagttcatagagaatcgtgtatatgatgaagaagtggaggagccagtactcaaggctgaggcagaaaaaacagagcaggagaagacacgagagcagaaagaagtagatctcattcctaaagtccaggaggctgtgaactatggcttacaagtattggacagtgcctttgagcaacttgatatcaaagcaggaaactcagactccgaggaagatgatgctaatgggcgggtggaactgatccttgaaccaaagagtttcactcttgttgcccaagctggagtggcgcaatctcggctcactgcagcttctgtctcctgggttcaagcgattctcctgcctcagccttccaagtagctgggattacaggatctatacattgatcgtcctttaccatatctcattgggtcaaagctgttcatggaacaagaagatgtaggtcttggagagctgtccagtgaagaaggctctgtaggcagtgatcgtggcagtattgtggacactgaggaagagaaagaagaggaggagtcagatgaagattttgcccatcacagtgacaatgaacaaaaccagcacaccacacaaatgagtgatgaggaagaggatgatgatggctgtgacctttttgctgactctgagaaggaggaggaagatattgaggacattgaagaaaatactagacctaaaagaagcagacctacatcgtttgcagatgagctggctgcccgcatcaagggggatgccatgggtcgagtggacgaggagccgacaaccttaccctcaggagaagcaaaacctcggaagacactcaaagagaagaaggaaaggagaactccttcagacgatgaagaggataacttattcgcaccccccaagctgaccgacgaggacttctcgccatttggctctggaggtggcctgttcagtggcggcaaggggctatttgatgatgaggacgaggagagtgacctcttcacggaagcctcccaggatcggcaagctggagcctctgttaaggaggagtcttcatcatccaaacctggaaagaaaatcccagcaggagctgtttctgtatttttaggagacacggatgtgtttggtgctgcctccgttccatcactgaaggagccacagaagcctgagcagcccactccaaggaaaagcccctatggtccccctcccactggcctctttgatgatgatgatggtgatgatgatgacgactttttctcggcaccccacagcaaaccttctaaaacacgcaaagtccaatccactgccgatatctttggtgacgaagaaggagatctgttcaaagaaaaagccgtagcatcgccagaagccactgtgagtcagacagatgaaaataaagcaagagcagaaaaaaaggttaccttatcttacagcaaaaatctcaagccctcatcagaaacaaagactcaaaaaggcttattttcagatgaggaggactctgaggatttgttttcttctcaaagtgcgagtaacttaaaaggtgcatctctgctgcctggcaagctccccacgtcggtttccctgtttgatgatgaagatgaagaggataatctttttgggggtacagctgctaagaagcagacattgtctctacaagctcagagagaagagaaagcaaaagcctccgagctctccaaaaagaaagcatctgccctgttgttcagcagtgatgaggaggaccagtggaatattcctgcttcacagacccacttagcatctgacagcaggtctaaaggagaacccagggattctgggaccctccagagccaggaggccaaggctgtgaaaaagaccagtctctttgaggaagacaaagaagatgatctttttgccattgccaaggacagatacatcctacctcctattgttcccgaagttgtctgtcaagttttgtgtatggaaagtaattcataccttcatcagatctcaaaagaagctttacacacacaagaagaagttgagccaaaagaagacccagagagtgtcactcctctttgaagacgatgttgatagcggaggctctctgtttggctctcctcccacatctgttcctcctgcaacaaagaaaaaagagactgtctctgaggcaccacctttgctgttcagcgatgaagaagagaaggaggcacaacttggagtgaagtctgtggataagaaggttgagagtgccaaggagtcattaaaatttgggagaactgatgtggctgagtcagaaaaggaaggacttttgactagatctgctcaggaaacagtcaagcattctgatttattttcttcatcatccccatgggacaaaggaaccaagcctagaaccaaaactgttcttagcttgtttgatgaggaagaggataaaatggaagatcaaaacattatccaggctccacagaaagaagtaggaaagggctgcgatcctgatgcccaccccaagagcacaggtgtcttccaggatgaagagctgcttttcagccacaagctccaaaaggacaatgacccagatgttgacctttttgctggcaccaaaaaaaccaagctgttagagccaagtgttgggagcctgtttggggatgatgaagatgatgatcttttcagctctgccaagtcccagcctttggtacaagagaaaaagagagtagtgaaaaaagaccactctgttaactctttcaaaaaccagaaacatcctgaatccattcaaggtagtaaagaaaaaggcatatggaagccggaaacacctcaggcaaatttagcgatcaacccagcggccttgctgcccacagcggcttcccagatctctgaagtaaagcctgttttgccagaattggcttttccttcatctgaacacagaaggagccacggtctggaaagtgtgcctgtccttcccgggagtggggaggccggtgtgagttttgatcttccagctcaggcagacaccttacacagtgcaaacaagagccgtgtcaagatgagagggaagcgtagaccgcagacccgtgcagctaggcggctggctgctcaggagtccagcgaggctgaggacatgagcgtccccagaggacccattgcacagtgggctgatggcgccatttccccaaatggccatcggccacagctcagagcagccagtggagaagacagcactgaggaggccctggcagctgccgctgcaccttgggaaggtggtcctgtgcctggagtggacacaagcccctttgcaaagtctctgggtcattccagaggggaggctgacctttttgattctggggacattttttccacgggcactggatctcagtccgtggagagaacaaaacccaaggcaaagatagcagagaatcctgccaacccaccagtgggtggtaaagcaaagagccccatgtttcctgctctaggcgaggccagcagtgatgatgatctctttcagtctgctaaaccaaaaccagcaaagaaaacaaatccctttcctctcctggaagatgaggatgacctctttacagatcagaaagtcaagaagaatgagacaaaatccagtagtcagcaggatgtcatattaacaacacaagatatttttgaggatgatatatttgctacggaagcaattaaaccctctcagaaaaccagagagaaggagaaaacattggaatctaatttatttgatgataacattgatatctttgctgacttaactgtaaaaccaaaagaaaagtccaaaaagaaagtggaagccaagtctatatttgatgatgatatggatgacatcttctccactggtatccaggctaagacaaccaaaccaaaaagccgatctgcacaggccgcacctgaaccaagatttgaacacaaggtgtccaacatctttgatgatcccctgaatgcctttggaggccagtagagcacacagggtatccacatgttaccctgcagctacattgttgagttagtgatgatattgtatatgctcatggtcttaactggattacaaaaagcaaatactagaacagctagctcatcttttacccaatgtacttagtatttttctgcactggtttaatcatgcttaatactacaaaacaaaaataaatatttcacagtggttggtttgttttgtttttaaaccacagtttgatttagttagccttgctggggccataatatgcttcagggtgtgtaaaagaagaaatctctttgtggctttcatgggcagggaatctcagagatagcaaatgccacctgaccagaagtctttgttatatggatgggaaccctaacttagggcttgggcaggggaaagagaaagaagatgagagattatacttcatgagtcttagcaatatgggagcaggttttcactgaattctgagggtgcctctgcatgtcctccaaggcaaagtttggcaaactgtggcccccccactgtcatattttgttaataaaattttattggaacacaatcaca

SEQ ID NO: 6679 - protein, 688 aa, Homo sapiens; identical to SEQ ID NO: 6613

SEQ ID NO: 6680 - DNA, 4738 bp, Homo sapiens
acgccccgggcagcttggctggggctaggcttccggggctctgcggtcctcggcctgtgctggcagcctcggagcccaccgagccgggcggctgggatgatgaaccggacgacccccgaccaggagctggtgccggcgtcggagcccgtgtgggagcggccgtggtcggtggaggagatccgcaggagcagccagagctggtcgctggcggccgacgcgggcctactacagtttctacaggaattctcacagcaaactatctctaggacccatgaaatcaagaaacaagtggacggactaatccgggaaaccaaagccacagattgtcgcctgcataatgtcttcaatgacttccttatgctctctaatacccagttcatagagaatcgtgtatatgatgaagaagtggaggagccagtactcaaggctgaggcagaaaaaacagagcaggagaagacacgagagcagaaagaagtagatctcattcctaaagtccaggaggctgtgaactatggcttacaagtattggacagtgcctttgagcaacttgatatcaaagcaggaaactcagactccgaggaagatgatgctaatgggcgggtggaactgatccttgaaccaaaggatctatacattgatcgtcctttaccatatctcattgggtcaaagctgttcatggaacaagaagatgtaggtcttggagagctgtccagtgaagaaggctctgtaggcagtgatcgtggcagtattgtggacactgaggaagagaaagaagaggaggagtcagatgaagattttgcccatcacagtgacaatgaacaaaaccagcacaccacacaaatgagtgatgaggaagaggatgatgatggctgtgacctttttgctgactctgagaaggaggaggaagatattgaggacattgaagaaaatactagacctaaaagaagcagacctacatcgtttgcagatgagctggctgcccgcatcaagggggatgccatgggtcgagtggacgaggagccgacaaccttaccctcaggagaagcaaaacctcggaagacactcaaagagaagaaggaaaggagaactccttcagacgatgaagaggataacttattcgcaccccccaagctgaccgacgaggacttctcgccatttggctctggaggtggcctgttcagtggcggcaaggggctatttgatgatgaggacgaggagagtgacctcttcacggaagcctcccaggatcggcaagctggagcctctgttaaggaggagtcttcatcatccaaacctggaaagaaaatcccagcaggagctgtttctgtatttttaggagacacggatgtgtttggtgctgcctccgttccatcactgaaggagccacagaagcctgagcagcccactccaaggaaaagcccctatggtccccctcccactggcctctttgatgatgatgatggtgatgatgatgacgactttttctcggcaccccacagcaaaccttctaaaacacgcaaagtccaatccactgccgatatctttggtgacgaagaaggagatctgttcaaagaaaaagccgtagcatcgccagaagccactgtgagtcagacagatgaaaataaagcaagagcagaaaaaaaggttaccttatcttacagcaaaaatctcaagccctcatcagaaacaaagactcaaaaaggcttattttcagatgaggaggactctgaggatttgttttcttctcaaagtgcgagtaacttaaaaggtgcatctctgctgcctggcaagctccccacgtcggtttccctgtttgatgatgaagatgaagaggataatctttttgggggtacagctgctaagaagcagacattgtctctacaagctcagagagaagagaaagcaaaagcctccgagctctccaaaaagaaagcatctgccctgttgttcagcagtgatgaggaggaccagtggaatattcctgcttcacagacccacttagcatctgacagcaggtctaaaggagaacccagggattctgggaccctccagagccaggaggccaaggctgtgaaaaagaccagtctctttgaggaagacaaagaagatgatctttttgccattgccaaggacagatacatcctacctcctattgttcccgaagttgtctgtcaagttttgtgtatggaaagtaattcataccttcatcagatctcaaaagaagctttacacacacaagaagaagttgagccaaaagaagacccagagagtgtcactcctctttgaagacgatgttgatagcggaggctctctgtttggctctcctcccacatctgttcctcctgcaacaaagaaaaaagagactgtctctgaggcaccacctttgctgttcagcgatgaagaagagaaggaggcacaacttggagtgaagtctgtggataagaaggttgagagtgccaaggagtcattaaaatttgggagaactgatgtggctgagtcagaaaaggaaggacttttgactagatctgctcaggaaacagtcaagcattctgatttattttcttcatcatccccatgggacaaaggaaccaagcctagaaccaaaactgttcttagcttgtttgatgaggaagaggataaaatggaagatcaaaacattatccaggctccacagaaagaagtaggaaagggctgcgatcctgatgcccaccccaagagcacaggtgtcttccaggatgaagagctgcttttcagccacaagctccaaaaggacaatgacccagatgttgacctttttgctggcaccaaaaaaaccaagctgttagagccaagtgttgggagcctgtttggggatgatgaagatgatgatcttttcagctctgccaagtcccagcctttggtacaagagaaaaagagagtagtgaaaaaagaccactctgttaactctttcaaaaaccagaaacatcctgaatccattcaaggtagtaaagaaaaaggcatatggaagccggaaacacctcaggcaaatttagcgatcaacccagcggccttgctgcccacagcggcttcccagatctctgaagtaaagcctgttttgccagaattggcttttccttcatctgaacacagaaggagccacggtctggaaagtgtgcctgtccttcccgggagtggggaggccggtgtgagttttgatcttccagctcaggcagacaccttacacagtgcaaacaagagccgtgtcaagatgagagggaagcgtagaccgcagacccgtgcagctaggcggctggctgctcaggagtccagcgaggctgaggacatgagcgtccccagaggacccattgcacagtgggctgatggcgccatttccccaaatggccatcggccacagctcagagcagccagtggagaagacagcactgaggaggccctggcagctgccgctgcaccttgggaaggtggtcctgtgcctggagtggacacaagcccctttgcaaagtctctgggtcattccagaggggaggctgacctttttgattctggggacattttttccacgggcactggatctcagtccgtggagagaacaaaacccaaggcaaagatagcagagaatcctgccaacccaccagtgggtggtaaagcaaagagccccatgtttcctgctctaggcgaggccagcagtgatgatgatctctttcagtctgctaaaccaaaaccagcaaagaaaacaaatccctttcctctcctggaagatgaggatgacctctttacagatcagaaagtcaagaagaatgagacaaaatccagtagtcagcaggatgtcatattaacaacacaagatatttttgaggatgatatatttgctacggaagcaattaaaccctctcagaaaaccagagagaaggagaaaacattggaatctaatttatttgatgataacattgatatctttgctgacttaactgtaaaaccaaaagaaaagtccaaaaagaaagtggaagccaagtctatatttgatgatgatatggatgacatcttctccactggtatccaggctaagacaaccaaaccaaaaagccgatctgcacaggccgcacctgaaccaagatttgaacacaaggtgtccaacatctttgatgatcccctgaatgcctttggaggccagtagagcacacagggtatccacatgttaccctgcagctacattgttgagttagtgatgatattgtatatgctcatggtcttaactggattacaaaaagcaaatactagaacagctagctcatcttttacccaatgtacttagtatttttctgcactggtttaatcatgcttaatactacaaaacaaaaataaatatttcacagtggttggtttgttttgtttttaaaccacagtttgatttagttagccttgctggggccataatatgcttcagggtgtgtaaaagaagaaatctctttgtggctttcatgggcagggaatctcagagatagcaaatgccacctgaccagaagtctttgttatatggatgggaaccctaacttagggcttgggcaggggaaagagaaagaagatgagagattatacttcatgagtcttagcaatatgggagcaggttttcactgaattctgagggtgcctctgcatgtcctccaaggcaaagtttggcaaactgtggcccccccactgtcatattttgttaataaaattttattggaacacaatcaca

SEQ ID NO: 6681 - protein, 729 aa, Homo sapiens; identical to SEQ ID NO: 6635

SEQ ID NO: 6682 - DNA, 4714 bp, Homo sapiens
acgccccgggcagcttggctggggctaggcttccggggctctgcggtcctcggcctgtgctggcagcctcggagcccaccgagccgggcggctgggatgatgaaccggacgacccccgaccaggagctggtgccggcgtcggagcccgtgtgggagcggccgtggtcggtggaggagatccgcaggagcagccagagctggtcgctggcggccgacgcgggcctactacagtttctacaggaattctcacagcaaactatctctaggacccatgaaatcaagaaacaagtggacggactaatccgggaaaccaaagccacagattgtcgcctgcataatgtcttcaatgacttccttatgctctctaatacccagttcatagagaatcgtgtatatgatgaagaagtggaggagccagtactcaaggctgaggcagaaaaaacagagcaggagaagacacgagagcagaaagaagtagatctcattcctaaagtccaggaggctgtgaactatggcttacaagtattggacagtgcctttgagcaacttgatatcaaagcaggaaactcagactccgaggaagatgatgctaatgggcgggtggaactgatccttgaaccaaaggatctatacattgatcgtcctttaccatatctcattgggtcaaagctgttcatggaacaagaagatgtaggtcttggagagctgtccagtgaagaaggctctgtaggcagtgatcgtggcagtattgtggacactgaggaagagaaagaagaggaggagtcagatgaagattttgcccatcacagtgacaatgaacaaaaccagcacaccacacaaatgagtgatgaggaagaggatgatgatggctgtgacctttttgctgactctgagaaggaggaggaagatattgaggacattgaagaaaatactagacctaaaagaagcagacctacatcgtttgcagatgagctggctgcccgcatcaagggggatgccatgggtcgagtggacgaggagccgacaaccttaccctcaggagaagcaaaacctcggaagacactcaaagagaagaaggaaaggagaactccttcagacgatgaagaggataacttattcgcaccccccaagctgaccgacgaggacttctcgccatttggctctggaggtggcctgttcagtggcggcaaggggctatttgatgatgaggacgaggagagtgacctcttcacggaagcctcccaggatcggcaagctggagcctctgttaaggaggagtcttcatcatccaaacctggaaagaaaatcccagcaggagctgtttctgtatttttaggagacacggatgtgtttggtgctgcctccgttccatcactgaaggagccacagaagcctgagcagcccactccaaggaaaagcccctatggtccccctcccactggcctctttgatgatgatgatggtgatgatgatgacgactttttctcggcaccccacagcaaaccttctaaaacacgcaaagtccaatccactgccgatatctttggtgacgaagaaggagatctgttcaaagaaaaagccgtagcatcgccagaagccactgtgagtcagacagatgaaaataaagcaagagcagaaaaaaaggatttgttttcttctcaaagtgcgagtaacttaaaaggtgcatctctgctgcctggcaagctccccacgtcggtttccctgtttgatgatgaagatgaagaggataatctttttgggggtacagctgctaagaagcagacattgtctctacaagctcagagagaagagaaagcaaaagcctccgagctctccaaaaagaaagcatctgccctgttgttcagcagtgatgaggaggaccagtggaatattcctgcttcacagacccacttagcatctgacagcaggtctaaaggagaacccagggattctgggaccctccagagccaggaggccaaggctgtgaaaaagaccagtctctttgaggaagacaaagaagatgatctttttgccattgccaaggacagatacatcctacctcctattgttcccgaagttgtctgtcaagttttgtgtatggaaagtaattcataccttcatcagatctcaaaagaagctttacacacacaagaagaagttgagccaaaagaagacccagagagtgtcactcctctttgaagacgatgttgatagcggaggctctctgtttggctctcctcccacatctgttcctcctgcaacaaagaaaaaagagactgtctctgaggcaccacctttgctgttcagcgatgaagaagagaaggaggcacaacttggagtgaagtctgtggataagaaggttgagagtgccaaggagtcattaaaatttgggagaactgatgtggctgagtcagaaaaggaaggacttttgactagatctgctcaggaaacagtcaagcattctgatttattttcttcatcatccccatgggacaaaggaaccaagcctagaaccaaaactgttcttagcttgtttgatgaggaagaggataaaatggaagatcaaaacattatccaggctccacagaaagaagtaggaaagggctgcgatcctgatgcccaccccaagagcacaggtgtcttccaggatgaagagctgcttttcagccacaagctccaaaaggacaatgacccagatgttgacctttttgctggcaccaaaaaaaccaagctgttagagccaagtgttgggagcctgtttggggatgatgaagatgatgatcttttcagctctgccaagtcccagcctttggtacaagagaaaaagagagtagtgaaaaaagaccactctgttaactctttcaaaaaccagaaacatcctgaatccattcaaggtagtaaagaaaaaggcatatggaagccggaaacacctcaggactcatcaggtctcgctccatttaaaaccaaagaaccatccactcggatcgggaagatacaagcaaatttagcgatcaacccagcggccttgctgcccacagcggcttcccagatctctgaagtaaagcctgttttgccagaattggcttttccttcatctgaacacagaaggagccacggtctggaaagtgtgcctgtccttcccgggagtggggaggccggtgtgagttttgatcttccagctcaggcagacaccttacacagtgcaaacaagagccgtgtcaagatgagagggaagcgtagaccgcagacccgtgcagctaggcggctggctgctcaggagtccagcgaggctgaggacatgagcgtccccagaggacccattgcacagtgggctgatggcgccatttccccaaatggccatcggccacagctcagagcagccagtggagaagacagcactgaggaggccctggcagctgccgctgcaccttgggaaggtggtcctgtgcctggagtggacacaagcccctttgcaaagtctctgggtcattccagaggggaggctgacctttttgattctggggacattttttccacgggcactggatctcagtccgtggagagaacaaaacccaaggcaaagatagcagagaatcctgccaacccaccagtgggtggtaaagcaaagagccccatgtttcctgctctaggcgaggccagcagtgatgatgatctctttcagtctgctaaaccaaaaccagcaaagaaaacaaatccctttcctctcctggaagatgaggatgacctctttacagatcagaaagtcaagaagaatgagacaaaatccagtagtcagcaggatgtcatattaacaacacaagatatttttgaggatgatatatttgctacggaagcaattaaaccctctcagaaaaccagagagaaggagaaaacattggaatctaatttatttgatgataacattgatatctttgctgacttaactgtaaaaccaaaagaaaagtccaaaaagaaagtggaagccaagtctatatttgatgatgatatggatgacatcttctccactggtatccaggctaagacaaccaaaccaaaaagccgatctgcacaggccgcacctgaaccaagatttgaacacaaggtgtccaacatctttgatgatcccctgaatgcctttggaggccagtagagcacacagggtatccacatgttaccctgcagctacattgttgagttagtgatgatattgtatatgctcatggtcttaactggattacaaaaagcaaatactagaacagctagctcatcttttacccaatgtacttagtatttttctgcactggtttaatcatgcttaatactacaaaacaaaaataaatatttcacagtggttggtttgttttgtttttaaaccacagtttgatttagttagccttgctggggccataatatgcttcagggtgtgtaaaagaagaaatctctttgtggctttcatgggcagggaatctcagagatagcaaatgccacctgaccagaagtctttgttatatggatgggaaccctaacttagggcttgggcaggggaaagagaaagaagatgagagattatacttcatgagtcttagcaatatgggagcaggttttcactgaattctgagggtgcctctgcatgtcctccaaggcaaagtttggcaaactgtggcccccccactgtcatattttgttaataaaattttattggaacacaatcaca

SEQ ID NO: 6683 - protein, 709 aa, Homo sapiens; identical to SEQ ID NO: 6611

SEQ ID NO: 6684 - DNA, 4189 bp, Homo sapiens
acgccccgggcagcttggctggggctaggcttccggggctctgcggtcctcggcctgtgctggcagcctcggagcccaccgagccgggcggctgggatgatgaaccggacgacccccgaccaggagctggtgccggcgtcggagcccgtgtgggagcggccgtggtcggtggaggagatccgcaggagcagccagagctggtcgctggcggccgacgcgggcctactacagtttctacaggaattctcacagcaaactatctctaggacccatgaaatcaagaaacaagtggacggactaatccgggaaaccaaagccacagattgtcgcctgcataatgtcttcaatgacttccttatgctctctaatacccagttcatagagaatcgtgtatatgatgaagaagtggaggagccagtactcaaggctgaggcagaaaaaacagagcaggagaagacacgagagcagaaagaagtagatctcattcctaaagtccaggaggctgtgaactatggcttacaagtattggacagtgcctttgagcaacttgatatcaaagcaggaaactcagactccgaggaagatgatgctaatgggcgggtggaactgatccttgaaccaaaggatctatacattgatcgtcctttaccatatctcattgggtcaaagctgttcatggaacaagaagatgtaggtcttggagagctgtccagtgaagaaggctctgtaggcagtgatcgtggcagtattgtggacactgaggaagagaaagaagaggaggagtcagatgaagattttgcccatcacagtgacaatgaacaaaaccagaaaagaagcagacctacatcgtttgcagatgagctggctgcccgcatcaagggggatgccatgggtcgagtggacgaggagccgacaaccttaccctcaggagaagcaaaacctcggaagacactcaaagagaagaaggaaaggagaactccttcagacgatgaagaggataacttattcgcaccccccaagctgaccgacgaggacttctcgccatttggctctggaggtggcctgttcagtggcggcaaggggctatttgatgatgaggacgaggagagtgacctcttcacggaagcctcccaggatcggcaagctggagcctctgttaaggaggagtcttcatcatccaaacctggaaagaaaatcccagcaggagctgtttctgtatttttaggagacacggatgtgtttggtgctgcctccgttccatcactgaaggagccacagaagcctgagcagcccactccaaggaaaagcccctatggtccccctcccactggcctctttgatgatgatgatggtgatgatgatgacgactttttctcggcaccccacagcaaaccttctaaaacacgcaaagtccaatccactgccgatatctttggtgacgaagaaggagatctgttcaaagaaaaagccgtagcatcgccagaagccactgtgagtcagacagatgaaaataaagcaagagcagaaaaaaaggttaccttatcttacagcaaaaatctcaagccctcatcagaaacaaagactcaaaaaggcttattttcagatgaggaggactctgaggatttgttttcttctcaaagtgcgagtaacttaaaaggtgcatctctgctgcctggcaagctccccacgtcggtttccctgtttgatgatgaagatgaagaggataatctttttgggggtacagctgctaagaagcagacattgtctctacaagctcagagagaagagaaagcaaaagcctccgagctctccaaaaagaaagcatctgccctgttgttcagcagtgatgaggagccaaaagaagacccagagagtgtcactcctctttgaagacgatgttgatagcggaggctctctgtttggctctcctcccacatctgttcctcctgcaacaaaggaaggacttttgactagatctgctcaggaaacagtcaagcattctgatttattttcttcatcatccccatgggacaaaggaaccaagcctagaaccaaaactgttcttagcttgtttgatgaggaagaggataaaatggaagatcaaaacattatccaggctccacagaaagaagtaggaaagggctgcgatcctgatgcccaccccaagagcacaggtgtcttccaggatgaagagctgcttttcagccacaagctccaaaaggacaatgacccagatgttgacctttttgctggcaccaaaaaaaccaagctgttagagccaagtgttgggagcctgtttggggatgatgaagatgatgatcttttcagctctgccaagtcccagcctttggtacaagagaaaaagagagtagtgaaaaaagaccactctgttaactctttcaaaaaccagaaacatcctgaatccattcaaggtagtaaagaaaaaggcatatggaagccggaaacacctcaggcaaatttagcgatcaacccagcggccttgctgcccacagcggcttcccagatctctgaagtaaagcctgttttgccagaattggcttttccttcatctgaacacagaaggagccacggtctggaaagtgtgcctgtccttcccgggagtggggaggccggtgtgagttttgatcttccagctcaggcagacaccttacacagtgcaaacaagagccgtgtcaagatgagagggaagcgtagaccgcagacccgtgcagctaggcggctggctgctcaggagtccagcgaggctgaggacatgagcgtccccagaggacccattgcacagtgggctgatggcgccatttccccaaatggccatcggccacagctcagagcagccagtggagaagacagcactgaggaggccctggcagctgccgctgcaccttgggaaggtggtcctgtgcctggagtggacacaagcccctttgcaaagtctctgggtcattccagaggggaggctgacctttttgattctggggacattttttccacgggcactggatctcagtccgtggagagaacaaaacccaaggcaaagatagcagagaatcctgccaacccaccagtgggtggtaaagcaaagagccccatgtttcctgctctaggcgaggccagcagtgatgatgatctctttcagtctgctaaaccaaaaccagcaaagaaaacaaatccctttcctctcctggaagatgaggatgacctctttacagatcagaaagtcaagaagaatgagacaaaatccagtagtcagcaggatgtcatattaacaacacaagatatttttgaggatgatatatttgctacggaagcaattaaaccctctcagaaaaccagagagaaggagaaaacattggaatctaatttatttgatgataacattgatatctttgctgacttaactgtaaaaccaaaagaaaagtccaaaaagaaagtggaagccaagtctatatttgatgatgatatggatgacatcttctccactggtatccaggctaagacaaccaaaccaaaaagccgatctgcacaggccgcacctgaaccaagatttgaacacaaggtgtccaacatctttgatgatcccctgaatgcctttggaggccagtagagcacacagggtatccacatgttaccctgcagctacattgttgagttagtgatgatattgtatatgctcatggtcttaactggattacaaaaagcaaatactagaacagctagctcatcttttacccaatgtacttagtatttttctgcactggtttaatcatgcttaatactacaaaacaaaaataaatatttcacagtggttggtttgttttgtttttaaaccacagtttgatttagttagccttgctggggccataatatgcttcagggtgtgtaaaagaagaaatctctttgtggctttcatgggcagggaatctcagagatagcaaatgccacctgaccagaagtctttgttatatggatgggaaccctaacttagggcttgggcaggggaaagagaaagaagatgagagattatacttcatgagtcttagcaatatgggagcaggttttcactgaattctgagggtgcctctgcatgtcctccaaggcaaagtttggcaaactgtggcccccccactgtcatattttgttaataaaattttattggaacacaatcaca

SEQ ID NO: 6685 - protein, 639 aa, Homo sapiens; identical to SEQ ID NO: 6629

SEQ ID NO: 6686 - DNA, 4536 bp, Homo sapiens
acgccccgggcagcttggctggggctaggcttccggggctctgcggtcctcggcctgtgctggcagcctcggagcccaccgagccgggcggctgggatgatgaaccggacgacccccgaccaggagctggtgccggcgtcggagcccgtgtgggagcggccgtggtcggtggaggagatccgcaggagcagccagagctggtcgctggcggccgacgcgggcctactacagtttctacaggaattctcacagcaaactatctctaggacccatgaaatcaagaaacaagtggacggactaatccgggaaaccaaagccacagattgtcgcctgcataatgtcttcaatgacttccttatgctctctaatacccagttcatagagaatcgtgtatatgatgaagaagtggaggagccagtactcaaggctgaggcagaaaaaacagagcaggagaagacacgagagcagaaagaagtagatctcattcctaaagtccaggaggctgtgaactatggcttacaagtattggacagtgcctttgagcaacttgatatcaaagcaggaaactcagactccgaggaagatgatgctaatgggcgggtggaactgatccttgaaccaaaggatctatacattgatcgtcctttaccatatctcattgggtcaaagctgttcatggaacaagaagatgtaggtcttggagagctgtccagtgaagaaggctctgtaggcagtgatcgtggcagtattgtggacactgaggaagagaaagaagaggaggagtcagatgaagattttgcccatcacagtgacaatgaacaaaaccagcacaccacacaaatgagtgatgaggaagaggatgatgatggctgtgacctttttgctgactctgagaaggaggaggaagatattgaggacattgaagaaaatactagacctaaaagaagcagacctacatcgtttgcagatgagctggctgcccgcatcaagggggatgccatgggtcgagtggacgaggagccgacaaccttaccctcaggagaagcaaaacctcggaagacactcaaagagaagaaggaaaggagaactccttcagacgatgaagaggataacttattcgcaccccccaagctgaccgacgaggacttctcgccatttggctctggaggtggcctgttcagtggcggcaaggggctatttgatgatgaggacgaggagagtgacctcttcacggaagcctcccaggatcggcaagctggagcctctgttaaggaggagtcttcatcatccaaacctggaaagaaaatcccagcaggagctgtttctgtatttttaggagacacggatgtgtttggtgctgcctccgttccatcactgaaggagccacagaagcctgagcagcccactccaaggaaaagcccctatggtccccctcccactggcctctttgatgatgatgatggtgatgatgatgacgactttttctcggcaccccacagcaaaccttctaaaacacgcaaagtccaatccactgccgatatctttggtgacgaagaaggagatctgttcaaagaaaaagccgtagcatcgccagaagccactgtgagtcagacagatgaaaataaagcaagagcagaaaaaaaggatttgttttcttctcaaagtgcgagtaacttaaaaggtgcatctctgctgcctggcaagctccccacgtcggtttccctgtttgatgatgaagatgaagaggataatctttttgggggtacagctgctaagaagcagacattgtctctacaagctcagagagaagagaaagcaaaagcctccgagctctccaaaaagaaagcatctgccctgttgttcagcagtgatgaggaggaccagtggaatattcctgcttcacagacccacttagcatctgacagcaggtctaaaggagaacccagggattctgggaccctccagagccaggaggccaaggctgtgaaaaagaccagtctctttgaggaagacaaagaagatgatctttttgccattgccaaggacagccaaaagaagacccagagagtgtcactcctctttgaagacgatgttgatagcggaggctctctgtttggctctcctcccacatctgttcctcctgcaacaaagaaaaaagagactgtctctgaggcaccacctttgctgttcagcgatgaagaagagaaggaggcacaacttggagtgaagtctgtggataagaaggttgagagtgccaaggagtcattaaaatttgggagaactgatgtggctgagtcagaaaaggaaggacttttgactagatctgctcaggaaacagtcaagcattctgatttattttcttcatcatccccatgggacaaaggaaccaagcctagaaccaaaactgttcttagcttgtttgatgaggaagaggataaaatggaagatcaaaacattatccaggctccacagaaagaagtaggaaagggctgcgatcctgatgcccaccccaagagcacaggtgtcttccaggatgaagagctgcttttcagccacaagctccaaaaggacaatgacccagatgttgacctttttgctggcaccaaaaaaaccaagctgttagagccaagtgttgggagcctgtttggggatgatgaagatgatgatcttttcagctctgccaagtcccagcctttggtacaagagaaaaagagagtagtgaaaaaagaccactctgttaactctttcaaaaaccagaaacatcctgaatccattcaaggtagtaaagaaaaaggcatatggaagccggaaacacctcaggcaaatttagcgatcaacccagcggccttgctgcccacagcggcttcccagatctctgaagtaaagcctgttttgccagaattggcttttccttcatctgaacacagaaggagccacggtctggaaagtgtgcctgtccttcccgggagtggggaggccggtgtgagttttgatcttccagctcaggcagacaccttacacagtgcaaacaagagccgtgtcaagatgagagggaagcgtagaccgcagacccgtgcagctaggcggctggctgctcaggagtccagcgaggctgaggacatgagcgtccccagaggacccattgcacagtgggctgatggcgccatttccccaaatggccatcggccacagctcagagcagccagtggagaagacagcactgaggaggccctggcagctgccgctgcaccttgggaaggtggtcctgtgcctggagtggacacaagcccctttgcaaagtctctgggtcattccagaggggaggctgacctttttgattctggggacattttttccacgggcactggatctcagtccgtggagagaacaaaacccaaggcaaagatagcagagaatcctgccaacccaccagtgggtggtaaagcaaagagccccatgtttcctgctctaggcgaggccagcagtgatgatgatctctttcagtctgctaaaccaaaaccagcaaagaaaacaaatccctttcctctcctggaagatgaggatgacctctttacagatcagaaagtcaagaagaatgagacaaaatccagtagtcagcaggatgtcatattaacaacacaagatatttttgaggatgatatatttgctacggaagcaattaaaccctctcagaaaaccagagagaaggagaaaacattggaatctaatttatttgatgataacattgatatctttgctgacttaactgtaaaaccaaaagaaaagtccaaaaagaaagtggaagccaagtctatatttgatgatgatatggatgacatcttctccactggtatccaggctaagacaaccaaaccaaaaagccgatctgcacaggccgcacctgaaccaagatttgaacacaaggtgtccaacatctttgatgatcccctgaatgcctttggaggccagtagagcacacagggtatccacatgttaccctgcagctacattgttgagttagtgatgatattgtatatgctcatggtcttaactggattacaaaaagcaaatactagaacagctagctcatcttttacccaatgtacttagtatttttctgcactggtttaatcatgcttaatactacaaaacaaaaataaatatttcacagtggttggtttgttttgtttttaaaccacagtttgatttagttagccttgctggggccataatatgcttcagggtgtgtaaaagaagaaatctctttgtggctttcatgggcagggaatctcagagatagcaaatgccacctgaccagaagtctttgttatatggatgggaaccctaacttagggcttgggcaggggaaagagaaagaagatgagagattatacttcatgagtcttagcaatatgggagcaggttttcactgaattctgagggtgcctctgcatgtcctccaaggcaaagtttggcaaactgtggcccccccactgtcatattttgttaataaaattttattggaacacaatcaca

SEQ ID NO: 6687 - protein, 1291 aa, Homo sapiens
MMNRTTPDQELVPASEPVWERPWSVEEIRRSSQSWSLAADAGLLQFLQEFSQQTISRTHEIKKQVDGLIRETKATDCRLHNVFNDFLMLSNTQFIENRVYDEEVEEPVLKAEAEKTEQEKTREQKEVDLIPKVQEAVNYGLQVLDSAFEQLDIKAGNSDSEEDDANGRVELILEPKDLYIDRPLPYLIGSKLFMEQEDVGLGELSSEEGSVGSDRGSIVDTEEEKEEEESDEDFAHHSDNEQNQHTTQMSDEEEDDDGCDLFADSEKEEEDIEDIEENTRPKRSRPTSFADELAARIKGDAMGRVDEEPTTLPSGEAKPRKTLKEKKERRTPSDDEEDNLFAPPKLTDEDFSPFGSGGGLFSGGKGLFDDEDEESDLFTEASQDRQAGASVKEESSSSKPGKKIPAGAVSVFLGDTDVFGAASVPSLKEPQKPEQPTPRKSPYGPPPTGLFDDDDGDDDDDFFSAPHSKPSKTRKVQSTADIFGDEEGDLFKEKAVASPEATVSQTDENKARAEKKDLFSSQSASNLKGASLLPGKLPTSVSLFDDEDEEDNLFGGTAAKKQTLSLQAQREEKAKASELSKKKASALLFSSDEEDQWNIPASQTHLASDSRSKGEPRDSGTLQSQEAKAVKKTSLFEEDKEDDLFAIAKDSQKKTQRVSLLFEDDVDSGGSLFGSPPTSVPPATKKKETVSEAPPLLFSDEEEKEAQLGVKSVDKKVESAKESLKFGRTDVAESEKEGLLTRSAQETVKHSDLFSSSSPWDKGTKPRTKTVLSLFDEEEDKMEDQNIIQAPQKEVGKGCDPDAHPKSTGVFQDEELLFSHKLQKDNDPDVDLFAGTKKTKLLEPSVGSLFGDDEDDDLFSSAKSQPLVQEKKRVVKKDHSVNSFKNQKHPESIQGSKEKGIWKPETPQANLAINPAALLPTAASQISEVKPVLPELAFPSSEHRRSHGLESVPVLPGSGEAGVSFDLPAQADTLHSANKSRVKMRGKRRPQTRAARRLAAQESSEAEDMSVPRGPIAQWADGAISPNGHRPQLRAASGEDSTEEALAAAAAPWEGGPVPGVDTSPFAKSLGHSRGEADLFDSGDIFSTGTGSQSVERTKPKAKIAENPANPPVGGKAKSPMFPALGEASSDDDLFQSAKPKPAKKTNPFPLLEDEDDLFTDQKVKKNETKSSSQQDVILTTQDIFEDDIFATEAIKPSQKTREKEKTLESNLFDDNIDIFADLTVKPKEKSKKKVEAKSIFDDDMDDIFSTGIQAKTTKPKSRSAQAAPEPRFEHKVSNIFDDPLNAFGGQ

SEQ ID NO: 6688 - DNA, 570 bp, Homo sapiens
ttccggggctctgcggtcctcggcctgtgctggcagcctcggagcccaccgagccgggcggctgggatgatgaaccggacgacccccgaccaggagctggtgccggcgtcggagcccgtgtgggagcggccgtggtcggtggaggagatccgcaggagcagccagagctggtcgctggcggccgacgcgggcgtgagaggcgggccccggggacgcgagagcggcaggggtgacgcttggcttgcgcgcaggagggccggaccgcgactgcccctgcacctggcccgtcccgttgcctgccctcttaggaacacacgccccgtttagcccccgagaatgccaccctggcagtccccggccaccagggagaggggcagaccctgaccgtggcccagacgcgacgttcccttcatggggtttctggctcagctccatccggaggggagatccgtttccgccacactgagggattgctcgggcactagggaggcgattcctgttgggacctggactaaatggggtgggaaacaagccagtatgtggatatcctttaatgggattcttcaaatc

SEQ ID NO: 6689 - protein, 86 aa, Homo sapiens [sequence omitted]

SEQ ID NO: 6690 - DNA, 2202 bp, Homo sapiens
gctctgcggtcctcggcctgtgctggcagcctcggagcccaccgagccgggcggctgggatgatgaaccggacgacccccgaccaggagctggtgccggcgtcggagcccgtgtgggagcggccgtggtcggtggaggagatccgcaggagcagccagagctggtcgctggcggccgacgcgggccgtgtatatgatgaagaagtggaggagccagtactcaaggctgaggcagaaaaaacagagcaggagaagacacgagagcagaaagaagtagatctcattcctaaagtccaggaggctgtgaactatggcttacaagtattggacagtgcctttgagcaacttgatatcaaagcaggaaactcagactccgaggaagatgatgctaatgggcgggtggaactgatccttgaaccaaaggatctatacattgatcgtcctttaccatatctcattgggtcaaagctgttcatggaacaagaagatgtaggtcttggagagctgtccagtgaagaaggctctgtaggcagtgatcgtggcagtattgtggacactgaggaagagaaagaagaggaggagtcagatgaagattttgcccatcacagtgacaatgaacaaaaccagcacaccacacaaatgagtgatgaggaagaggatgatgatggctgtgacctttttgctgactctgagaaggaggaggaagatattgaggacattgaagaaaatactagacctaaaagaagcagacctacatcgtttgcagatgagctggctgcccgcatcaagggggatgccatgggtcgagtggacgaggagccgacaaccttaccctcaggagaagcaaaacctcggaagacactcaaagagaagaaggaaaggagaactccttcagacgatgaagaggataacttattcgcaccccccaagctgaccgacgaggacttctcgccatttggctctggaggtggcctgttcagtggcggcaaggggctatttgatgatgaggacgaggagagtgacctcttcacggaagcctcccaggatcggcaagctggagcctctgttaaggaggagtcttcatcatccaaacctggaaagaaaatcccagcaggagctgtttctgtatttttaggagacacggatgtgtttggtgctgcctccgttccatcactgaaggagccacagaagcctgagcagcccactccaaggaaaagcccctatggtccccctcccactggcctctttgatgatgatgatggtgatgatgatgacgactttttctcggcaccccacagcaaaccttctaaaacacgcaaagtccaatccactgccgatatctttggtgacgaagaaggagatctgttcaaagaaaaagccgtagcatcgccagaagccactgtgagtcagacagatgaaaataaagcaagagcagaaaaaaaggttaccttatcttacagcaaaaatctcaagccctcatcagaaacaaagactcaaaaaggcttattttcagatgaggaggactctgaggatttgttttcttctcaaagtgcgagtaacttaaaaggtgcatctctgctgcctggcaagctccccacgtcggtttccctgtttgatgatgaagatgaagaggataatctttttgggggtacagctgctaagaagcagacattgtctctacaagctcagagagaagagaaagcaaaagcctccgagctctccaaaaagaaagcatctgccctgttgttcagcagtgatgaggaggaccagtggaatattcctgcttcacagacccacttagcatctgacagcaggtctaaaggagaacccagggattctgggaccctccagagccaggaggccaaggctgtgaaaaagaccagtctctttgaggaagacaaagaagatgatctttttgccattgccaaggacagccaaaagaagacccagagagtgtcactcctctttgaagacgatgttgatagcggaggctctctgtttggctctcctcccacatctgttcctcctgcaacaaaggaaggacttttgactagatctgctcaggaaacagtcaagcattctgatttattttcttcatcatccccatgggacaaaggaaccaagcctagaaccaaaactgttcttagcttgtttgatgaggaagaggataaaatggaagatcaaaacattatccaggctccac

SEQ ID NO: 6691 - protein, 713 aa, Homo sapiens
MMNRTTPDQELVPASEPVWERPWSVEEIRRSSQSWSLAADAGRVYDEEVEEPVLKAEAEKTEQEKTREQKEVDLIPKVQEAVNYGLQVLDSAFEQLDIKAGNSDSEEDDANGRVELILEPKDLYIDRPLPYLIGSKLFMEQEDVGLGELSSEEGSVGSDRGSIVDTEEEKEEEESDEDFAHHSDNEQNQHTTQMSDEEEDDDGCDLFADSEKEEEDIEDIEENTRPKRSRPTSFADELAARIKGDAMGRVDEEPTTLPSGEAKPRKTLKEKKERRTPSDDEEDNLFAPPKLTDEDFSPFGSGGGLFSGGKGLFDDEDEESDLFTEASQDRQAGASVKEESSSSKPGKKIPAGAVSVFLGDTDVFGAASVPSLKEPQKPEQPTPRKSPYGPPPTGLFDDDDGDDDDDFFSAPHSKPSKTRKVQSTADIFGDEEGDLFKEKAVASPEATVSQTDENKARAEKKVTLSYSKNLKPSSETKTQKGLFSDEEDSEDLFSSQSASNLKGASLLPGKLPTSVSLFDDEDEEDNLFGGTAAKKQTLSLQAQREEKAKASELSKKKASALLFSSDEEDQWNIPASQTHLASDSRSKGEPRDSGTLQSQEAKAVKKTSLFEEDKEDDLFAIAKDSQKKTQRVSLLFEDDVDSGGSLFGSPPTSVPPATKEGLLTRSAQETVKHSDLFSSSSPWDKGTKPRTKTVLSLFDEEEDKMEDQNIIQA

SEQ ID NO: 6692 - DNA, 4334 bp, Homo sapiens
gctctgcggtcctcggcctgtgctggcagcctcggagcccaccgagccgggcggctgggatgatgaaccggacgacccccgaccaggagctggtgccggcgtcggagcccgtgtgggagcggccgtggtcggtggaggagatccgcaggagcagccagagctggtcgctggcggccgacgcgggccgtgtatatgatgaagaagtggaggagccagtactcaaggctgaggcagaaaaaacagagcaggagaagacacgagagcagaaagaagtagatctcattcctaaagtccaggaggctgtgaactatggcttacaagtattggacagtgcctttgagcaacttgatatcaaagcaggaaactcagactccgaggaagatgatgctaatgggcgggtggaactgatccttgaaccaaaggatctatacattgatcgtcctttaccatatctcattgggtcaaagctgttcatggaacaagaagatgtaggtcttggagagctgtccagtgaagaaggctctgtaggcagtgatcgtggcagtattgtggacactgaggaagagaaagaagaggaggagtcagatgaagattttgcccatcacagtgacaatgaacaaaaccagcacaccacacaaatgagtgatgaggaagaggatgatgatggctgtgacctttttgctgactctgagaaggaggaggaagatattgaggacattgaagaaaatactagacctaaaagaagcagacctacatcgtttgcagatgagctggctgcccgcatcaagggggatgccatgggtcgagtggacgaggagccgacaaccttaccctcaggagaagcaaaacctcggaagacactcaaagagaagaaggaaaggagaactccttcagacgatgaagaggataacttattcgcaccccccaagctgaccgacgaggacttctcgccatttggctctggaggtggcctgttcagtggcggcaaggggctatttgatgatgaggacgaggagagtgacctcttcacggaagcctcccaggatcggcaagctggagcctctgttaaggaggagtcttcatcatccaaacctggaaagaaaatcccagcaggagctgtttctgtatttttaggagacacggatgtgtttggtgctgcctccgttccatcactgaaggagccacagaagcctgagcagcccactccaaggaaaagcccctatggtccccctcccactggcctctttgatgatgatgatggtgatgatgatgacgactttttctcggcaccccacagcaaaccttctaaaacacgcaaagtccaatccactgccgatatctttggtgacgaagaaggagatctgttcaaagaaaaagccgtagcatcgccagaagccactgtgagtcagacagatgaaaataaagcaagagcagaaaaaaaggatttgttttcttctcaaagtgcgagtaacttaaaaggtgcatctctgctgcctggcaagctccccacgtcggtttccctgtttgatgatgaagatgaagaggataatctttttgggggtacagctgctaagaagcagacattgtctctacaagctcagagagaagagaaagcaaaagcctccgagctctccaaaaagaaagcatctgccctgttgttcagcagtgatgaggaggaccagtggaatattcctgcttcacagacccacttagcatctgacagcaggtctaaaggagaacccagggattctgggaccctccagagccaggaggccaaggctgtgaaaaagaccagtctctttgaggaagacaaagaagatgatctttttgccattgccaaggacagccaaaagaagacccagagagtgtcactcctctttgaagacgatgttgatagcggaggctctctgtttggctctcctcccacatctgttcctcctgcaacaaagaaaaaagagactgtctctgaggcaccacctttgctgttcagcgatgaagaagagaaggaggcacaacttggagtgaagtctgtggataagaaggttgagagtgccaaggagtcattaaaatttgggagaactgatgtggctgagtcagaaaaggaaggacttttgactagatctgctcaggaaacagtcaagcattctgatttattttcttcatcatccccatgggacaaaggaaccaagcctagaaccaaaactgttcttagcttgtttgatgaggaagaggataaaatggaagatcaaaacattatccaggctccacagaaagaagtaggaaagggctgcgatcctgatgcccaccccaagagcacaggtgtcttccaggatgaagagctgcttttcagccacaagctccaaaaggacaatgacccagatgttgacctttttgctggcaccaaaaaaaccaagctgttagagccaagtgttgggagcctgtttggggatgatgaagatgatgatcttttcagctctgccaagtcccagcctttggtacaagagaaaaagagagtagtgaaaaaagaccactctgttaactctttcaaaaaccagaaacatcctgaatccattcaaggtagtaaagaaaaaggcatatggaagccggaaacacctcaggcaaatttagcgatcaacccagcggccttgctgcccacagcggcttcccagatctctgaagtaaagcctgttttgccagaattggcttttccttcatctgaacacagaaggagccacggtctggaaagtgtgcctgtccttcccgggagtggggaggccggtgtgagttttgatcttccagctcaggcagacaccttacacagtgcaaacaagagccgtgtcaagatgagagggaagcgtagaccgcagacccgtgcagctaggcggctggctgctcaggagtccagcgaggctgaggacatgagcgtccccagaggacccattgcacagtgggctgatggcgccatttccccaaatggccatcggccacagctcagagcagccagtggagaagacagcactgaggaggccctggcagctgccgctgcaccttgggaaggtggtcctgtgcctggagtggacacaagcccctttgcaaagtctctgggtcattccagaggggaggctgacctttttgattctggggacattttttccacgggcactggatctcagtccgtggagagaacaaaacccaaggcaaagatagcagagaatcctgccaacccaccagtgggtggtaaagcaaagagccccatgtttcctgctctaggcgaggccagcagtgatgatgatctctttcagtctgctaaaccaaaaccagcaaagaaaacaaatccctttcctctcctggaagatgaggatgacctctttacagatcagaaagtcaagaagaatgagacaaaatccagtagtcagcaggatgtcatattaacaacacaagatatttttgaggatgatatatttgctacggaagcaattaaaccctctcagaaaaccagagagaaggagaaaacattggaatctaatttatttgatgataacattgatatctttgctgacttaactgtaaaaccaaaagaaaagtccaaaaagaaagtggaagccaagtctatatttgatgatgatatggatgacatcttctccactggtatccaggctaagacaaccaaaccaaaaagccgatctgcacaggccgcacctgaaccaagatttgaacacaaggtgtccaacatctttgatgatcccctgaatgcctttggaggccagtagagcacacagggtatccacatgttaccctgcagctacattgttgagttagtgatgatattgtatatgctcatggtcttaactggattacaaaaagcaaatactagaacagctagctcatcttttacccaatgtacttagtatttttctgcactggtttaatcatgcttaatactacaaaacaaaaataaatatttcacagtggttggtttgttttgtttttaaaccacagtttgatttagttagccttgctggggccataatatgcttcagggtgtgtaaaagaagaaatctctttgtggctttcatgggcagggaatctcagagatagcaaatgccacctgaccagaagtctttgttatatggatgggaaccctaacttagggcttgggcaggggaaagagaaagaagatgagagattatacttcatgagtcttagcaatatgggagcaggttttcactgaattctgagggtgcctctgcatgtcctccaaggcaaagtttggcaaactgtggcccccccactgtcatattttgttaataaaattttattggaacacaatcaca

SEQ ID NO: 6693 - protein, 1236 aa, Homo sapiens
MMNRTTPDQELVPASEPVWERPWSVEEIRRSSQSWSLAADAGRVYDEEVEEPVLKAEAEKTEQEKTREQKEVDLIPKVQEAVNYGLQVLDSAFEQLDIKAGNSDSEEDDANGRVELILEPKDLYIDRPLPYLIGSKLFMEQEDVGLGELSSEEGSVGSDRGSIVDTEEEKEEEESDEDFAHHSDNEQNQHTTQMSDEEEDDDGCDLFADSEKEEEDIEDIEENTRPKRSRPTSFADELAARIKGDAMGRVDEEPTTLPSGEAKPRKTLKEKKERRTPSDDEEDNLFAPPKLTDEDFSPFGSGGGLFSGGKGLFDDEDEESDLFTEASQDRQAGASVKEESSSSKPGKKIPAGAVSVFLGDTDVFGAASVPSLKEPQKPEQPTPRKSPYGPPPTGLFDDDDGDDDDDFFSAPHSKPSKTRKVQSTADIFGDEEGDLFKEKAVASPEATVSQTDENKARAEKKDLFSSQSASNLKGASLLPGKLPTSVSLFDDEDEEDNLFGGTAAKKQTLSLQAQREEKAKASELSKKKASALLFSSDEEDQWNIPASQTHLASDSRSKGEPRDSGTLQSQEAKAVKKTSLFEEDKEDDLFAIAKDSQKKTQRVSLLFEDDVDSGGSLFGSPPTSVPPATKKKETVSEAPPLLFSDEEEKEAQLGVKSVDKKVESAKESLKFGRTDVAESEKEGLLTRSAQETVKHSDLFSSSSPWDKGTKPRTKTVLSLFDEEEDKMEDQNIIQAPQKEVGKGCDPDAHPKSTGVFQDEELLFSHKLQKDNDPDVDLFAGTKKTKLLEPSVGSLFGDDEDDDLFSSAKSQPLVQEKKRVVKKDHSVNSFKNQKHPESIQGSKEKGIWKPETPQANLAINPAALLPTAASQISEVKPVLPELAFPSSEHRRSHGLESVPVLPGSGEAGVSFDLPAQADTLHSANKSRVKMRGKRRPQTRAARRLAAQESSEAEDMSVPRGPIAQWADGAISPNGHRPQLRAASGEDSTEEALAAAAAPWEGGPVPGVDTSPFAKSLGHSRGEADLFDSGDIFSTGTGSQSVERTKPKAKIAENPANPPVGGKAKSPMFPALGEASSDDDLFQSAKPKPAKKTNPFPLLEDEDDLFTDQKVKKNETKSSSQQDVILTTQDIFEDDIFATEAIKPSQKTREKEKTLESNLFDDNIDIFADLTVKPKEKSKKKVEAKSIFDDDMDDIFSTGIQAKTTKPKSRSAQAAPEPRFEHKVSNIFDDPLNAFGGQ

SEQ ID NO: 6694 - DNA, 4536 bp, Homo sapiens
gctctgcggtcctcggcctgtgctggcagcctcggagcccaccgagccgggcggctgggatgatgaaccggacgacccccgaccaggagctggtgccggcgtcggagcccgtgtgggagcggccgtggtcggtggaggagatccgcaggagcagccagagctggtcgctggcggccgacgcgggccgtgtatatgatgaagaagtggaggagccagtactcaaggctgaggcagaaaaaacagagcaggagaagacacgagagcagaaagaagtagatctcattcctaaagtccaggaggctgtgaactatggcttacaagtattggacagtgcctttgagcaacttgatatcaaagcaggaaactcagactccgaggaagatgatgctaatgggcgggtggaactgatccttgaaccaaaggatctatacattgatcgtcctttaccatatctcattgggtcaaagctgttcatggaacaagaagatgtaggtcttggagagctgtccagtgaagaaggctctgtaggcagtgatcgtggcagtattgtggacactgaggaagagaaagaagaggaggagtcagatgaagattttgcccatcacagtgacaatgaacaaaaccagcacaccacacaaatgagtgatgaggaagaggatgatgatggctgtgacctttttgctgactctgagaaggaggaggaagatattgaggacattgaagaaaatactagacctaaaagaagcagacctacatcgtttgcagatgagctggctgcccgcatcaagggggatgccatgggtcgagtggacgaggagccgacaaccttaccctcaggagaagcaaaacctcggaagacactcaaagagaagaaggaaaggagaactccttcagacgatgaagaggataacttattcgcaccccccaagctgaccgacgaggacttctcgccatttggctctggaggtggcctgttcagtggcggcaaggggctatttgatgatgaggacgaggagagtgacctcttcacggaagcctcccaggatcggcaagctggagcctctgttaaggaggagtcttcatcatccaaacctggaaagaaaatcccagcaggagctgtttctgtatttttaggagacacggatgtgtttggtgctgcctccgttccatcactgaaggagccacagaagcctgagcagcccactccaaggaaaagcccctatggtccccctcccactggcctctttgatgatgatgatggtgatgatgatgacgactttttctcggcaccccacagcaaaccttctaaaacacgcaaagtccaatccactgccgatatctttggtgacgaagaaggagatctgttcaaagaaaaagccgtagcatcgccagaagccactgtgagtcagacagatgaaaataaagcaagagcagaaaaaaaggttaccttatcttacagcaaaaatctcaagccctcatcagaaacaaagactcaaaaaggcttattttcagatgaggaggactctgaggatttgttttcttctcaaagtgcgagtaacttaaaaggtgcatctctgctgcctggcaagctccccacgtcggtttccctgtttgatgatgaagatgaagaggataatctttttgggggtacagctgctaagaagcagacattgtctctacaagctcagagagaagagaaagcaaaagcctccgagctctccaaaaagaaagcatctgccctgttgttcagcagtgatgaggaggaccagtggaatattcctgcttcacagacccacttagcatctgacagcaggtctaaaggagaacccagggattctgggaccctccagagccaggaggccaaggctgtgaaaaagaccagtctctttgaggaagacaaagaagatgatctttttgccattgccaaggacagatacatcctacctcctattgttcccgaagttgtctgtcaagttttgtgtatggaaagtaattcataccttcatcagatctcaaaagaagctttacacacacaagaagaagttgagccaaaagaagacccagagagtgtcactcctctttgaagacgatgttgatagcggaggctctctgtttggctctcctcccacatctgttcctcctgcaacaaagaaaaaagagactgtctctgaggcaccacctttgctgttcagcgatgaagaagagaaggaggcacaacttggagtgaagtctgtggataagaaggttgagagtgccaaggagtcattaaaatttgggagaactgatgtggctgagtcagaaaaggaaggacttttgactagatctgctcaggaaacagtcaagcattctgatttattttcttcatcatccccatgggacaaaggaaccaagcctagaaccaaaactgttcttagcttgtttgatgaggaagaggataaaatggaagatcaaaacattatccaggctccacagaaagaagtaggaaagggctgcgatcctgatgcccaccccaagagcacaggtgtcttccaggatgaagagctgcttttcagccacaagctccaaaaggacaatgacccagatgttgacctttttgctggcaccaaaaaaaccaagctgttagagccaagtgttgggagcctgtttggggatgatgaagatgatgatcttttcagctctgccaagtcccagcctttggtacaagagaaaaagagagtagtgaaaaaagaccactctgttaactctttcaaaaaccagaaacatcctgaatccattcaaggtagtaaagaaaaaggcatatggaagccggaaacacctcaggcaaatttagcgatcaacccagcggccttgctgcccacagcggcttcccagatctctgaagtaaagcctgttttgccagaattggcttttccttcatctgaacacagaaggagccacggtctggaaagtgtgcctgtccttcccgggagtggggaggccggtgtgagttttgatcttccagctcaggcagacaccttacacagtgcaaacaagagccgtgtcaagatgagagggaagcgtagaccgcagacccgtgcagctaggcggctggctgctcaggagtccagcgaggctgaggacatgagcgtccccagaggacccattgcacagtgggctgatggcgccatttccccaaatggccatcggccacagctcagagcagccagtggagaagacagcactgaggaggccctggcagctgccgctgcaccttgggaaggtggtcctgtgcctggagtggacacaagcccctttgcaaagtctctgggtcattccagaggggaggctgacctttttgattctggggacattttttccacgggcactggatctcagtccgtggagagaacaaaacccaaggcaaagatagcagagaatcctgccaacccaccagtgggtggtaaagcaaagagccccatgtttcctgctctaggcgaggccagcagtgatgatgatctctttcagtctgctaaaccaaaaccagcaaagaaaacaaatccctttcctctcctggaagatgaggatgacctctttacagatcagaaagtcaagaagaatgagacaaaatccagtagtcagcaggatgtcatattaacaacacaagatatttttgaggatgatatatttgctacggaagcaattaaaccctctcagaaaaccagagagaaggagaaaacattggaatctaatttatttgatgataacattgatatctttgctgacttaactgtaaaaccaaaagaaaagtccaaaaagaaagtggaagccaagtctatatttgatgatgatatggatgacatcttctccactggtatccaggctaagacaaccaaaccaaaaagccgatctgcacaggccgcacctgaaccaagatttgaacacaaggtgtccaacatctttgatgatcccctgaatgcctttggaggccagtagagcacacagggtatccacatgttaccctgcagctacattgttgagttagtgatgatattgtatatgctcatggtcttaactggattacaaaaagcaaatactagaacagctagctcatcttttacccaatgtacttagtatttttctgcactggtttaatcatgcttaatactacaaaacaaaaataaatatttcacagtggttggtttgttttgtttttaaaccacagtttgatttagttagccttgctggggccataatatgcttcagggtgtgtaaaagaagaaatctctttgtggctttcatgggcagggaatctcagagatagcaaatgccacctgaccagaagtctttgttatatggatgggaaccctaacttagggcttgggcaggggaaagagaaagaagatgagagattatacttcatgagtcttagcaatatgggagcaggttttcactgaattctgagggtgcctctgcatgtcctccaaggcaaagtttggcaaactgtggcccccccactgtcatattttgttaataaaattttattggaacacaatcaca

SEQ ID NO: 6695 - protein, 688 aa, Homo sapiens; identical to SEQ ID NO: 6613

SEQ ID NO: 6696 - DNA, 4161 bp, Homo sapiens
gctctgcggtcctcggcctgtgctggcagcctcggagcccaccgagccgggcggctgggatgatgaaccggacgacccccgaccaggagctggtgccggcgtcggagcccgtgtgggagcggccgtggtcggtggaggagatccgcaggagcagccagagctggtcgctggcggccgacgcgggccgtgtatatgatgaagaagtggaggagccagtactcaaggctgaggcagaaaaaacagagcaggagaagacacgagagcagaaagaagtagatctcattcctaaagtccaggaggctgtgaactatggcttacaagtattggacagtgcctttgagcaacttgatatcaaagcaggaaactcagactccgaggaagatgatgctaatgggcgggtggaactgatccttgaaccaaaggatctatacattgatcgtcctttaccatatctcattgggtcaaagctgttcatggaacaagaagatgtaggtcttggagagctgtccagtgaagaaggctctgtaggcagtgatcgtggcagtattgtggacactgaggaagagaaagaagaggaggagtcagatgaagattttgcccatcacagtgacaatgaacaaaaccagcacaccacacaaatgagtgatgaggaagaggatgatgatggctgtgacctttttgctgactctgagaaggaggaggaagatattgaggacattgaagaaaatactagacctaaaagaagcagacctacatcgtttgcagatgagctggctgcccgcatcaagggggatgccatgggtcgagtggacgaggagccgacaaccttaccctcaggagaagcaaaacctcggaagacactcaaagagaagaaggaaaggagaactccttcagacgatgaagaggataacttattcgcaccccccaagctgaccgacgaggacttctcgccatttggctctggaggtggcctgttcagtggcggcaaggggctatttgatgatgaggacgaggagagtgacctcttcacggaagcctcccaggatcggcaagctggagcctctgttaaggaggagtcttcatcatccaaacctggaaagaaaatcccagcaggagctgtttctgtatttttaggagacacggatgtgtttggtgctgcctccgttccatcactgaaggagccacagaagcctgagcagcccactccaaggaaaagcccctatggtccccctcccactggcctctttgatgatgatgatggtgatgatgatgacgactttttctcggcaccccacagcaaaccttctaaaacacgcaaagtccaatccactgccgatatctttggtgacgaagaaggagatctgttcaaagaaaaagccgtagcatcgccagaagccactgtgagtcagacagatgaaaataaagcaagagcagaaaaaaaggttaccttatcttacagcaaaaatctcaagccctcatcagaaacaaagactcaaaaaggcttattttcagatgaggaggactctgaggatttgttttcttctcaaagtgcgagtaacttaaaaggtgcatctctgctgcctggcaagctccccacgtcggtttccctgtttgatgatgaagatgaagaggataatctttttgggggtacagctgctaagaagcagacattgtctctacaagctcagagagaagagaaagcaaaagcctccgagctctccaaaaagaaagcatctgccctgttgttcagcagtgatgaggagccaaaagaagacccagagagtgtcactcctctttgaagacgatgttgatagcggaggctctctgtttggctctcctcccacatctgttcctcctgcaacaaaggaaggacttttgactagatctgctcaggaaacagtcaagcattctgatttattttcttcatcatccccatgggacaaaggaaccaagcctagaaccaaaactgttcttagcttgtttgatgaggaagaggataaaatggaagatcaaaacattatccaggctccacagaaagaagtaggaaagggctgcgatcctgatgcccaccccaagagcacaggtgtcttccaggatgaagagctgcttttcagccacaagctccaaaaggacaatgacccagatgttgacctttttgctggcaccaaaaaaaccaagctgttagagccaagtgttgggagcctgtttggggatgatgaagatgatgatcttttcagctctgccaagtcccagcctttggtacaagagaaaaagagagtagtgaaaaaagaccactctgttaactctttcaaaaaccagaaacatcctgaatccattcaaggtagtaaagaaaaaggcatatggaagccggaaacacctcaggactcatcaggtctcgctccatttaaaaccaaagaaccatccactcggatcgggaagatacaagcaaatttagcgatcaacccagcggccttgctgcccacagcggcttcccagatctctgaagtaaagcctgttttgccagaattggcttttccttcatctgaacacagaaggagccacggtctggaaagtgtgcctgtccttcccgggagtggggaggccggtgtgagttttgatcttccagctcaggcagacaccttacacagtgcaaacaagagccgtgtcaagatgagagggaagcgtagaccgcagacccgtgcagctaggcggctggctgctcaggagtccagcgaggctgaggacatgagcgtccccagaggacccattgcacagtgggctgatggcgccatttccccaaatggccatcggccacagctcagagcagccagtggagaagacagcactgaggaggccctggcagctgccgctgcaccttgggaaggtggtcctgtgcctggagtggacacaagcccctttgcaaagtctctgggtcattccagaggggaggctgacctttttgattctggggacattttttccacgggcactggatctcagtccgtggagagaacaaaacccaaggcaaagatagcagagaatcctgccaacccaccagtgggtggtaaagcaaagagccccatgtttcctgctctaggcgaggccagcagtgatgatgatctctttcagtctgctaaaccaaaaccagcaaagaaaacaaatccctttcctctcctggaagatgaggatgacctctttacagatcagaaagtcaagaagaatgagacaaaatccagtagtcagcaggatgtcatattaacaacacaagatatttttgaggatgatatatttgctacggaagcaattaaaccctctcagaaaaccagagagaaggagaaaacattggaatctaatttatttgatgataacattgatatctttgctgacttaactgtaaaaccaaaagaaaagtccaaaaagaaagtggaagccaagtctatatttgatgatgatatggatgacatcttctccactggtatccaggctaagacaaccaaaccaaaaagccgatctgcacaggccgcacctgaaccaagatttgaacacaaggtgtccaacatctttgatgatcccctgaatgcctttggaggccagtagagcacacagggtatccacatgttaccctgcagctacattgttgagttagtgatgatattgtatatgctcatggtcttaactggattacaaaaagcaaatactagaacagctagctcatcttttacccaatgtacttagtatttttctgcactggtttaatcatgcttaatactacaaaacaaaaataaatatttcacagtggttggtttgttttgtttttaaaccacagtttgatttagttagccttgctggggccataatatgcttcagggtgtgtaaaagaagaaatctctttgtggctttcatgggcagggaatctcagagatagcaaatgccacctgaccagaagtctttgttatatggatgggaaccctaacttagggcttgggcaggggaaagagaaagaagatgagagattatacttcatgagtcttagcaatatgggagcaggttttcactgaattctgagggtgcctctgcatgtcctccaaggcaaagtttggcaaactgtggcccccccactgtcatattttgttaataaaattttattggaacacaatcaca

SEQ ID NO: 6697 - protein, 660 aa, Homo sapiens; identical to SEQ ID NO: 6621

SEQ ID NO: 6698 - DNA, 4397 bp, Homo sapiens
gctctgcggtcctcggcctgtgctggcagcctcggagcccaccgagccgggcggctgggatgatgaaccggacgacccccgaccaggagctggtgccggcgtcggagcccgtgtgggagcggccgtggtcggtggaggagatccgcaggagcagccagagctggtcgctggcggccgacgcgggccgtgtatatgatgaagaagtggaggagccagtactcaaggctgaggcagaaaaaacagagcaggagaagacacgagagcagaaagaagtagatctcattcctaaagtccaggaggctgtgaactatggcttacaagtattggacagtgcctttgagcaacttgatatcaaagcaggaaactcagactccgaggaagatgatgctaatgggcgggtggaactgatccttgaaccaaaggatctatacattgatcgtcctttaccatatctcattgggtcaaagctgttcatggaacaagaagatgtaggtcttggagagctgtccagtgaagaaggctctgtaggcagtgatcgtggcagtattgtggacactgaggaagagaaagaagaggaggagtcagatgaagattttgcccatcacagtgacaatgaacaaaaccagcacaccacacaaatgagtgatgaggaagaggatgatgatggctgtgacctttttgctgactctgagaaggaggaggaagatattgaggacattgaagaaaatactagacctaaaagaagcagacctacatcgtttgcagatgagctggctgcccgcatcaagggggatgccatgggtcgagtggacgaggagccgacaaccttaccctcaggagaagcaaaacctcggaagacactcaaagagaagaaggaaaggagaactccttcagacgatgaagaggataacttattcgcaccccccaagctgaccgacgaggacttctcgccatttggctctggaggtggcctgttcagtggcggcaaggggctatttgatgatgaggacgaggagagtgacctcttcacggaagcctcccaggatcggcaagctggagcctctgttaaggaggagtcttcatcatccaaacctggaaagaaaatcccagcaggagctgtttctgtatttttaggagacacggatgtgtttggtgctgcctccgttccatcactgaaggagccacagaagcctgagcagcccactccaaggaaaagcccctatggtccccctcccactggcctctttgatgatgatgatggtgatgatgatgacgactttttctcggcaccccacagcaaaccttctaaaacacgcaaagtccaatccactgccgatatctttggtgacgaagaaggagatctgttcaaagaaaaagccgtagcatcgccagaagccactgtgagtcagacagatgaaaataaagcaagagcagaaaaaaaggatttgttttcttctcaaagtgcgagtaacttaaaaggtgcatctctgctgcctggcaagctccccacgtcggtttccctgtttgatgatgaagatgaagaggataatctttttgggggtacagctgctaagaagcagacattgtctctacaagctcagagagaagagaaagcaaaagcctccgagctctccaaaaagaaagcatctgccctgttgttcagcagtgatgaggaggaccagtggaatattcctgcttcacagacccacttagcatctgacagcaggtctaaaggagaacccagggattctgggaccctccagagccaggaggccaaggctgtgaaaaagaccagtctctttgaggaagacaaagaagatgatctttttgccattgccaaggacagccaaaagaagacccagagagtgtcactcctctttgaagacgatgttgatagcggaggctctctgtttggctctcctcccacatctgttcctcctgcaacaaagaaaaaagagactgtctctgaggcaccacctttgctgttcagcgatgaagaagagaaggaggcacaacttggagtgaagtctgtggataagaaggttgagagtgccaaggagtcattaaaatttgggagaactgatgtggctgagtcagaaaaggaaggacttttgactagatctgctcaggaaacagtcaagcattctgatttattttcttcatcatccccatgggacaaaggaaccaagcctagaaccaaaactgttcttagcttgtttgatgaggaagaggataaaatggaagatcaaaacattatccaggctccacagaaagaagtaggaaagggctgcgatcctgatgcccaccccaagagcacaggtgtcttccaggatgaagagctgcttttcagccacaagctccaaaaggacaatgacccagatgttgacctttttgctggcaccaaaaaaaccaagctgttagagccaagtgttgggagcctgtttggggatgatgaagatgatgatcttttcagctctgccaagtcccagcctttggtacaagagaaaaagagagtagtgaaaaaagaccactctgttaactctttcaaaaaccagaaacatcctgaatccattcaaggtagtaaagaaaaaggcatatggaagccggaaacacctcaggactcatcaggtctcgctccatttaaaaccaaagaaccatccactcggatcgggaagatacaagcaaatttagcgatcaacccagcggccttgctgcccacagcggcttcccagatctctgaagtaaagcctgttttgccagaattggcttttccttcatctgaacacagaaggagccacggtctggaaagtgtgcctgtccttcccgggagtggggaggccggtgtgagttttgatcttccagctcaggcagacaccttacacagtgcaaacaagagccgtgtcaagatgagagggaagcgtagaccgcagacccgtgcagctaggcggctggctgctcaggagtccagcgaggctgaggacatgagcgtccccagaggacccattgcacagtgggctgatggcgccatttccccaaatggccatcggccacagctcagagcagccagtggagaagacagcactgaggaggccctggcagctgccgctgcaccttgggaaggtggtcctgtgcctggagtggacacaagcccctttgcaaagtctctgggtcattccagaggggaggctgacctttttgattctggggacattttttccacgggcactggatctcagtccgtggagagaacaaaacccaaggcaaagatagcagagaatcctgccaacccaccagtgggtggtaaagcaaagagccccatgtttcctgctctaggcgaggccagcagtgatgatgatctctttcagtctgctaaaccaaaaccagcaaagaaaacaaatccctttcctctcctggaagatgaggatgacctctttacagatcagaaagtcaagaagaatgagacaaaatccagtagtcagcaggatgtcatattaacaacacaagatatttttgaggatgatatatttgctacggaagcaattaaaccctctcagaaaaccagagagaaggagaaaacattggaatctaatttatttgatgataacattgatatctttgctgacttaactgtaaaaccaaaagaaaagtccaaaaagaaagtggaagccaagtctatatttgatgatgatatggatgacatcttctccactggtatccaggctaagacaaccaaaccaaaaagccgatctgcacaggccgcacctgaaccaagatttgaacacaaggtgtccaacatctttgatgatcccctgaatgcctttggaggccagtagagcacacagggtatccacatgttaccctgcagctacattgttgagttagtgatgatattgtatatgctcatggtcttaactggattacaaaaagcaaatactagaacagctagctcatcttttacccaatgtacttagtatttttctgcactggtttaatcatgcttaatactacaaaacaaaaataaatatttcacagtggttggtttgttttgtttttaaaccacagtttgatttagttagccttgctggggccataatatgcttcagggtgtgtaaaagaagaaatctctttgtggctttcatgggcagggaatctcagagatagcaaatgccacctgaccagaagtctttgttatatggatgggaaccctaacttagggcttgggcaggggaaagagaaagaagatgagagattatacttcatgagtcttagcaatatgggagcaggttttcactgaattctgagggtgcctctgcatgtcctccaaggcaaagtttggcaaactgtggcccccccactgtcatattttgttaataaaattttattggaacacaatcaca

SEQ ID NO: 6699 - protein, 1257 aa, Homo sapiens
MMNRTTPDQELVPASEPVWERPWSVEEIRRSSQSWSLAADAGRVYDEEVEEPVLKAEAEKTEQEKTREQKEVDLIPKVQEAVNYGLQVLDSAFEQLDIKAGNSDSEEDDANGRVELILEPKDLYIDRPLPYLIGSKLFMEQEDVGLGELSSEEGSVGSDRGSIVDTEEEKEEEESDEDFAHHSDNEQNQHTTQMSDEEEDDDGCDLFADSEKEEEDIEDIEENTRPKRSRPTSFADELAARIKGDAMGRVDEEPTTLPSGEAKPRKTLKEKKERRTPSDDEEDNLFAPPKLTDEDFSPFGSGGGLFSGGKGLFDDEDEESDLFTEASQDRQAGASVKEESSSSKPGKKIPAGAVSVFLGDTDVFGAASVPSLKEPQKPEQPTPRKSPYGPPPTGLFDDDDGDDDDDFFSAPHSKPSKTRKVQSTADIFGDEEGDLFKEKAVASPEATVSQTDENKARAEKKDLFSSQSASNLKGASLLPGKLPTSVSLFDDEDEEDNLFGGTAAKKQTLSLQAQREEKAKASELSKKKASALLFSSDEEDQWNIPASQTHLASDSRSKGEPRDSGTLQSQEAKAVKKTSLFEEDKEDDLFAIAKDSQKKTQRVSLLFEDDVDSGGSLFGSPPTSVPPATKKKETVSEAPPLLFSDEEEKEAQLGVKSVDKKVESAKESLKFGRTDVAESEKEGLLTRSAQETVKHSDLFSSSSPWDKGTKPRTKTVLSLFDEEEDKMEDQNIIQAPQKEVGKGCDPDAHPKSTGVFQDEELLFSHKLQKDNDPDVDLFAGTKKTKLLEPSVGSLFGDDEDDDLFSSAKSQPLVQEKKRVVKKDHSVNSFKNQKHPESIQGSKEKGIWKPETPQDSSGLAPFKTKEPSTRIGKIQANLAINPAALLPTAASQISEVKPVLPELAFPSSEHRRSHGLESVPVLPGSGEAGVSFDLPAQADTLHSANKSRVKMRGKRRPQTRAARRLAAQESSEAEDMSVPRGPIAQWADGAISPNGHRPQLRAASGEDSTEEALAAAAAPWEGGPVPGVDTSPFAKSLGHSRGEADLFDSGDIFSTGTGSQSVERTKPKAKIAENPANPPVGGKAKSPMFPALGEASSDDDLFQSAKPKPAKKTNPFPLLEDEDDLFTDQKVKKNETKSSSQQDVILTTQDIFEDDIFATEAIKPSQKTREKEKTLESNLFDDNIDIFADLTVKPKEKSKKKVEAKSIFDDDMDDIFSTGIQAKTTKPKSRSAQAAPEPRFEHKVSNIFDDPLNAFGGQ

SEQ ID NO: 6700 - DNA, 4373 bp, Homo sapiens
gctctgcggtcctcggcctgtgctggcagcctcggagcccaccgagccgggcggctgggatgatgaaccggacgacccccgaccaggagctggtgccggcgtcggagcccgtgtgggagcggccgtggtcggtggaggagatccgcaggagcagccagagctggtcgctggcggccgacgcgggccgtgtatatgatgaagaagtggaggagccagtactcaaggctgaggcagaaaaaacagagcaggagaagacacgagagcagaaagaagtagatctcattcctaaagtccaggaggctgtgaactatggcttacaagtattggacagtgcctttgagcaacttgatatcaaagcaggaaactcagactccgaggaagatgatgctaatgggcgggtggaactgatccttgaaccaaaggatctatacattgatcgtcctttaccatatctcattgggtcaaagctgttcatggaacaagaagatgtaggtcttggagagctgtccagtgaagaaggctctgtaggcagtgatcgtggcagtattgtggacactgaggaagagaaagaagaggaggagtcagatgaagattttgcccatcacagtgacaatgaacaaaaccagaaaagaagcagacctacatcgtttgcagatgagctggctgcccgcatcaagggggatgccatgggtcgagtggacgaggagccgacaaccttaccctcaggagaagcaaaacctcggaagacactcaaagagaagaaggaaaggagaactccttcagacgatgaagaggataacttattcgcaccccccaagctgaccgacgaggacttctcgccatttggctctggaggtggcctgttcagtggcggcaaggggctatttgatgatgaggacgaggagagtgacctcttcacggaagcctcccaggatcggcaagctggagcctctgttaaggaggagtcttcatcatccaaacctggaaagaaaatcccagcaggagctgtttctgtatttttaggagacacggatgtgtttggtgctgcctccgttccatcactgaaggagccacagaagcctgagcagcccactccaaggaaaagcccctatggtccccctcccactggcctctttgatgatgatgatggtgatgatgatgacgactttttctcggcaccccacagcaaaccttctaaaacacgcaaagtccaatccactgccgatatctttggtgacgaagaaggagatctgttcaaagaaaaagccgtagcatcgccagaagccactgtgagtcagacagatgaaaataaagcaagagcagaaaaaaaggttaccttatcttacagcaaaaatctcaagccctcatcagaaacaaagactcaaaaaggcttattttcagatgaggaggactctgaggatttgttttcttctcaaagtgcgagtaacttaaaaggtgcatctctgctgcctggcaagctccccacgtcggtttccctgtttgatgatgaagatgaagaggataatctttttgggggtacagctgctaagaagcagacattgtctctacaagctcagagagaagagaaagcaaaagcctccgagctctccaaaaagaaagcatctgccctgttgttcagcagtgatgaggaggaccagtggaatattcctgcttcacagacccacttagcatctgacagcaggtctaaaggagaacccagggattctgggaccctccagagccaggaggccaaggctgtgaaaaagaccagtctctttgaggaagacaaagaagatgatctttttgccattgccaaggacagccaaaagaagacccagagagtgtcactcctctttgaagacgatgttgatagcggaggctctctgtttggctctcctcccacatctgttcctcctgcaacaaagaaaaaagagactgtctctgaggcaccacctttgctgttcagcgatgaagaagagaaggaggcacaacttggagtgaagtctgtggataagaaggttgagagtgccaaggagtcattaaaatttgggagaactgatgtggctgagtcagaaaaggaaggacttttgactagatctgctcaggaaacagtcaagcattctgatttattttcttcatcatccccatgggacaaaggaaccaagcctagaaccaaaactgttcttagcttgtttgatgaggaagaggataaaatggaagatcaaaacattatccaggctccacagaaagaagtaggaaagggctgcgatcctgatgcccaccccaagagcacaggtgtcttccaggatgaagagctgcttttcagccacaagctccaaaaggacaatgacccagatgttgacctttttgctggcaccaaaaaaaccaagctgttagagccaagtgttgggagcctgtttggggatgatgaagatgatgatcttttcagctctgccaagtcccagcctttggtacaagagaaaaagagagtagtgaaaaaagaccactctgttaactctttcaaaaaccagaaacatcctgaatccattcaaggtagtaaagaaaaaggcatatggaagccggaaacacctcaggactcatcaggtctcgctccatttaaaaccaaagaaccatccactcggatcgggaagatacaagcaaatttagcgatcaacccagcggccttgctgcccacagcggcttcccagatctctgaagtaaagcctgttttgccagaattggcttttccttcatctgaacacagaaggagccacggtctggaaagtgtgcctgtccttcccgggagtggggaggccggtgtgagttttgatcttccagctcaggcagacaccttacacagtgcaaacaagagccgtgtcaagatgagagggaagcgtagaccgcagacccgtgcagctaggcggctggctgctcaggagtccagcgaggctgaggacatgagcgtccccagaggacccattgcacagtgggctgatggcgccatttccccaaatggccatcggccacagctcagagcagccagtggagaagacagcactgaggaggccctggcagctgccgctgcaccttgggaaggtggtcctgtgcctggagtggacacaagcccctttgcaaagtctctgggtcattccagaggggaggctgacctttttgattctggggacattttttccacgggcactggatctcagtccgtggagagaacaaaacccaaggcaaagatagcagagaatcctgccaacccaccagtgggtggtaaagcaaagagccccatgtttcctgctctaggcgaggccagcagtgatgatgatctctttcagtctgctaaaccaaaaccagcaaagaaaacaaatccctttcctctcctggaagatgaggatgacctctttacagatcagaaagtcaagaagaatgagacaaaatccagtagtcagcaggatgtcatattaacaacacaagatatttttgaggatgatatatttgctacggaagcaattaaaccctctcagaaaaccagagagaaggagaaaacattggaatctaatttatttgatgataacattgatatctttgctgacttaactgtaaaaccaaaagaaaagtccaaaaagaaagtggaagccaagtctatatttgatgatgatatggatgacatcttctccactggtatccaggctaagacaaccaaaccaaaaagccgatctgcacaggccgcacctgaaccaagatttgaacacaaggtgtccaacatctttgatgatcccctgaatgcctttggaggccagtagagcacacagggtatccacatgttaccctgcagctacattgttgagttagtgatgatattgtatatgctcatggtcttaactggattacaaaaagcaaatactagaacagctagctcatcttttacccaatgtacttagtatttttctgcactggtttaatcatgcttaatactacaaaacaaaaataaatatttcacagtggttggtttgttttgtttttaaaccacagtttgatttagttagccttgctggggccataatatgcttcagggtgtgtaaaagaagaaatctctttgtggctttcatgggcagggaatctcagagatagcaaatgccacctgaccagaagtctttgttatatggatgggaaccctaacttagggcttgggcaggggaaagagaaagaagatgagagattatacttcatgagtcttagcaatatgggagcaggttttcactgaattctgagggtgcctctgcatgtcctccaaggcaaagtttggcaaactgtggcccccccactgtcatattttgttaataaaattttattggaacacaatcaca

SEQ ID NO: 6701 - protein, 1249 aa, Homo sapiens
MMNRTTPDQELVPASEPVWERPWSVEEIRRSSQSWSLAADAGRVYDEEVEEPVLKAEAEKTEQEKTREQKEVDLIPKVQEAVNYGLQVLDSAFEQLDIKAGNSDSEEDDANGRVELILEPKDLYIDRPLPYLIGSKLFMEQEDVGLGELSSEEGSVGSDRGSIVDTEEEKEEEESDEDFAHHSDNEQNQKRSRPTSFADELAARIKGDAMGRVDEEPTTLPSGEAKPRKTLKEKKERRTPSDDEEDNLFAPPKLTDEDFSPFGSGGGLFSGGKGLFDDEDEESDLFTEASQDRQAGASVKEESSSSKPGKKIPAGAVSVFLGDTDVFGAASVPSLKEPQKPEQPTPRKSPYGPPPTGLFDDDDGDDDDDFFSAPHSKPSKTRKVQSTADIFGDEEGDLFKEKAVASPEATVSQTDENKARAEKKVTLSYSKNLKPSSETKTQKGLFSDEEDSEDLFSSQSASNLKGASLLPGKLPTSVSLFDDEDEEDNLFGGTAAKKQTLSLQAQREEKAKASELSKKKASALLFSSDEEDQWNIPASQTHLASDSRSKGEPRDSGTLQSQEAKAVKKTSLFEEDKEDDLFAIAKDSQKKTQRVSLLFEDDVDSGGSLFGSPPTSVPPATKKKETVSEAPPLLFSDEEEKEAQLGVKSVDKKVESAKESLKFGRTDVAESEKEGLLTRSAQETVKHSDLFSSSSPWDKGTKPRTKTVLSLFDEEEDKMEDQNIIQAPQKEVGKGCDPDAHPKSTGVFQDEELLFSHKLQKDNDPDVDLFAGTKKTKLLEPSVGSLFGDDEDDDLFSSAKSQPLVQEKKRVVKKDHSVNSFKNQKHPESIQGSKEKGIWKPETPQDSSGLAPFKTKEPSTRIGKIQANLAINPAALLPTAASQISEVKPVLPELAFPSSEHRRSHGLESVPVLPGSGEAGVSFDLPAQADTLHSANKSRVKMRGKRRPQTRAARRLAAQESSEAEDMSVPRGPIAQWADGAISPNGHRPQLRAASGEDSTEEALAAAAAPWEGGPVPGVDTSPFAKSLGHSRGEADLFDSGDIFSTGTGSQSVERTKPKAKIAENPANPPVGGKAKSPMFPALGEASSDDDLFQSAKPKPAKKTNPFPLLEDEDDLFTDQKVKKNETKSSSQQDVILTTQDIFEDDIFATEAIKPSQKTREKEKTLESNLFDDNIDIFADLTVKPKEKSKKKVEAKSIFDDDMDDIFSTGIQAKTTKPKSRSAQAAPEPRFEHKVSNIFDDPLNAFGGQ

SEQ ID NO: 6702 - DNA, 4050 bp, Homo sapiens
gctctgcggtcctcggcctgtgctggcagcctcggagcccaccgagccgggcggctgggatgatgaaccggacgacccccgaccaggagctggtgccggcgtcggagcccgtgtgggagcggccgtggtcggtggaggagatccgcaggagcagccagagctggtcgctggcggccgacgcgggccgtgtatatgatgaagaagtggaggagccagtactcaaggctgaggcagaaaaaacagagcaggagaagacacgagagcagaaagaagtagatctcattcctaaagtccaggaggctgtgaactatggcttacaagtattggacagtgcctttgagcaacttgatatcaaagcaggaaactcagactccgaggaagatgatgctaatgggcgggtggaactgatccttgaaccaaaggatctatacattgatcgtcctttaccatatctcattgggtcaaagctgttcatggaacaagaagatgtaggtcttggagagctgtccagtgaagaaggctctgtaggcagtgatcgtggcagtattgtggacactgaggaagagaaagaagaggaggagtcagatgaagattttgcccatcacagtgacaatgaacaaaaccagaaaagaagcagacctacatcgtttgcagatgagctggctgcccgcatcaagggggatgccatgggtcgagtggacgaggagccgacaaccttaccctcaggagaagcaaaacctcggaagacactcaaagagaagaaggaaaggagaactccttcagacgatgaagaggataacttattcgcaccccccaagctgaccgacgaggacttctcgccatttggctctggaggtggcctgttcagtggcggcaaggggctatttgatgatgaggacgaggagagtgacctcttcacggaagcctcccaggatcggcaagctggagcctctgttaaggaggagtcttcatcatccaaacctggaaagaaaatcccagcaggagctgtttctgtatttttaggagacacggatgtgtttggtgctgcctccgttccatcactgaaggagccacagaagcctgagcagcccactccaaggaaaagcccctatggtccccctcccactggcctctttgatgatgatgatggtgatgatgatgacgactttttctcggcaccccacagcaaaccttctaaaacacgcaaagtccaatccactgccgatatctttggtgacgaagaaggagatctgttcaaagaaaaagccgtagcatcgccagaagccactgtgagtcagacagatgaaaataaagcaagagcagaaaaaaaggttaccttatcttacagcaaaaatctcaagccctcatcagaaacaaagactcaaaaaggcttattttcagatgaggaggactctgaggatttgttttcttctcaaagtgcgagtaacttaaaaggtgcatctctgctgcctggcaagctccccacgtcggtttccctgtttgatgatgaagatgaagaggataatctttttgggggtacagctgctaagaagcagacattgtctctacaagctcagagagaagagaaagcaaaagcctccgagctctccaaaaagaaagcatctgccctgttgttcagcagtgatgaggagccaaaagaagacccagagagtgtcactcctctttgaagacgatgttgatagcggaggctctctgtttggctctcctcccacatctgttcctcctgcaacaaaggaaggacttttgactagatctgctcaggaaacagtcaagcattctgatttattttcttcatcatccccatgggacaaaggaaccaagcctagaaccaaaactgttcttagcttgtttgatgaggaagaggataaaatggaagatcaaaacattatccaggctccacagaaagaagtaggaaagggctgcgatcctgatgcccaccccaagagcacaggtgtcttccaggatgaagagctgcttttcagccacaagctccaaaaggacaatgacccagatgttgacctttttgctggcaccaaaaaaaccaagctgttagagccaagtgttgggagcctgtttggggatgatgaagatgatgatcttttcagctctgccaagtcccagcctttggtacaagagaaaaagagagtagtgaaaaaagaccactctgttaactctttcaaaaaccagaaacatcctgaatccattcaaggtagtaaagaaaaaggcatatggaagccggaaacacctcaggactcatcaggtctcgctccatttaaaaccaaagaaccatccactcggatcgggaagatacaagcaaatttagcgatcaacccagcggccttgctgcccacagcggcttcccagatctctgaagtaaagcctgttttgccagaattggcttttccttcatctgaacacagaaggagccacggtctggaaagtgtgcctgtccttcccgggagtggggaggccggtgtgagttttgatcttccagctcaggcagacaccttacacagtgcaaacaagagccgtgtcaagatgagagggaagcgtagaccgcagacccgtgcagctaggcggctggctgctcaggagtccagcgaggctgaggacatgagcgtccccagaggacccattgcacagtgggctgatggcgccatttccccaaatggccatcggccacagctcagagcagccagtggagaagacagcactgaggaggccctggcagctgccgctgcaccttgggaaggtggtcctgtgcctggagtggacacaagcccctttgcaaagtctctgggtcattccagaggggaggctgacctttttgattctggggacattttttccacgggcactggatctcagtccgtggagagaacaaaacccaaggcaaagatagcagagaatcctgccaacccaccagtgggtggtaaagcaaagagccccatgtttcctgctctaggcgaggccagcagtgatgatgatctctttcagtctgctaaaccaaaaccagcaaagaaaacaaatccctttcctctcctggaagatgaggatgacctctttacagatcagaaagtcaagaagaatgagacaaaatccagtagtcagcaggatgtcatattaacaacacaagatatttttgaggatgatatatttgctacggaagcaattaaaccctctcagaaaaccagagagaaggagaaaacattggaatctaatttatttgatgataacattgatatctttgctgacttaactgtaaaaccaaaagaaaagtccaaaaagaaagtggaagccaagtctatatttgatgatgatatggatgacatcttctccactggtatccaggctaagacaaccaaaccaaaaagccgatctgcacaggccgcacctgaaccaagatttgaacacaaggtgtccaacatctttgatgatcccctgaatgcctttggaggccagtagagcacacagggtatccacatgttaccctgcagctacattgttgagttagtgatgatattgtatatgctcatggtcttaactggattacaaaaagcaaatactagaacagctagctcatcttttacccaatgtacttagtatttttctgcactggtttaatcatgcttaatactacaaaacaaaaataaatatttcacagtggttggtttgttttgtttttaaaccacagtttgatttagttagccttgctggggccataatatgcttcagggtgtgtaaaagaagaaatctctttgtggctttcatgggcagggaatctcagagatagcaaatgccacctgaccagaagtctttgttatatggatgggaaccctaacttagggcttgggcaggggaaagagaaagaagatgagagattatacttcatgagtcttagcaatatgggagcaggttttcactgaattctgagggtgcctctgcatgtcctccaaggcaaagtttggcaaactgtggcccccccactgtcatattttgttaataaaattttattggaacacaatcaca

SEQ ID NO: 6703 - protein, 660 aa, Homo sapiens; identical to SEQ ID NO: 6621

SEQ ID NO: 6704 - DNA, 4421 bp, Homo sapiens
gctctgcggtcctcggcctgtgctggcagcctcggagcccaccgagccgggcggctgggatgatgaaccggacgacccccgaccaggagctggtgccggcgtcggagcccgtgtgggagcggccgtggtcggtggaggagatccgcaggagcagccagagctggtcgctggcggccgacgcgggccgtgtatatgatgaagaagtggaggagccagtactcaaggctgaggcagaaaaaacagagcaggagaagacacgagagcagaaagaagtagatctcattcctaaagtccaggaggctgtgaactatggcttacaagtattggacagtgcctttgagcaacttgatatcaaagcaggaaactcagactccgaggaagatgatgctaatgggcgggtggaactgatccttgaaccaaaggatctatacattgatcgtcctttaccatatctcattgggtcaaagctgttcatggaacaagaagatgtaggtcttggagagctgtccagtgaagaaggctctgtaggcagtgatcgtggcagtattgtggacactgaggaagagaaagaagaggaggagtcagatgaagattttgcccatcacagtgacaatgaacaaaaccagcacaccacacaaatgagtgatgaggaagaggatgatgatggctgtgacctttttgctgactctgagaaggaggaggaagatattgaggacattgaagaaaatactagacctaaaagaagcagacctacatcgtttgcagatgagctggctgcccgcatcaagggggatgccatgggtcgagtggacgaggagccgacaaccttaccctcaggagaagcaaaacctcggaagacactcaaagagaagaaggaaaggagaactccttcagacgatgaagaggataacttattcgcaccccccaagctgaccgacgaggacttctcgccatttggctctggaggtggcctgttcagtggcggcaaggggctatttgatgatgaggacgaggagagtgacctcttcacggaagcctcccaggatcggcaagctggagcctctgttaaggaggagtcttcatcatccaaacctggaaagaaaatcccagcaggagctgtttctgtatttttaggagacacggatgtgtttggtgctgcctccgttccatcactgaaggagccacagaagcctgagcagcccactccaaggaaaagcccctatggtccccctcccactggcctctttgatgatgatgatggtgatgatgatgacgactttttctcggcaccccacagcaaaccttctaaaacacgcaaagtccaatccactgccgatatctttggtgacgaagaaggagatctgttcaaagaaaaagccgtagcatcgccagaagccactgtgagtcagacagatgaaaataaagcaagagcagaaaaaaaggttaccttatcttacagcaaaaatctcaagccctcatcagaaacaaagactcaaaaaggcttattttcagatgaggaggactctgaggatttgttttcttctcaaagtgcgagtaacttaaaaggtgcatctctgctgcctggcaagctccccacgtcggtttccctgtttgatgatgaagatgaagaggataatctttttgggggtacagctgctaagaagcagacattgtctctacaagctcagagagaagagaaagcaaaagcctccgagctctccaaaaagaaagcatctgccctgttgttcagcagtgatgaggaggaccagtggaatattcctgcttcacagacccacttagcatctgacagcaggtctaaaggagaacccagggattctgggaccctccagagccaggaggccaaggctgtgaaaaagaccagtctctttgaggaagacaaagaagatgatctttttgccattgccaaggacagccaaaagaagacccagagagtgtcactcctctttgaagacgatgttgatagcggaggctctctgtttggctctcctcccacatctgttcctcctgcaacaaagaaaaaagagactgtctctgaggcaccacctttgctgttcagcgatgaagaagagaaggaggcacaacttggagtgaagtctgtggataagaaggttgagagtgccaaggagtcattaaaatttgggagaactgatgtggctgagtcagaaaaggaaggacttttgactagatctgctcaggaaacagtcaagcattctgatttattttcttcatcatccccatgggacaaaggaaccaagcctagaaccaaaactgttcttagcttgtttgatgaggaagaggataaaatggaagatcaaaacattatccaggctccacagaaagaagtaggaaagggctgcgatcctgatgcccaccccaagagcacaggtgtcttccaggatgaagagctgcttttcagccacaagctccaaaaggacaatgacccagatgttgacctttttgctggcaccaaaaaaaccaagctgttagagccaagtgttgggagcctgtttggggatgatgaagatgatgatcttttcagctctgccaagtcccagcctttggtacaagagaaaaagagagtagtgaaaaaagaccactctgttaactctttcaaaaaccagaaacatcctgaatccattcaaggtagtaaagaaaaaggcatatggaagccggaaacacctcaggcaaatttagcgatcaacccagcggccttgctgcccacagcggcttcccagatctctgaagtaaagcctgttttgccagaattggcttttccttcatctgaacacagaaggagccacggtctggaaagtgtgcctgtccttcccgggagtggggaggccggtgtgagttttgatcttccagctcaggcagacaccttacacagtgcaaacaagagccgtgtcaagatgagagggaagcgtagaccgcagacccgtgcagctaggcggctggctgctcaggagtccagcgaggctgaggacatgagcgtccccagaggacccattgcacagtgggctgatggcgccatttccccaaatggccatcggccacagctcagagcagccagtggagaagacagcactgaggaggccctggcagctgccgctgcaccttgggaaggtggtcctgtgcctggagtggacacaagcccctttgcaaagtctctgggtcattccagaggggaggctgacctttttgattctggggacattttttccacgggcactggatctcagtccgtggagagaacaaaacccaaggcaaagatagcagagaatcctgccaacccaccagtgggtggtaaagcaaagagccccatgtttcctgctctaggcgaggccagcagtgatgatgatctctttcagtctgctaaaccaaaaccagcaaagaaaacaaatccctttcctctcctggaagatgaggatgacctctttacagatcagaaagtcaagaagaatgagacaaaatccagtagtcagcaggatgtcatattaacaacacaagatatttttgaggatgatatatttgctacggaagcaattaaaccctctcagaaaaccagagagaaggagaaaacattggaatctaatttatttgatgataacattgatatctttgctgacttaactgtaaaaccaaaagaaaagtccaaaaagaaagtggaagccaagtctatatttgatgatgatatggatgacatcttctccactggtatccaggctaagacaaccaaaccaaaaagccgatctgcacaggccgcacctgaaccaagatttgaacacaaggtgtccaacatctttgatgatcccctgaatgcctttggaggccagtagagcacacagggtatccacatgttaccctgcagctacattgttgagttagtgatgatattgtatatgctcatggtcttaactggattacaaaaagcaaatactagaacagctagctcatcttttacccaatgtacttagtatttttctgcactggtttaatcatgcttaatactacaaaacaaaaataaatatttcacagtggttggtttgttttgtttttaaaccacagtttgatttagttagccttgctggggccataatatgcttcagggtgtgtaaaagaagaaatctctttgtggctttcatgggcagggaatctcagagatagcaaatgccacctgaccagaagtctttgttatatggatgggaaccctaacttagggcttgggcaggggaaagagaaagaagatgagagattatacttcatgagtcttagcaatatgggagcaggttttcactgaattctgagggtgcctctgcatgtcctccaaggcaaagtttggcaaactgtggcccccccactgtcatattttgttaataaaattttattggaacacaatcaca

SEQ ID NO: 6705 - protein, 1265 aa, Homo sapiens
MMNRTTPDQELVPASEPVWERPWSVEEIRRSSQSWSLAADAGRVYDEEVEEPVLKAEAEKTEQEKTREQKEVDLIPKVQEAVNYGLQVLDSAFEQLDIKAGNSDSEEDDANGRVELILEPKDLYIDRPLPYLIGSKLFMEQEDVGLGELSSEEGSVGSDRGSIVDTEEEKEEEESDEDFAHHSDNEQNQHTTQMSDEEEDDDGCDLFADSEKEEEDIEDIEENTRPKRSRPTSFADELAARIKGDAMGRVDEEPTTLPSGEAKPRKTLKEKKERRTPSDDEEDNLFAPPKLTDEDFSPFGSGGGLFSGGKGLFDDEDEESDLFTEASQDRQAGASVKEESSSSKPGKKIPAGAVSVFLGDTDVFGAASVPSLKEPQKPEQPTPRKSPYGPPPTGLFDDDDGDDDDDFFSAPHSKPSKTRKVQSTADIFGDEEGDLFKEKAVASPEATVSQTDENKARAEKKVTLSYSKNLKPSSETKTQKGLFSDEEDSEDLFSSQSASNLKGASLLPGKLPTSVSLFDDEDEEDNLFGGTAAKKQTLSLQAQREEKAKASELSKKKASALLFSSDEEDQWNIPASQTHLASDSRSKGEPRDSGTLQSQEAKAVKKTSLFEEDKEDDLFAIAKDSQKKTQRVSLLFEDDVDSGGSLFGSPPTSVPPATKKKETVSEAPPLLFSDEEEKEAQLGVKSVDKKVESAKESLKFGRTDVAESEKEGLLTRSAQETVKHSDLFSSSSPWDKGTKPRTKTVLSLFDEEEDKMEDQNIIQAPQKEVGKGCDPDAHPKSTGVFQDEELLFSHKLQKDNDPDVDLFAGTKKTKLLEPSVGSLFGDDEDDDLFSSAKSQPLVQEKKRVVKKDHSVNSFKNQKHPESIQGSKEKGIWKPETPQANLAINPAALLPTAASQISEVKPVLPELAFPSSEHRRSHGLESVPVLPGSGEAGVSFDLPAQADTLHSANKSRVKMRGKRRPQTRAARRLAAQESSEAEDMSVPRGPIAQWADGAISPNGHRPQLRAASGEDSTEEALAAAAAPWEGGPVPGVDTSPFAKSLGHSRGEADLFDSGDIFSTGTGSQSVERTKPKAKIAENPANPPVGGKAKSPMFPALGEASSDDDLFQSAKPKPAKKTNPFPLLEDEDDLFTDQKVKKNETKSSSQQDVILTTQDIFEDDIFATEAIKPSQKTREKEKTLESNLFDDNIDIFADLTVKPKEKSKKKVEAKSIFDDDMDDIFSTGIQAKTTKPKSRSAQAAPEPRFEHKVSNIFDDPLNAFGGQ

SEQ ID NO: 6706 - DNA, 4425 bp, Homo sapiens
gctctgcggtcctcggcctgtgctggcagcctcggagcccaccgagccgggcggctgggatgatgaaccggacgacccccgaccaggagctggtgccggcgtcggagcccgtgtgggagcggccgtggtcggtggaggagatccgcaggagcagccagagctggtcgctggcggccgacgcgggccgtgtatatgatgaagaagtggaggagccagtactcaaggctgaggcagaaaaaacagagcaggagaagacacgagagcagaaagaagtagatctcattcctaaagtccaggaggctgtgaactatggcttacaagtattggacagtgcctttgagcaacttgatatcaaagcaggaaactcagactccgaggaagatgatgctaatgggcgggtggaactgatccttgaaccaaaggatctatacattgatcgtcctttaccatatctcattgggtcaaagctgttcatggaacaagaagatgtaggtcttggagagctgtccagtgaagaaggctctgtaggcagtgatcgtggcagtattgtggacactgaggaagagaaagaagaggaggagtcagatgaagattttgcccatcacagtgacaatgaacaaaaccagaaaagaagcagacctacatcgtttgcagatgagctggctgcccgcatcaagggggatgccatgggtcgagtggacgaggagccgacaaccttaccctcaggagaagcaaaacctcggaagacactcaaagagaagaaggaaaggagaactccttcagacgatgaagaggataacttattcgcaccccccaagctgaccgacgaggacttctcgccatttggctctggaggtggcctgttcagtggcggcaaggggctatttgatgatgaggacgaggagagtgacctcttcacggaagcctcccaggatcggcaagctggagcctctgttaaggaggagtcttcatcatccaaacctggaaagaaaatcccagcaggagctgtttctgtatttttaggagacacggatgtgtttggtgctgcctccgttccatcactgaaggagccacagaagcctgagcagcccactccaaggaaaagcccctatggtccccctcccactggcctctttgatgatgatgatggtgatgatgatgacgactttttctcggcaccccacagcaaaccttctaaaacacgcaaagtccaatccactgccgatatctttggtgacgaagaaggagatctgttcaaagaaaaagccgtagcatcgccagaagccactgtgagtcagacagatgaaaataaagcaagagcagaaaaaaaggttaccttatcttacagcaaaaatctcaagccctcatcagaaacaaagactcaaaaaggcttattttcagatgaggaggactctgaggatttgttttcttctcaaagtgcgagtaacttaaaaggtgcatctctgctgcctggcaagctccccacgtcggtttccctgtttgatgatgaagatgaagaggataatctttttgggggtacagctgctaagaagcagacattgtctctacaagctcagagagaagagaaagcaaaagcctccgagctctccaaaaagaaagcatctgccctgttgttcagcagtgatgaggaggaccagtggaatattcctgcttcacagacccacttagcatctgacagcaggtctaaaggagaacccagggattctgggaccctccagagccaggaggccaaggctgtgaaaaagaccagtctctttgaggaagacaaagaagatgatctttttgccattgccaaggacagatacatcctacctcctattgttcccgaagttgtctgtcaagttttgtgtatggaaagtaattcataccttcatcagatctcaaaagaagctttacacacacaagaagaagttgagccaaaagaagacccagagagtgtcactcctctttgaagacgatgttgatagcggaggctctctgtttggctctcctcccacatctgttcctcctgcaacaaagaaaaaagagactgtctctgaggcaccacctttgctgttcagcgatgaagaagagaaggaggcacaacttggagtgaagtctgtggataagaaggttgagagtgccaaggagtcattaaaatttgggagaactgatgtggctgagtcagaaaaggaaggacttttgactagatctgctcaggaaacagtcaagcattctgatttattttcttcatcatccccatgggacaaaggaaccaagcctagaaccaaaactgttcttagcttgtttgatgaggaagaggataaaatggaagatcaaaacattatccaggctccacagaaagaagtaggaaagggctgcgatcctgatgcccaccccaagagcacaggtgtcttccaggatgaagagctgcttttcagccacaagctccaaaaggacaatgacccagatgttgacctttttgctggcaccaaaaaaaccaagctgttagagccaagtgttgggagcctgtttggggatgatgaagatgatgatcttttcagctctgccaagtcccagcctttggtacaagagaaaaagagagtagtgaaaaaagaccactctgttaactctttcaaaaaccagaaacatcctgaatccattcaaggtagtaaagaaaaaggcatatggaagccggaaacacctcaggcaaatttagcgatcaacccagcggccttgctgcccacagcggcttcccagatctctgaagtaaagcctgttttgccagaattggcttttccttcatctgaacacagaaggagccacggtctggaaagtgtgcctgtccttcccgggagtggggaggccggtgtgagttttgatcttccagctcaggcagacaccttacacagtgcaaacaagagccgtgtcaagatgagagggaagcgtagaccgcagacccgtgcagctaggcggctggctgctcaggagtccagcgaggctgaggacatgagcgtccccagaggacccattgcacagtgggctgatggcgccatttccccaaatggccatcggccacagctcagagcagccagtggagaagacagcactgaggaggccctggcagctgccgctgcaccttgggaaggtggtcctgtgcctggagtggacacaagcccctttgcaaagtctctgggtcattccagaggggaggctgacctttttgattctggggacattttttccacgggcactggatctcagtccgtggagagaacaaaacccaaggcaaagatagcagagaatcctgccaacccaccagtgggtggtaaagcaaagagccccatgtttcctgctctaggcgaggccagcagtgatgatgatctctttcagtctgctaaaccaaaaccagcaaagaaaacaaatccctttcctctcctggaagatgaggatgacctctttacagatcagaaagtcaagaagaatgagacaaaatccagtagtcagcaggatgtcatattaacaacacaagatatttttgaggatgatatatttgctacggaagcaattaaaccctctcagaaaaccagagagaaggagaaaacattggaatctaatttatttgatgataacattgatatctttgctgacttaactgtaaaaccaaaagaaaagtccaaaaagaaagtggaagccaagtctatatttgatgatgatatggatgacatcttctccactggtatccaggctaagacaaccaaaccaaaaagccgatctgcacaggccgcacctgaaccaagatttgaacacaaggtgtccaacatctttgatgatcccctgaatgcctttggaggccagtagagcacacagggtatccacatgttaccctgcagctacattgttgagttagtgatgatattgtatatgctcatggtcttaactggattacaaaaagcaaatactagaacagctagctcatcttttacccaatgtacttagtatttttctgcactggtttaatcatgcttaatactacaaaacaaaaataaatatttcacagtggttggtttgttttgtttttaaaccacagtttgatttagttagccttgctggggccataatatgcttcagggtgtgtaaaagaagaaatctctttgtggctttcatgggcagggaatctcagagatagcaaatgccacctgaccagaagtctttgttatatggatgggaaccctaacttagggcttgggcaggggaaagagaaagaagatgagagattatacttcatgagtcttagcaatatgggagcaggttttcactgaattctgagggtgcctctgcatgtcctccaaggcaaagtttggcaaactgtggcccccccactgtcatattttgttaataaaattttattggaacacaatcaca

SEQ ID NO: 6707 - protein, 688 aa, Homo sapiens; identical to SEQ ID NO: 6613

SEQ ID NO: 6708 - DNA, 3987 bp, Homo sapiens
gctctgcggtcctcggcctgtgctggcagcctcggagcccaccgagccgggcggctgggatgatgaaccggacgacccccgaccaggagctggtgccggcgtcggagcccgtgtgggagcggccgtggtcggtggaggagatccgcaggagcagccagagctggtcgctggcggccgacgcgggccgtgtatatgatgaagaagtggaggagccagtactcaaggctgaggcagaaaaaacagagcaggagaagacacgagagcagaaagaagtagatctcattcctaaagtccaggaggctgtgaactatggcttacaagtattggacagtgcctttgagcaacttgatatcaaagcaggaaactcagactccgaggaagatgatgctaatgggcgggtggaactgatccttgaaccaaaggatctatacattgatcgtcctttaccatatctcattgggtcaaagctgttcatggaacaagaagatgtaggtcttggagagctgtccagtgaagaaggctctgtaggcagtgatcgtggcagtattgtggacactgaggaagagaaagaagaggaggagtcagatgaagattttgcccatcacagtgacaatgaacaaaaccagaaaagaagcagacctacatcgtttgcagatgagctggctgcccgcatcaagggggatgccatgggtcgagtggacgaggagccgacaaccttaccctcaggagaagcaaaacctcggaagacactcaaagagaagaaggaaaggagaactccttcagacgatgaagaggataacttattcgcaccccccaagctgaccgacgaggacttctcgccatttggctctggaggtggcctgttcagtggcggcaaggggctatttgatgatgaggacgaggagagtgacctcttcacggaagcctcccaggatcggcaagctggagcctctgttaaggaggagtcttcatcatccaaacctggaaagaaaatcccagcaggagctgtttctgtatttttaggagacacggatgtgtttggtgctgcctccgttccatcactgaaggagccacagaagcctgagcagcccactccaaggaaaagcccctatggtccccctcccactggcctctttgatgatgatgatggtgatgatgatgacgactttttctcggcaccccacagcaaaccttctaaaacacgcaaagtccaatccactgccgatatctttggtgacgaagaaggagatctgttcaaagaaaaagccgtagcatcgccagaagccactgtgagtcagacagatgaaaataaagcaagagcagaaaaaaaggttaccttatcttacagcaaaaatctcaagccctcatcagaaacaaagactcaaaaaggcttattttcagatgaggaggactctgaggatttgttttcttctcaaagtgcgagtaacttaaaaggtgcatctctgctgcctggcaagctccccacgtcggtttccctgtttgatgatgaagatgaagaggataatctttttgggggtacagctgctaagaagcagacattgtctctacaagctcagagagaagagaaagcaaaagcctccgagctctccaaaaagaaagcatctgccctgttgttcagcagtgatgaggagccaaaagaagacccagagagtgtcactcctctttgaagacgatgttgatagcggaggctctctgtttggctctcctcccacatctgttcctcctgcaacaaaggaaggacttttgactagatctgctcaggaaacagtcaagcattctgatttattttcttcatcatccccatgggacaaaggaaccaagcctagaaccaaaactgttcttagcttgtttgatgaggaagaggataaaatggaagatcaaaacattatccaggctccacagaaagaagtaggaaagggctgcgatcctgatgcccaccccaagagcacaggtgtcttccaggatgaagagctgcttttcagccacaagctccaaaaggacaatgacccagatgttgacctttttgctggcaccaaaaaaaccaagctgttagagccaagtgttgggagcctgtttggggatgatgaagatgatgatcttttcagctctgccaagtcccagcctttggtacaagagaaaaagagagtagtgaaaaaagaccactctgttaactctttcaaaaaccagaaacatcctgaatccattcaaggtagtaaagaaaaaggcatatggaagccggaaacacctcaggcaaatttagcgatcaacccagcggccttgctgcccacagcggcttcccagatctctgaagtaaagcctgttttgccagaattggcttttccttcatctgaacacagaaggagccacggtctggaaagtgtgcctgtccttcccgggagtggggaggccggtgtgagttttgatcttccagctcaggcagacaccttacacagtgcaaacaagagccgtgtcaagatgagagggaagcgtagaccgcagacccgtgcagctaggcggctggctgctcaggagtccagcgaggctgaggacatgagcgtccccagaggacccattgcacagtgggctgatggcgccatttccccaaatggccatcggccacagctcagagcagccagtggagaagacagcactgaggaggccctggcagctgccgctgcaccttgggaaggtggtcctgtgcctggagtggacacaagcccctttgcaaagtctctgggtcattccagaggggaggctgacctttttgattctggggacattttttccacgggcactggatctcagtccgtggagagaacaaaacccaaggcaaagatagcagagaatcctgccaacccaccagtgggtggtaaagcaaagagccccatgtttcctgctctaggcgaggccagcagtgatgatgatctctttcagtctgctaaaccaaaaccagcaaagaaaacaaatccctttcctctcctggaagatgaggatgacctctttacagatcagaaagtcaagaagaatgagacaaaatccagtagtcagcaggatgtcatattaacaacacaagatatttttgaggatgatatatttgctacggaagcaattaaaccctctcagaaaaccagagagaaggagaaaacattggaatctaatttatttgatgataacattgatatctttgctgacttaactgtaaaaccaaaagaaaagtccaaaaagaaagtggaagccaagtctatatttgatgatgatatggatgacatcttctccactggtatccaggctaagacaaccaaaccaaaaagccgatctgcacaggccgcacctgaaccaagatttgaacacaaggtgtccaacatctttgatgatcccctgaatgcctttggaggccagtagagcacacagggtatccacatgttaccctgcagctacattgttgagttagtgatgatattgtatatgctcatggtcttaactggattacaaaaagcaaatactagaacagctagctcatcttttacccaatgtacttagtatttttctgcactggtttaatcatgcttaatactacaaaacaaaaataaatatttcacagtggttggtttgttttgtttttaaaccacagtttgatttagttagccttgctggggccataatatgcttcagggtgtgtaaaagaagaaatctctttgtggctttcatgggcagggaatctcagagatagcaaatgccacctgaccagaagtctttgttatatggatgggaaccctaacttagggcttgggcaggggaaagagaaagaagatgagagattatacttcatgagtcttagcaatatgggagcaggttttcactgaattctgagggtgcctctgcatgtcctccaaggcaaagtttggcaaactgtggcccccccactgtcatattttgttaataaaattttattggaacacaatcaca

SEQ ID NO: 6709 - protein, 639 aa, Homo sapiens; identical to SEQ ID NO: 6629

SEQ ID NO: 6710 - DNA, 4449 bp, Homo sapiens
gctctgcggtcctcggcctgtgctggcagcctcggagcccaccgagccgggcggctgggatgatgaaccggacgacccccgaccaggagctggtgccggcgtcggagcccgtgtgggagcggccgtggtcggtggaggagatccgcaggagcagccagagctggtcgctggcggccgacgcgggccgtgtatatgatgaagaagtggaggagccagtactcaaggctgaggcagaaaaaacagagcaggagaagacacgagagcagaaagaagtagatctcattcctaaagtccaggaggctgtgaactatggcttacaagtattggacagtgcctttgagcaacttgatatcaaagcaggaaactcagactccgaggaagatgatgctaatgggcgggtggaactgatccttgaaccaaaggatctatacattgatcgtcctttaccatatctcattgggtcaaagctgttcatggaacaagaagatgtaggtcttggagagctgtccagtgaagaaggctctgtaggcagtgatcgtggcagtattgtggacactgaggaagagaaagaagaggaggagtcagatgaagattttgcccatcacagtgacaatgaacaaaaccagcacaccacacaaatgagtgatgaggaagaggatgatgatggctgtgacctttttgctgactctgagaaggaggaggaagatattgaggacattgaagaaaatactagacctaaaagaagcagacctacatcgtttgcagatgagctggctgcccgcatcaagggggatgccatgggtcgagtggacgaggagccgacaaccttaccctcaggagaagcaaaacctcggaagacactcaaagagaagaaggaaaggagaactccttcagacgatgaagaggataacttattcgcaccccccaagctgaccgacgaggacttctcgccatttggctctggaggtggcctgttcagtggcggcaaggggctatttgatgatgaggacgaggagagtgacctcttcacggaagcctcccaggatcggcaagctggagcctctgttaaggaggagtcttcatcatccaaacctggaaagaaaatcccagcaggagctgtttctgtatttttaggagacacggatgtgtttggtgctgcctccgttccatcactgaaggagccacagaagcctgagcagcccactccaaggaaaagcccctatggtccccctcccactggcctctttgatgatgatgatggtgatgatgatgacgactttttctcggcaccccacagcaaaccttctaaaacacgcaaagtccaatccactgccgatatctttggtgacgaagaaggagatctgttcaaagaaaaagccgtagcatcgccagaagccactgtgagtcagacagatgaaaataaagcaagagcagaaaaaaaggatttgttttcttctcaaagtgcgagtaacttaaaaggtgcatctctgctgcctggcaagctccccacgtcggtttccctgtttgatgatgaagatgaagaggataatctttttgggggtacagctgctaagaagcagacattgtctctacaagctcagagagaagagaaagcaaaagcctccgagctctccaaaaagaaagcatctgccctgttgttcagcagtgatgaggaggaccagtggaatattcctgcttcacagacccacttagcatctgacagcaggtctaaaggagaacccagggattctgggaccctccagagccaggaggccaaggctgtgaaaaagaccagtctctttgaggaagacaaagaagatgatctttttgccattgccaaggacagatacatcctacctcctattgttcccgaagttgtctgtcaagttttgtgtatggaaagtaattcataccttcatcagatctcaaaagaagctttacacacacaagaagaagttgagccaaaagaagacccagagagtgtcactcctctttgaagacgatgttgatagcggaggctctctgtttggctctcctcccacatctgttcctcctgcaacaaagaaaaaagagactgtctctgaggcaccacctttgctgttcagcgatgaagaagagaaggaggcacaacttggagtgaagtctgtggataagaaggttgagagtgccaaggagtcattaaaatttgggagaactgatgtggctgagtcagaaaaggaaggacttttgactagatctgctcaggaaacagtcaagcattctgatttattttcttcatcatccccatgggacaaaggaaccaagcctagaaccaaaactgttcttagcttgtttgatgaggaagaggataaaatggaagatcaaaacattatccaggctccacagaaagaagtaggaaagggctgcgatcctgatgcccaccccaagagcacaggtgtcttccaggatgaagagctgcttttcagccacaagctccaaaaggacaatgacccagatgttgacctttttgctggcaccaaaaaaaccaagctgttagagccaagtgttgggagcctgtttggggatgatgaagatgatgatcttttcagctctgccaagtcccagcctttggtacaagagaaaaagagagtagtgaaaaaagaccactctgttaactctttcaaaaaccagaaacatcctgaatccattcaaggtagtaaagaaaaaggcatatggaagccggaaacacctcaggcaaatttagcgatcaacccagcggccttgctgcccacagcggcttcccagatctctgaagtaaagcctgttttgccagaattggcttttccttcatctgaacacagaaggagccacggtctggaaagtgtgcctgtccttcccgggagtggggaggccggtgtgagttttgatcttccagctcaggcagacaccttacacagtgcaaacaagagccgtgtcaagatgagagggaagcgtagaccgcagacccgtgcagctaggcggctggctgctcaggagtccagcgaggctgaggacatgagcgtccccagaggacccattgcacagtgggctgatggcgccatttccccaaatggccatcggccacagctcagagcagccagtggagaagacagcactgaggaggccctggcagctgccgctgcaccttgggaaggtggtcctgtgcctggagtggacacaagcccctttgcaaagtctctgggtcattccagaggggaggctgacctttttgattctggggacattttttccacgggcactggatctcagtccgtggagagaacaaaacccaaggcaaagatagcagagaatcctgccaacccaccagtgggtggtaaagcaaagagccccatgtttcctgctctaggcgaggccagcagtgatgatgatctctttcagtctgctaaaccaaaaccagcaaagaaaacaaatccctttcctctcctggaagatgaggatgacctctttacagatcagaaagtcaagaagaatgagacaaaatccagtagtcagcaggatgtcatattaacaacacaagatatttttgaggatgatatatttgctacggaagcaattaaaccctctcagaaaaccagagagaaggagaaaacattggaatctaatttatttgatgataacattgatatctttgctgacttaactgtaaaaccaaaagaaaagtccaaaaagaaagtggaagccaagtctatatttgatgatgatatggatgacatcttctccactggtatccaggctaagacaaccaaaccaaaaagccgatctgcacaggccgcacctgaaccaagatttgaacacaaggtgtccaacatctttgatgatcccctgaatgcctttggaggccagtagagcacacagggtatccacatgttaccctgcagctacattgttgagttagtgatgatattgtatatgctcatggtcttaactggattacaaaaagcaaatactagaacagctagctcatcttttacccaatgtacttagtatttttctgcactggtttaatcatgcttaatactacaaaacaaaaataaatatttcacagtggttggtttgttttgtttttaaaccacagtttgatttagttagccttgctggggccataatatgcttcagggtgtgtaaaagaagaaatctctttgtggctttcatgggcagggaatctcagagatagcaaatgccacctgaccagaagtctttgttatatggatgggaaccctaacttagggcttgggcaggggaaagagaaagaagatgagagattatacttcatgagtcttagcaatatgggagcaggttttcactgaattctgagggtgcctctgcatgtcctccaaggcaaagtttggcaaactgtggcccccccactgtcatattttgttaataaaattttattggaacacaatcaca

SEQ ID NO: 6711 - protein, 688 aa, Homo sapiens; identical to SEQ ID NO: 6613

SEQ ID NO: 6712 - DNA, 4599 bp, Homo sapiens
gctctgcggtcctcggcctgtgctggcagcctcggagcccaccgagccgggcggctgggatgatgaaccggacgacccccgaccaggagctggtgccggcgtcggagcccgtgtgggagcggccgtggtcggtggaggagatccgcaggagcagccagagctggtcgctggcggccgacgcgggccgtgtatatgatgaagaagtggaggagccagtactcaaggctgaggcagaaaaaacagagcaggagaagacacgagagcagaaagaagtagatctcattcctaaagtccaggaggctgtgaactatggcttacaagtattggacagtgcctttgagcaacttgatatcaaagcaggaaactcagactccgaggaagatgatgctaatgggcgggtggaactgatccttgaaccaaaggatctatacattgatcgtcctttaccatatctcattgggtcaaagctgttcatggaacaagaagatgtaggtcttggagagctgtccagtgaagaaggctctgtaggcagtgatcgtggcagtattgtggacactgaggaagagaaagaagaggaggagtcagatgaagattttgcccatcacagtgacaatgaacaaaaccagcacaccacacaaatgagtgatgaggaagaggatgatgatggctgtgacctttttgctgactctgagaaggaggaggaagatattgaggacattgaagaaaatactagacctaaaagaagcagacctacatcgtttgcagatgagctggctgcccgcatcaagggggatgccatgggtcgagtggacgaggagccgacaaccttaccctcaggagaagcaaaacctcggaagacactcaaagagaagaaggaaaggagaactccttcagacgatgaagaggataacttattcgcaccccccaagctgaccgacgaggacttctcgccatttggctctggaggtggcctgttcagtggcggcaaggggctatttgatgatgaggacgaggagagtgacctcttcacggaagcctcccaggatcggcaagctggagcctctgttaaggaggagtcttcatcatccaaacctggaaagaaaatcccagcaggagctgtttctgtatttttaggagacacggatgtgtttggtgctgcctccgttccatcactgaaggagccacagaagcctgagcagcccactccaaggaaaagcccctatggtccccctcccactggcctctttgatgatgatgatggtgatgatgatgacgactttttctcggcaccccacagcaaaccttctaaaacacgcaaagtccaatccactgccgatatctttggtgacgaagaaggagatctgttcaaagaaaaagccgtagcatcgccagaagccactgtgagtcagacagatgaaaataaagcaagagcagaaaaaaaggttaccttatcttacagcaaaaatctcaagccctcatcagaaacaaagactcaaaaaggcttattttcagatgaggaggactctgaggatttgttttcttctcaaagtgcgagtaacttaaaaggtgcatctctgctgcctggcaagctccccacgtcggtttccctgtttgatgatgaagatgaagaggataatctttttgggggtacagctgctaagaagcagacattgtctctacaagctcagagagaagagaaagcaaaagcctccgagctctccaaaaagaaagcatctgccctgttgttcagcagtgatgaggaggaccagtggaatattcctgcttcacagacccacttagcatctgacagcaggtctaaaggagaacccagggattctgggaccctccagagccaggaggccaaggctgtgaaaaagaccagtctctttgaggaagacaaagaagatgatctttttgccattgccaaggacagatacatcctacctcctattgttcccgaagttgtctgtcaagttttgtgtatggaaagtaattcataccttcatcagatctcaaaagaagctttacacacacaagaagaagttgagccaaaagaagacccagagagtgtcactcctctttgaagacgatgttgatagcggaggctctctgtttggctctcctcccacatctgttcctcctgcaacaaagaaaaaagagactgtctctgaggcaccacctttgctgttcagcgatgaagaagagaaggaggcacaacttggagtgaagtctgtggataagaaggttgagagtgccaaggagtcattaaaatttgggagaactgatgtggctgagtcagaaaaggaaggacttttgactagatctgctcaggaaacagtcaagcattctgatttattttcttcatcatccccatgggacaaaggaaccaagcctagaaccaaaactgttcttagcttgtttgatgaggaagaggataaaatggaagatcaaaacattatccaggctccacagaaagaagtaggaaagggctgcgatcctgatgcccaccccaagagcacaggtgtcttccaggatgaagagctgcttttcagccacaagctccaaaaggacaatgacccagatgttgacctttttgctggcaccaaaaaaaccaagctgttagagccaagtgttgggagcctgtttggggatgatgaagatgatgatcttttcagctctgccaagtcccagcctttggtacaagagaaaaagagagtagtgaaaaaagaccactctgttaactctttcaaaaaccagaaacatcctgaatccattcaaggtagtaaagaaaaaggcatatggaagccggaaacacctcaggactcatcaggtctcgctccatttaaaaccaaagaaccatccactcggatcgggaagatacaagcaaatttagcgatcaacccagcggccttgctgcccacagcggcttcccagatctctgaagtaaagcctgttttgccagaattggcttttccttcatctgaacacagaaggagccacggtctggaaagtgtgcctgtccttcccgggagtggggaggccggtgtgagttttgatcttccagctcaggcagacaccttacacagtgcaaacaagagccgtgtcaagatgagagggaagcgtagaccgcagacccgtgcagctaggcggctggctgctcaggagtccagcgaggctgaggacatgagcgtccccagaggacccattgcacagtgggctgatggcgccatttccccaaatggccatcggccacagctcagagcagccagtggagaagacagcactgaggaggccctggcagctgccgctgcaccttgggaaggtggtcctgtgcctggagtggacacaagcccctttgcaaagtctctgggtcattccagaggggaggctgacctttttgattctggggacattttttccacgggcactggatctcagtccgtggagagaacaaaacccaaggcaaagatagcagagaatcctgccaacccaccagtgggtggtaaagcaaagagccccatgtttcctgctctaggcgaggccagcagtgatgatgatctctttcagtctgctaaaccaaaaccagcaaagaaaacaaatccctttcctctcctggaagatgaggatgacctctttacagatcagaaagtcaagaagaatgagacaaaatccagtagtcagcaggatgtcatattaacaacacaagatatttttgaggatgatatatttgctacggaagcaattaaaccctctcagaaaaccagagagaaggagaaaacattggaatctaatttatttgatgataacattgatatctttgctgacttaactgtaaaaccaaaagaaaagtccaaaaagaaagtggaagccaagtctatatttgatgatgatatggatgacatcttctccactggtatccaggctaagacaaccaaaccaaaaagccgatctgcacaggccgcacctgaaccaagatttgaacacaaggtgtccaacatctttgatgatcccctgaatgcctttggaggccagtagagcacacagggtatccacatgttaccctgcagctacattgttgagttagtgatgatattgtatatgctcatggtcttaactggattacaaaaagcaaatactagaacagctagctcatcttttacccaatgtacttagtatttttctgcactggtttaatcatgcttaatactacaaaacaaaaataaatatttcacagtggttggtttgttttgtttttaaaccacagtttgatttagttagccttgctggggccataatatgcttcagggtgtgtaaaagaagaaatctctttgtggctttcatgggcagggaatctcagagatagcaaatgccacctgaccagaagtctttgttatatggatgggaaccctaacttagggcttgggcaggggaaagagaaagaagatgagagattatacttcatgagtcttagcaatatgggagcaggttttcactgaattctgagggtgcctctgcatgtcctccaaggcaaagtttggcaaactgtggcccccccactgtcatattttgttaataaaattttattggaacacaatcaca

SEQ ID NO: 6713 - protein, 709 aa, Homo sapiens; identical to SEQ ID NO: 6611

SEQ ID NO: 6714 - DNA, 4223 bp, Homo sapiens
gctctgcggtcctcggcctgtgctggcagcctcggagcccaccgagccgggcggctgggatgatgaaccggacgacccccgaccaggagctggtgccggcgtcggagcccgtgtgggagcggccgtggtcggtggaggagatccgcaggagcagccagagctggtcgctggcggccgacgcgggccgtgtatatgatgaagaagtggaggagccagtactcaaggctgaggcagaaaaaacagagcaggagaagacacgagagcagaaagaagtagatctcattcctaaagtccaggaggctgtgaactatggcttacaagtattggacagtgcctttgagcaacttgatatcaaagcaggaaactcagactccgaggaagatgatgctaatgggcgggtggaactgatccttgaaccaaaggatctatacattgatcgtcctttaccatatctcattgggtcaaagctgttcatggaacaagaagatgtaggtcttggagagctgtccagtgaagaaggctctgtaggcagtgatcgtggcagtattgtggacactgaggaagagaaagaagaggaggagtcagatgaagattttgcccatcacagtgacaatgaacaaaaccagaaaagaagcagacctacatcgtttgcagatgagctggctgcccgcatcaagggggatgccatgggtcgagtggacgaggagccgacaaccttaccctcaggagaagcaaaacctcggaagacactcaaagagaagaaggaaaggagaactccttcagacgatgaagaggataacttattcgcaccccccaagctgaccgacgaggacttctcgccatttggctctggaggtggcctgttcagtggcggcaaggggctatttgatgatgaggacgaggagagtgacctcttcacggaagcctcccaggatcggcaagctggagcctctgttaaggaggagtcttcatcatccaaacctggaaagaaaatcccagcaggagctgtttctgtatttttaggagacacggatgtgtttggtgctgcctccgttccatcactgaaggagccacagaagcctgagcagcccactccaaggaaaagcccctatggtccccctcccactggcctctttgatgatgatgatggtgatgatgatgacgactttttctcggcaccccacagcaaaccttctaaaacacgcaaagtccaatccactgccgatatctttggtgacgaagaaggagatctgttcaaagaaaaagccgtagcatcgccagaagccactgtgagtcagacagatgaaaataaagcaagagcagaaaaaaaggatttgttttcttctcaaagtgcgagtaacttaaaaggtgcatctctgctgcctggcaagctccccacgtcggtttccctgtttgatgatgaagatgaagaggataatctttttgggggtacagctgctaagaagcagacattgtctctacaagctcagagagaagagaaagcaaaagcctccgagctctccaaaaagaaagcatctgccctgttgttcagcagtgatgaggaggaccagtggaatattcctgcttcacagacccacttagcatctgacagcaggtctaaaggagaacccagggattctgggaccctccagagccaggaggccaaggctgtgaaaaagaccagtctctttgaggaagacaaagaagatgatctttttgccattgccaaggacagccaaaagaagacccagagagtgtcactcctctttgaagacgatgttgatagcggaggctctctgtttggctctcctcccacatctgttcctcctgcaacaaagaaaaaagagactgtctctgaggcaccacctttgctgttcagcgatgaagaagagaaggaggcacaacttggagtgaagtctgtggataagaaggttgagagtgccaaggagtcattaaaatttgggagaactgatgtggctgagtcagaaaaggaaggacttttgactagatctgctcaggaaacagtcaagcattctgatttattttcttcatcatccccatgggacaaaggaaccaagcctagaaccaaaactgttcttagcttgtttgatgaggaagaggataaaatggaagatcaaaacattatccaggctccacagaaagaagtaggaaagggctgcgatcctgatgcccaccccaagagcacaggtgtcttccaggatgaagagctgcttttcagccacaagctccaaaaggacaatgacccagatgttgacctttttgctggcaccaaaaaaaccaagctgttagagccaagtgttgggagcctgtttggggatgatgaagatgatgatcttttcagctctgccaagtcccagcctttggtacaagagaaaaagagagtagtgaaaaaagaccactctgttaactctttcaaaaaccagaaacatcctgaatccattcaaggtagtaaagaaaaaggcatatggaagccggaaacacctcaggcaaatttagcgatcaacccagcggccttgctgcccacagcggcttcccagatctctgaagtaaagcctgttttgccagaattggcttttccttcatctgaacacagaaggagccacggtctggaaagtgtgcctgtccttcccgggagtggggaggccggtgtgagttttgatcttccagctcaggcagacaccttacacagtgcaaacaagagccgtgtcaagatgagagggaagcgtagaccgcagacccgtgcagctaggcggctggctgctcaggagtccagcgaggctgaggacatgagcgtccccagaggacccattgcacagtgggctgatggcgccatttccccaaatggccatcggccacagctcagagcagccagtggagaagacagcactgaggaggccctggcagctgccgctgcaccttgggaaggtggtcctgtgcctggagtggacacaagcccctttgcaaagtctctgggtcattccagaggggaggctgacctttttgattctggggacattttttccacgggcactggatctcagtccgtggagagaacaaaacccaaggcaaagatagcagagaatcctgccaacccaccagtgggtggtaaagcaaagagccccatgtttcctgctctaggcgaggccagcagtgatgatgatctctttcagtctgctaaaccaaaaccagcaaagaaaacaaatccctttcctctcctggaagatgaggatgacctctttacagatcagaaagtcaagaagaatgagacaaaatccagtagtcagcaggatgtcatattaacaacacaagatatttttgaggatgatatatttgctacggaagcaattaaaccctctcagaaaaccagagagaaggagaaaacattggaatctaatttatttgatgataacattgatatctttgctgacttaactgtaaaaccaaaagaaaagtccaaaaagaaagtggaagccaagtctatatttgatgatgatatggatgacatcttctccactggtatccaggctaagacaaccaaaccaaaaagccgatctgcacaggccgcacctgaaccaagatttgaacacaaggtgtccaacatctttgatgatcccctgaatgcctttggaggccagtagagcacacagggtatccacatgttaccctgcagctacattgttgagttagtgatgatattgtatatgctcatggtcttaactggattacaaaaagcaaatactagaacagctagctcatcttttacccaatgtacttagtatttttctgcactggtttaatcatgcttaatactacaaaacaaaaataaatatttcacagtggttggtttgttttgtttttaaaccacagtttgatttagttagccttgctggggccataatatgcttcagggtgtgtaaaagaagaaatctctttgtggctttcatgggcagggaatctcagagatagcaaatgccacctgaccagaagtctttgttatatggatgggaaccctaacttagggcttgggcaggggaaagagaaagaagatgagagattatacttcatgagtcttagcaatatgggagcaggttttcactgaattctgagggtgcctctgcatgtcctccaaggcaaagtttggcaaactgtggcccccccactgtcatattttgttaataaaattttattggaacacaatcaca

SEQ ID NO: 6715 - protein, 1199 aa, Homo sapiens
MMNRTTPDQELVPASEPVWERPWSVEEIRRSSQSWSLAADAGRVYDEEVEEPVLKAEAEKTEQEKTREQKEVDLIPKVQEAVNYGLQVLDSAFEQLDIKAGNSDSEEDDANGRVELILEPKDLYIDRPLPYLIGSKLFMEQEDVGLGELSSEEGSVGSDRGSIVDTEEEKEEEESDEDFAHHSDNEQNQKRSRPTSFADELAARIKGDAMGRVDEEPTTLPSGEAKPRKTLKEKKERRTPSDDEEDNLFAPPKLTDEDFSPFGSGGGLFSGGKGLFDDEDEESDLFTEASQDRQAGASVKEESSSSKPGKKIPAGAVSVFLGDTDVFGAASVPSLKEPQKPEQPTPRKSPYGPPPTGLFDDDDGDDDDDFFSAPHSKPSKTRKVQSTADIFGDEEGDLFKEKAVASPEATVSQTDENKARAEKKDLFSSQSASNLKGASLLPGKLPTSVSLFDDEDEEDNLFGGTAAKKQTLSLQAQREEKAKASELSKKKASALLFSSDEEDQWNIPASQTHLASDSRSKGEPRDSGTLQSQEAKAVKKTSLFEEDKEDDLFAIAKDSQKKTQRVSLLFEDDVDSGGSLFGSPPTSVPPATKKKETVSEAPPLLFSDEEEKEAQLGVKSVDKKVESAKESLKFGRTDVAESEKEGLLTRSAQETVKHSDLFSSSSPWDKGTKPRTKTVLSLFDEEEDKMEDQNIIQAPQKEVGKGCDPDAHPKSTGVFQDEELLFSHKLQKDNDPDVDLFAGTKKTKLLEPSVGSLFGDDEDDDLFSSAKSQPLVQEKKRVVKKDHSVNSFKNQKHPESIQGSKEKGIWKPETPQANLAINPAALLPTAASQISEVKPVLPELAFPSSEHRRSHGLESVPVLPGSGEAGVSFDLPAQADTLHSANKSRVKMRGKRRPQTRAARRLAAQESSEAEDMSVPRGPIAQWADGAISPNGHRPQLRAASGEDSTEEALAAAAAPWEGGPVPGVDTSPFAKSLGHSRGEADLFDSGDIFSTGTGSQSVERTKPKAKIAENPANPPVGGKAKSPMFPALGEASSDDDLFQSAKPKPAKKTNPFPLLEDEDDLFTDQKVKKNETKSSSQQDVILTTQDIFEDDIFATEAIKPSQKTREKEKTLESNLFDDNIDIFADLTVKPKEKSKKKVEAKSIFDDDMDDIFSTGIQAKTTKPKSRSAQAAPEPRFEHKVSNIFDDPLNAFGGQ

SEQ ID NO: 6716 - DNA, 4488 bp, Homo sapiens
gctctgcggtcctcggcctgtgctggcagcctcggagcccaccgagccgggcggctgggatgatgaaccggacgacccccgaccaggagctggtgccggcgtcggagcccgtgtgggagcggccgtggtcggtggaggagatccgcaggagcagccagagctggtcgctggcggccgacgcgggccgtgtatatgatgaagaagtggaggagccagtactcaaggctgaggcagaaaaaacagagcaggagaagacacgagagcagaaagaagtagatctcattcctaaagtccaggaggctgtgaactatggcttacaagtattggacagtgcctttgagcaacttgatatcaaagcaggaaactcagactccgaggaagatgatgctaatgggcgggtggaactgatccttgaaccaaaggatctatacattgatcgtcctttaccatatctcattgggtcaaagctgttcatggaacaagaagatgtaggtcttggagagctgtccagtgaagaaggctctgtaggcagtgatcgtggcagtattgtggacactgaggaagagaaagaagaggaggagtcagatgaagattttgcccatcacagtgacaatgaacaaaaccagaaaagaagcagacctacatcgtttgcagatgagctggctgcccgcatcaagggggatgccatgggtcgagtggacgaggagccgacaaccttaccctcaggagaagcaaaacctcggaagacactcaaagagaagaaggaaaggagaactccttcagacgatgaagaggataacttattcgcaccccccaagctgaccgacgaggacttctcgccatttggctctggaggtggcctgttcagtggcggcaaggggctatttgatgatgaggacgaggagagtgacctcttcacggaagcctcccaggatcggcaagctggagcctctgttaaggaggagtcttcatcatccaaacctggaaagaaaatcccagcaggagctgtttctgtatttttaggagacacggatgtgtttggtgctgcctccgttccatcactgaaggagccacagaagcctgagcagcccactccaaggaaaagcccctatggtccccctcccactggcctctttgatgatgatgatggtgatgatgatgacgactttttctcggcaccccacagcaaaccttctaaaacacgcaaagtccaatccactgccgatatctttggtgacgaagaaggagatctgttcaaagaaaaagccgtagcatcgccagaagccactgtgagtcagacagatgaaaataaagcaagagcagaaaaaaaggttaccttatcttacagcaaaaatctcaagccctcatcagaaacaaagactcaaaaaggcttattttcagatgaggaggactctgaggatttgttttcttctcaaagtgcgagtaacttaaaaggtgcatctctgctgcctggcaagctccccacgtcggtttccctgtttgatgatgaagatgaagaggataatctttttgggggtacagctgctaagaagcagacattgtctctacaagctcagagagaagagaaagcaaaagcctccgagctctccaaaaagaaagcatctgccctgttgttcagcagtgatgaggaggaccagtggaatattcctgcttcacagacccacttagcatctgacagcaggtctaaaggagaacccagggattctgggaccctccagagccaggaggccaaggctgtgaaaaagaccagtctctttgaggaagacaaagaagatgatctttttgccattgccaaggacagatacatcctacctcctattgttcccgaagttgtctgtcaagttttgtgtatggaaagtaattcataccttcatcagatctcaaaagaagctttacacacacaagaagaagttgagccaaaagaagacccagagagtgtcactcctctttgaagacgatgttgatagcggaggctctctgtttggctctcctcccacatctgttcctcctgcaacaaagaaaaaagagactgtctctgaggcaccacctttgctgttcagcgatgaagaagagaaggaggcacaacttggagtgaagtctgtggataagaaggttgagagtgccaaggagtcattaaaatttgggagaactgatgtggctgagtcagaaaaggaaggacttttgactagatctgctcaggaaacagtcaagcattctgatttattttcttcatcatccccatgggacaaaggaaccaagcctagaaccaaaactgttcttagcttgtttgatgaggaagaggataaaatggaagatcaaaacattatccaggctccacagaaagaagtaggaaagggctgcgatcctgatgcccaccccaagagcacaggtgtcttccaggatgaagagctgcttttcagccacaagctccaaaaggacaatgacccagatgttgacctttttgctggcaccaaaaaaaccaagctgttagagccaagtgttgggagcctgtttggggatgatgaagatgatgatcttttcagctctgccaagtcccagcctttggtacaagagaaaaagagagtagtgaaaaaagaccactctgttaactctttcaaaaaccagaaacatcctgaatccattcaaggtagtaaagaaaaaggcatatggaagccggaaacacctcaggactcatcaggtctcgctccatttaaaaccaaagaaccatccactcggatcgggaagatacaagcaaatttagcgatcaacccagcggccttgctgcccacagcggcttcccagatctctgaagtaaagcctgttttgccagaattggcttttccttcatctgaacacagaaggagccacggtctggaaagtgtgcctgtccttcccgggagtggggaggccggtgtgagttttgatcttccagctcaggcagacaccttacacagtgcaaacaagagccgtgtcaagatgagagggaagcgtagaccgcagacccgtgcagctaggcggctggctgctcaggagtccagcgaggctgaggacatgagcgtccccagaggacccattgcacagtgggctgatggcgccatttccccaaatggccatcggccacagctcagagcagccagtggagaagacagcactgaggaggccctggcagctgccgctgcaccttgggaaggtggtcctgtgcctggagtggacacaagcccctttgcaaagtctctgggtcattccagaggggaggctgacctttttgattctggggacattttttccacgggcactggatctcagtccgtggagagaacaaaacccaaggcaaagatagcagagaatcctgccaacccaccagtgggtggtaaagcaaagagccccatgtttcctgctctaggcgaggccagcagtgatgatgatctctttcagtctgctaaaccaaaaccagcaaagaaaacaaatccctttcctctcctggaagatgaggatgacctctttacagatcagaaagtcaagaagaatgagacaaaatccagtagtcagcaggatgtcatattaacaacacaagatatttttgaggatgatatatttgctacggaagcaattaaaccctctcagaaaaccagagagaaggagaaaacattggaatctaatttatttgatgataacattgatatctttgctgacttaactgtaaaaccaaaagaaaagtccaaaaagaaagtggaagccaagtctatatttgatgatgatatggatgacatcttctccactggtatccaggctaagacaaccaaaccaaaaagccgatctgcacaggccgcacctgaaccaagatttgaacacaaggtgtccaacatctttgatgatcccctgaatgcctttggaggccagtagagcacacagggtatccacatgttaccctgcagctacattgttgagttagtgatgatattgtatatgctcatggtcttaactggattacaaaaagcaaatactagaacagctagctcatcttttacccaatgtacttagtatttttctgcactggtttaatcatgcttaatactacaaaacaaaaataaatatttcacagtggttggtttgttttgtttttaaaccacagtttgatttagttagccttgctggggccataatatgcttcagggtgtgtaaaagaagaaatctctttgtggctttcatgggcagggaatctcagagatagcaaatgccacctgaccagaagtctttgttatatggatgggaaccctaacttagggcttgggcaggggaaagagaaagaagatgagagattatacttcatgagtcttagcaatatgggagcaggttttcactgaattctgagggtgcctctgcatgtcctccaaggcaaagtttggcaaactgtggcccccccactgtcatattttgttaataaaattttattggaacacaatcaca

SEQ ID NO: 6717 - protein, 709 aa, Homo sapiens; identical to SEQ ID NO: 6611

SEQ ID NO: 6718 - DNA, 4286 bp, Homo sapiens
gctctgcggtcctcggcctgtgctggcagcctcggagcccaccgagccgggcggctgggatgatgaaccggacgacccccgaccaggagctggtgccggcgtcggagcccgtgtgggagcggccgtggtcggtggaggagatccgcaggagcagccagagctggtcgctggcggccgacgcgggccgtgtatatgatgaagaagtggaggagccagtactcaaggctgaggcagaaaaaacagagcaggagaagacacgagagcagaaagaagtagatctcattcctaaagtccaggaggctgtgaactatggcttacaagtattggacagtgcctttgagcaacttgatatcaaagcaggaaactcagactccgaggaagatgatgctaatgggcgggtggaactgatccttgaaccaaaggatctatacattgatcgtcctttaccatatctcattgggtcaaagctgttcatggaacaagaagatgtaggtcttggagagctgtccagtgaagaaggctctgtaggcagtgatcgtggcagtattgtggacactgaggaagagaaagaagaggaggagtcagatgaagattttgcccatcacagtgacaatgaacaaaaccagaaaagaagcagacctacatcgtttgcagatgagctggctgcccgcatcaagggggatgccatgggtcgagtggacgaggagccgacaaccttaccctcaggagaagcaaaacctcggaagacactcaaagagaagaaggaaaggagaactccttcagacgatgaagaggataacttattcgcaccccccaagctgaccgacgaggacttctcgccatttggctctggaggtggcctgttcagtggcggcaaggggctatttgatgatgaggacgaggagagtgacctcttcacggaagcctcccaggatcggcaagctggagcctctgttaaggaggagtcttcatcatccaaacctggaaagaaaatcccagcaggagctgtttctgtatttttaggagacacggatgtgtttggtgctgcctccgttccatcactgaaggagccacagaagcctgagcagcccactccaaggaaaagcccctatggtccccctcccactggcctctttgatgatgatgatggtgatgatgatgacgactttttctcggcaccccacagcaaaccttctaaaacacgcaaagtccaatccactgccgatatctttggtgacgaagaaggagatctgttcaaagaaaaagccgtagcatcgccagaagccactgtgagtcagacagatgaaaataaagcaagagcagaaaaaaaggatttgttttcttctcaaagtgcgagtaacttaaaaggtgcatctctgctgcctggcaagctccccacgtcggtttccctgtttgatgatgaagatgaagaggataatctttttgggggtacagctgctaagaagcagacattgtctctacaagctcagagagaagagaaagcaaaagcctccgagctctccaaaaagaaagcatctgccctgttgttcagcagtgatgaggaggaccagtggaatattcctgcttcacagacccacttagcatctgacagcaggtctaaaggagaacccagggattctgggaccctccagagccaggaggccaaggctgtgaaaaagaccagtctctttgaggaagacaaagaagatgatctttttgccattgccaaggacagccaaaagaagacccagagagtgtcactcctctttgaagacgatgttgatagcggaggctctctgtttggctctcctcccacatctgttcctcctgcaacaaagaaaaaagagactgtctctgaggcaccacctttgctgttcagcgatgaagaagagaaggaggcacaacttggagtgaagtctgtggataagaaggttgagagtgccaaggagtcattaaaatttgggagaactgatgtggctgagtcagaaaaggaaggacttttgactagatctgctcaggaaacagtcaagcattctgatttattttcttcatcatccccatgggacaaaggaaccaagcctagaaccaaaactgttcttagcttgtttgatgaggaagaggataaaatggaagatcaaaacattatccaggctccacagaaagaagtaggaaagggctgcgatcctgatgcccaccccaagagcacaggtgtcttccaggatgaagagctgcttttcagccacaagctccaaaaggacaatgacccagatgttgacctttttgctggcaccaaaaaaaccaagctgttagagccaagtgttgggagcctgtttggggatgatgaagatgatgatcttttcagctctgccaagtcccagcctttggtacaagagaaaaagagagtagtgaaaaaagaccactctgttaactctttcaaaaaccagaaacatcctgaatccattcaaggtagtaaagaaaaaggcatatggaagccggaaacacctcaggactcatcaggtctcgctccatttaaaaccaaagaaccatccactcggatcgggaagatacaagcaaatttagcgatcaacccagcggccttgctgcccacagcggcttcccagatctctgaagtaaagcctgttttgccagaattggcttttccttcatctgaacacagaaggagccacggtctggaaagtgtgcctgtccttcccgggagtggggaggccggtgtgagttttgatcttccagctcaggcagacaccttacacagtgcaaacaagagccgtgtcaagatgagagggaagcgtagaccgcagacccgtgcagctaggcggctggctgctcaggagtccagcgaggctgaggacatgagcgtccccagaggacccattgcacagtgggctgatggcgccatttccccaaatggccatcggccacagctcagagcagccagtggagaagacagcactgaggaggccctggcagctgccgctgcaccttgggaaggtggtcctgtgcctggagtggacacaagcccctttgcaaagtctctgggtcattccagaggggaggctgacctttttgattctggggacattttttccacgggcactggatctcagtccgtggagagaacaaaacccaaggcaaagatagcagagaatcctgccaacccaccagtgggtggtaaagcaaagagccccatgtttcctgctctaggcgaggccagcagtgatgatgatctctttcagtctgctaaaccaaaaccagcaaagaaaacaaatccctttcctctcctggaagatgaggatgacctctttacagatcagaaagtcaagaagaatgagacaaaatccagtagtcagcaggatgtcatattaacaacacaagatatttttgaggatgatatatttgctacggaagcaattaaaccctctcagaaaaccagagagaaggagaaaacattggaatctaatttatttgatgataacattgatatctttgctgacttaactgtaaaaccaaaagaaaagtccaaaaagaaagtggaagccaagtctatatttgatgatgatatggatgacatcttctccactggtatccaggctaagacaaccaaaccaaaaagccgatctgcacaggccgcacctgaaccaagatttgaacacaaggtgtccaacatctttgatgatcccctgaatgcctttggaggccagtagagcacacagggtatccacatgttaccctgcagctacattgttgagttagtgatgatattgtatatgctcatggtcttaactggattacaaaaagcaaatactagaacagctagctcatcttttacccaatgtacttagtatttttctgcactggtttaatcatgcttaatactacaaaacaaaaataaatatttcacagtggttggtttgttttgtttttaaaccacagtttgatttagttagccttgctggggccataatatgcttcagggtgtgtaaaagaagaaatctctttgtggctttcatgggcagggaatctcagagatagcaaatgccacctgaccagaagtctttgttatatggatgggaaccctaacttagggcttgggcaggggaaagagaaagaagatgagagattatacttcatgagtcttagcaatatgggagcaggttttcactgaattctgagggtgcctctgcatgtcctccaaggcaaagtttggcaaactgtggcccccccactgtcatattttgttaataaaattttattggaacacaatcaca

SEQ ID NO: 6719 - protein, 1220 aa, Homo sapiens
MMNRTTPDQELVPASEPVWERPWSVEEIRRSSQSWSLAADAGRVYDEEVEEPVLKAEAEKTEQEKTREQKEVDLIPKVQEAVNYGLQVLDSAFEQLDIKAGNSDSEEDDANGRVELILEPKDLYIDRPLPYLIGSKLFMEQEDVGLGELSSEEGSVGSDRGSIVDTEEEKEEEESDEDFAHHSDNEQNQKRSRPTSFADELAARIKGDAMGRVDEEPTTLPSGEAKPRKTLKEKKERRTPSDDEEDNLFAPPKLTDEDFSPFGSGGGLFSGGKGLFDDEDEESDLFTEASQDRQAGASVKEESSSSKPGKKIPAGAVSVFLGDTDVFGAASVPSLKEPQKPEQPTPRKSPYGPPPTGLFDDDDGDDDDDFFSAPHSKPSKTRKVQSTADIFGDEEGDLFKEKAVASPEATVSQTDENKARAEKKDLFSSQSASNLKGASLLPGKLPTSVSLFDDEDEEDNLFGGTAAKKQTLSLQAQREEKAKASELSKKKASALLFSSDEEDQWNIPASQTHLASDSRSKGEPRDSGTLQSQEAKAVKKTSLFEEDKEDDLFAIAKDSQKKTQRVSLLFEDDVDSGGSLFGSPPTSVPPATKKKETVSEAPPLLFSDEEEKEAQLGVKSVDKKVESAKESLKFGRTDVAESEKEGLLTRSAQETVKHSDLFSSSSPWDKGTKPRTKTVLSLFDEEEDKMEDQNIIQAPQKEVGKGCDPDAHPKSTGVFQDEELLFSHKLQKDNDPDVDLFAGTKKTKLLEPSVGSLFGDDEDDDLFSSAKSQPLVQEKKRVVKKDHSVNSFKNQKHPESIQGSKEKGIWKPETPQDSSGLAPFKTKEPSTRIGKIQANLAINPAALLPTAASQISEVKPVLPELAFPSSEHRRSHGLESVPVLPGSGEAGVSFDLPAQADTLHSANKSRVKMRGKRRPQTRAARRLAAQESSEAEDMSVPRGPIAQWADGAISPNGHRPQLRAASGEDSTEEALAAAAAPWEGGPVPGVDTSPFAKSLGHSRGEADLFDSGDIFSTGTGSQSVERTKPKAKIAENPANPPVGGKAKSPMFPALGEASSDDDLFQSAKPKPAKKTNPFPLLEDEDDLFTDQKVKKNETKSSSQQDVILTTQDIFEDDIFATEAIKPSQKTREKEKTLESNLFDDNIDIFADLTVKPKEKSKKKVEAKSIFDDDMDDIFSTGIQAKTTKPKSRSAQAAPEPRFEHKVSNIFDDPLNAFGGQ

SEQ ID NO: 6720 - DNA, 4338 bp, Homo sapiens
gctctgcggtcctcggcctgtgctggcagcctcggagcccaccgagccgggcggctgggatgatgaaccggacgacccccgaccaggagctggtgccggcgtcggagcccgtgtgggagcggccgtggtcggtggaggagatccgcaggagcagccagagctggtcgctggcggccgacgcgggccgtgtatatgatgaagaagtggaggagccagtactcaaggctgaggcagaaaaaacagagcaggagaagacacgagagcagaaagaagtagatctcattcctaaagtccaggaggctgtgaactatggcttacaagtattggacagtgcctttgagcaacttgatatcaaagcaggaaactcagactccgaggaagatgatgctaatgggcgggtggaactgatccttgaaccaaaggatctatacattgatcgtcctttaccatatctcattgggtcaaagctgttcatggaacaagaagatgtaggtcttggagagctgtccagtgaagaaggctctgtaggcagtgatcgtggcagtattgtggacactgaggaagagaaagaagaggaggagtcagatgaagattttgcccatcacagtgacaatgaacaaaaccagaaaagaagcagacctacatcgtttgcagatgagctggctgcccgcatcaagggggatgccatgggtcgagtggacgaggagccgacaaccttaccctcaggagaagcaaaacctcggaagacactcaaagagaagaaggaaaggagaactccttcagacgatgaagaggataacttattcgcaccccccaagctgaccgacgaggacttctcgccatttggctctggaggtggcctgttcagtggcggcaaggggctatttgatgatgaggacgaggagagtgacctcttcacggaagcctcccaggatcggcaagctggagcctctgttaaggaggagtcttcatcatccaaacctggaaagaaaatcccagcaggagctgtttctgtatttttaggagacacggatgtgtttggtgctgcctccgttccatcactgaaggagccacagaagcctgagcagcccactccaaggaaaagcccctatggtccccctcccactggcctctttgatgatgatgatggtgatgatgatgacgactttttctcggcaccccacagcaaaccttctaaaacacgcaaagtccaatccactgccgatatctttggtgacgaagaaggagatctgttcaaagaaaaagccgtagcatcgccagaagccactgtgagtcagacagatgaaaataaagcaagagcagaaaaaaaggatttgttttcttctcaaagtgcgagtaacttaaaaggtgcatctctgctgcctggcaagctccccacgtcggtttccctgtttgatgatgaagatgaagaggataatctttttgggggtacagctgctaagaagcagacattgtctctacaagctcagagagaagagaaagcaaaagcctccgagctctccaaaaagaaagcatctgccctgttgttcagcagtgatgaggaggaccagtggaatattcctgcttcacagacccacttagcatctgacagcaggtctaaaggagaacccagggattctgggaccctccagagccaggaggccaaggctgtgaaaaagaccagtctctttgaggaagacaaagaagatgatctttttgccattgccaaggacagatacatcctacctcctattgttcccgaagttgtctgtcaagttttgtgtatggaaagtaattcataccttcatcagatctcaaaagaagctttacacacacaagaagaagttgagccaaaagaagacccagagagtgtcactcctctttgaagacgatgttgatagcggaggctctctgtttggctctcctcccacatctgttcctcctgcaacaaagaaaaaagagactgtctctgaggcaccacctttgctgttcagcgatgaagaagagaaggaggcacaacttggagtgaagtctgtggataagaaggttgagagtgccaaggagtcattaaaatttgggagaactgatgtggctgagtcagaaaaggaaggacttttgactagatctgctcaggaaacagtcaagcattctgatttattttcttcatcatccccatgggacaaaggaaccaagcctagaaccaaaactgttcttagcttgtttgatgaggaagaggataaaatggaagatcaaaacattatccaggctccacagaaagaagtaggaaagggctgcgatcctgatgcccaccccaagagcacaggtgtcttccaggatgaagagctgcttttcagccacaagctccaaaaggacaatgacccagatgttgacctttttgctggcaccaaaaaaaccaagctgttagagccaagtgttgggagcctgtttggggatgatgaagatgatgatcttttcagctctgccaagtcccagcctttggtacaagagaaaaagagagtagtgaaaaaagaccactctgttaactctttcaaaaaccagaaacatcctgaatccattcaaggtagtaaagaaaaaggcatatggaagccggaaacacctcaggcaaatttagcgatcaacccagcggccttgctgcccacagcggcttcccagatctctgaagtaaagcctgttttgccagaattggcttttccttcatctgaacacagaaggagccacggtctggaaagtgtgcctgtccttcccgggagtggggaggccggtgtgagttttgatcttccagctcaggcagacaccttacacagtgcaaacaagagccgtgtcaagatgagagggaagcgtagaccgcagacccgtgcagctaggcggctggctgctcaggagtccagcgaggctgaggacatgagcgtccccagaggacccattgcacagtgggctgatggcgccatttccccaaatggccatcggccacagctcagagcagccagtggagaagacagcactgaggaggccctggcagctgccgctgcaccttgggaaggtggtcctgtgcctggagtggacacaagcccctttgcaaagtctctgggtcattccagaggggaggctgacctttttgattctggggacattttttccacgggcactggatctcagtccgtggagagaacaaaacccaaggcaaagatagcagagaatcctgccaacccaccagtgggtggtaaagcaaagagccccatgtttcctgctctaggcgaggccagcagtgatgatgatctctttcagtctgctaaaccaaaaccagcaaagaaaacaaatccctttcctctcctggaagatgaggatgacctctttacagatcagaaagtcaagaagaatgagacaaaatccagtagtcagcaggatgtcatattaacaacacaagatatttttgaggatgatatatttgctacggaagcaattaaaccctctcagaaaaccagagagaaggagaaaacattggaatctaatttatttgatgataacattgatatctttgctgacttaactgtaaaaccaaaagaaaagtccaaaaagaaagtggaagccaagtctatatttgatgatgatatggatgacatcttctccactggtatccaggctaagacaaccaaaccaaaaagccgatctgcacaggccgcacctgaaccaagatttgaacacaaggtgtccaacatctttgatgatcccctgaatgcctttggaggccagtagagcacacagggtatccacatgttaccctgcagctacattgttgagttagtgatgatattgtatatgctcatggtcttaactggattacaaaaagcaaatactagaacagctagctcatcttttacccaatgtacttagtatttttctgcactggtttaatcatgcttaatactacaaaacaaaaataaatatttcacagtggttggtttgttttgtttttaaaccacagtttgatttagttagccttgctggggccataatatgcttcagggtgtgtaaaagaagaaatctctttgtggctttcatgggcagggaatctcagagatagcaaatgccacctgaccagaagtctttgttatatggatgggaaccctaacttagggcttgggcaggggaaagagaaagaagatgagagattatacttcatgagtcttagcaatatgggagcaggttttcactgaattctgagggtgcctctgcatgtcctccaaggcaaagtttggcaaactgtggcccccccactgtcatattttgttaataaaattttattggaacacaatcaca

SEQ ID NO: 6721 - protein, 688 aa, Homo sapiens; identical to SEQ ID NO: 6613

SEQ ID NO: 6722 - DNA, 4098 bp, Homo sapiens
gctctgcggtcctcggcctgtgctggcagcctcggagcccaccgagccgggcggctgggatgatgaaccggacgacccccgaccaggagctggtgccggcgtcggagcccgtgtgggagcggccgtggtcggtggaggagatccgcaggagcagccagagctggtcgctggcggccgacgcgggccgtgtatatgatgaagaagtggaggagccagtactcaaggctgaggcagaaaaaacagagcaggagaagacacgagagcagaaagaagtagatctcattcctaaagtccaggaggctgtgaactatggcttacaagtattggacagtgcctttgagcaacttgatatcaaagcaggaaactcagactccgaggaagatgatgctaatgggcgggtggaactgatccttgaaccaaaggatctatacattgatcgtcctttaccatatctcattgggtcaaagctgttcatggaacaagaagatgtaggtcttggagagctgtccagtgaagaaggctctgtaggcagtgatcgtggcagtattgtggacactgaggaagagaaagaagaggaggagtcagatgaagattttgcccatcacagtgacaatgaacaaaaccagcacaccacacaaatgagtgatgaggaagaggatgatgatggctgtgacctttttgctgactctgagaaggaggaggaagatattgaggacattgaagaaaatactagacctaaaagaagcagacctacatcgtttgcagatgagctggctgcccgcatcaagggggatgccatgggtcgagtggacgaggagccgacaaccttaccctcaggagaagcaaaacctcggaagacactcaaagagaagaaggaaaggagaactccttcagacgatgaagaggataacttattcgcaccccccaagctgaccgacgaggacttctcgccatttggctctggaggtggcctgttcagtggcggcaaggggctatttgatgatgaggacgaggagagtgacctcttcacggaagcctcccaggatcggcaagctggagcctctgttaaggaggagtcttcatcatccaaacctggaaagaaaatcccagcaggagctgtttctgtatttttaggagacacggatgtgtttggtgctgcctccgttccatcactgaaggagccacagaagcctgagcagcccactccaaggaaaagcccctatggtccccctcccactggcctctttgatgatgatgatggtgatgatgatgacgactttttctcggcaccccacagcaaaccttctaaaacacgcaaagtccaatccactgccgatatctttggtgacgaagaaggagatctgttcaaagaaaaagccgtagcatcgccagaagccactgtgagtcagacagatgaaaataaagcaagagcagaaaaaaaggttaccttatcttacagcaaaaatctcaagccctcatcagaaacaaagactcaaaaaggcttattttcagatgaggaggactctgaggatttgttttcttctcaaagtgcgagtaacttaaaaggtgcatctctgctgcctggcaagctccccacgtcggtttccctgtttgatgatgaagatgaagaggataatctttttgggggtacagctgctaagaagcagacattgtctctacaagctcagagagaagagaaagcaaaagcctccgagctctccaaaaagaaagcatctgccctgttgttcagcagtgatgaggagccaaaagaagacccagagagtgtcactcctctttgaagacgatgttgatagcggaggctctctgtttggctctcctcccacatctgttcctcctgcaacaaaggaaggacttttgactagatctgctcaggaaacagtcaagcattctgatttattttcttcatcatccccatgggacaaaggaaccaagcctagaaccaaaactgttcttagcttgtttgatgaggaagaggataaaatggaagatcaaaacattatccaggctccacagaaagaagtaggaaagggctgcgatcctgatgcccaccccaagagcacaggtgtcttccaggatgaagagctgcttttcagccacaagctccaaaaggacaatgacccagatgttgacctttttgctggcaccaaaaaaaccaagctgttagagccaagtgttgggagcctgtttggggatgatgaagatgatgatcttttcagctctgccaagtcccagcctttggtacaagagaaaaagagagtagtgaaaaaagaccactctgttaactctttcaaaaaccagaaacatcctgaatccattcaaggtagtaaagaaaaaggcatatggaagccggaaacacctcaggcaaatttagcgatcaacccagcggccttgctgcccacagcggcttcccagatctctgaagtaaagcctgttttgccagaattggcttttccttcatctgaacacagaaggagccacggtctggaaagtgtgcctgtccttcccgggagtggggaggccggtgtgagttttgatcttccagctcaggcagacaccttacacagtgcaaacaagagccgtgtcaagatgagagggaagcgtagaccgcagacccgtgcagctaggcggctggctgctcaggagtccagcgaggctgaggacatgagcgtccccagaggacccattgcacagtgggctgatggcgccatttccccaaatggccatcggccacagctcagagcagccagtggagaagacagcactgaggaggccctggcagctgccgctgcaccttgggaaggtggtcctgtgcctggagtggacacaagcccctttgcaaagtctctgggtcattccagaggggaggctgacctttttgattctggggacattttttccacgggcactggatctcagtccgtggagagaacaaaacccaaggcaaagatagcagagaatcctgccaacccaccagtgggtggtaaagcaaagagccccatgtttcctgctctaggcgaggccagcagtgatgatgatctctttcagtctgctaaaccaaaaccagcaaagaaaacaaatccctttcctctcctggaagatgaggatgacctctttacagatcagaaagtcaagaagaatgagacaaaatccagtagtcagcaggatgtcatattaacaacacaagatatttttgaggatgatatatttgctacggaagcaattaaaccctctcagaaaaccagagagaaggagaaaacattggaatctaatttatttgatgataacattgatatctttgctgacttaactgtaaaaccaaaagaaaagtccaaaaagaaagtggaagccaagtctatatttgatgatgatatggatgacatcttctccactggtatccaggctaagacaaccaaaccaaaaagccgatctgcacaggccgcacctgaaccaagatttgaacacaaggtgtccaacatctttgatgatcccctgaatgcctttggaggccagtagagcacacagggtatccacatgttaccctgcagctacattgttgagttagtgatgatattgtatatgctcatggtcttaactggattacaaaaagcaaatactagaacagctagctcatcttttacccaatgtacttagtatttttctgcactggtttaatcatgcttaatactacaaaacaaaaataaatatttcacagtggttggtttgttttgtttttaaaccacagtttgatttagttagccttgctggggccataatatgcttcagggtgtgtaaaagaagaaatctctttgtggctttcatgggcagggaatctcagagatagcaaatgccacctgaccagaagtctttgttatatggatgggaaccctaacttagggcttgggcaggggaaagagaaagaagatgagagattatacttcatgagtcttagcaatatgggagcaggttttcactgaattctgagggtgcctctgcatgtcctccaaggcaaagtttggcaaactgtggcccccccactgtcatattttgttaataaaattttattggaacacaatcaca

SEQ ID NO: 6723 - protein, 639 aa, Homo sapiens; identical to SEQ ID NO: 6629

SEQ ID NO: 6724 - DNA, 4401 bp, Homo sapiens
gctctgcggtcctcggcctgtgctggcagcctcggagcccaccgagccgggcggctgggatgatgaaccggacgacccccgaccaggagctggtgccggcgtcggagcccgtgtgggagcggccgtggtcggtggaggagatccgcaggagcagccagagctggtcgctggcggccgacgcgggccgtgtatatgatgaagaagtggaggagccagtactcaaggctgaggcagaaaaaacagagcaggagaagacacgagagcagaaagaagtagatctcattcctaaagtccaggaggctgtgaactatggcttacaagtattggacagtgcctttgagcaacttgatatcaaagcaggaaactcagactccgaggaagatgatgctaatgggcgggtggaactgatccttgaaccaaaggatctatacattgatcgtcctttaccatatctcattgggtcaaagctgttcatggaacaagaagatgtaggtcttggagagctgtccagtgaagaaggctctgtaggcagtgatcgtggcagtattgtggacactgaggaagagaaagaagaggaggagtcagatgaagattttgcccatcacagtgacaatgaacaaaaccagaaaagaagcagacctacatcgtttgcagatgagctggctgcccgcatcaagggggatgccatgggtcgagtggacgaggagccgacaaccttaccctcaggagaagcaaaacctcggaagacactcaaagagaagaaggaaaggagaactccttcagacgatgaagaggataacttattcgcaccccccaagctgaccgacgaggacttctcgccatttggctctggaggtggcctgttcagtggcggcaaggggctatttgatgatgaggacgaggagagtgacctcttcacggaagcctcccaggatcggcaagctggagcctctgttaaggaggagtcttcatcatccaaacctggaaagaaaatcccagcaggagctgtttctgtatttttaggagacacggatgtgtttggtgctgcctccgttccatcactgaaggagccacagaagcctgagcagcccactccaaggaaaagcccctatggtccccctcccactggcctctttgatgatgatgatggtgatgatgatgacgactttttctcggcaccccacagcaaaccttctaaaacacgcaaagtccaatccactgccgatatctttggtgacgaagaaggagatctgttcaaagaaaaagccgtagcatcgccagaagccactgtgagtcagacagatgaaaataaagcaagagcagaaaaaaaggatttgttttcttctcaaagtgcgagtaacttaaaaggtgcatctctgctgcctggcaagctccccacgtcggtttccctgtttgatgatgaagatgaagaggataatctttttgggggtacagctgctaagaagcagacattgtctctacaagctcagagagaagagaaagcaaaagcctccgagctctccaaaaagaaagcatctgccctgttgttcagcagtgatgaggaggaccagtggaatattcctgcttcacagacccacttagcatctgacagcaggtctaaaggagaacccagggattctgggaccctccagagccaggaggccaaggctgtgaaaaagaccagtctctttgaggaagacaaagaagatgatctttttgccattgccaaggacagatacatcctacctcctattgttcccgaagttgtctgtcaagttttgtgtatggaaagtaattcataccttcatcagatctcaaaagaagctttacacacacaagaagaagttgagccaaaagaagacccagagagtgtcactcctctttgaagacgatgttgatagcggaggctctctgtttggctctcctcccacatctgttcctcctgcaacaaagaaaaaagagactgtctctgaggcaccacctttgctgttcagcgatgaagaagagaaggaggcacaacttggagtgaagtctgtggataagaaggttgagagtgccaaggagtcattaaaatttgggagaactgatgtggctgagtcagaaaaggaaggacttttgactagatctgctcaggaaacagtcaagcattctgatttattttcttcatcatccccatgggacaaaggaaccaagcctagaaccaaaactgttcttagcttgtttgatgaggaagaggataaaatggaagatcaaaacattatccaggctccacagaaagaagtaggaaagggctgcgatcctgatgcccaccccaagagcacaggtgtcttccaggatgaagagctgcttttcagccacaagctccaaaaggacaatgacccagatgttgacctttttgctggcaccaaaaaaaccaagctgttagagccaagtgttgggagcctgtttggggatgatgaagatgatgatcttttcagctctgccaagtcccagcctttggtacaagagaaaaagagagtagtgaaaaaagaccactctgttaactctttcaaaaaccagaaacatcctgaatccattcaaggtagtaaagaaaaaggcatatggaagccggaaacacctcaggactcatcaggtctcgctccatttaaaaccaaagaaccatccactcggatcgggaagatacaagcaaatttagcgatcaacccagcggccttgctgcccacagcggcttcccagatctctgaagtaaagcctgttttgccagaattggcttttccttcatctgaacacagaaggagccacggtctggaaagtgtgcctgtccttcccgggagtggggaggccggtgtgagttttgatcttccagctcaggcagacaccttacacagtgcaaacaagagccgtgtcaagatgagagggaagcgtagaccgcagacccgtgcagctaggcggctggctgctcaggagtccagcgaggctgaggacatgagcgtccccagaggacccattgcacagtgggctgatggcgccatttccccaaatggccatcggccacagctcagagcagccagtggagaagacagcactgaggaggccctggcagctgccgctgcaccttgggaaggtggtcctgtgcctggagtggacacaagcccctttgcaaagtctctgggtcattccagaggggaggctgacctttttgattctggggacattttttccacgggcactggatctcagtccgtggagagaacaaaacccaaggcaaagatagcagagaatcctgccaacccaccagtgggtggtaaagcaaagagccccatgtttcctgctctaggcgaggccagcagtgatgatgatctctttcagtctgctaaaccaaaaccagcaaagaaaacaaatccctttcctctcctggaagatgaggatgacctctttacagatcagaaagtcaagaagaatgagacaaaatccagtagtcagcaggatgtcatattaacaacacaagatatttttgaggatgatatatttgctacggaagcaattaaaccctctcagaaaaccagagagaaggagaaaacattggaatctaatttatttgatgataacattgatatctttgctgacttaactgtaaaaccaaaagaaaagtccaaaaagaaagtggaagccaagtctatatttgatgatgatatggatgacatcttctccactggtatccaggctaagacaaccaaaccaaaaagccgatctgcacaggccgcacctgaaccaagatttgaacacaaggtgtccaacatctttgatgatcccctgaatgcctttggaggccagtagagcacacagggtatccacatgttaccctgcagctacattgttgagttagtgatgatattgtatatgctcatggtcttaactggattacaaaaagcaaatactagaacagctagctcatcttttacccaatgtacttagtatttttctgcactggtttaatcatgcttaatactacaaaacaaaaataaatatttcacagtggttggtttgttttgtttttaaaccacagtttgatttagttagccttgctggggccataatatgcttcagggtgtgtaaaagaagaaatctctttgtggctttcatgggcagggaatctcagagatagcaaatgccacctgaccagaagtctttgttatatggatgggaaccctaacttagggcttgggcaggggaaagagaaagaagatgagagattatacttcatgagtcttagcaatatgggagcaggttttcactgaattctgagggtgcctctgcatgtcctccaaggcaaagtttggcaaactgtggcccccccactgtcatattttgttaataaaattttattggaacacaatcaca

SEQ ID NO: 6725 - protein, 709 aa, Homo sapiens; identical to SEQ ID NO: 6611

SEQ ID NO: 6726 - DNA, 4512 bp, Homo sapiens
gctctgcggtcctcggcctgtgctggcagcctcggagcccaccgagccgggcggctgggatgatgaaccggacgacccccgaccaggagctggtgccggcgtcggagcccgtgtgggagcggccgtggtcggtggaggagatccgcaggagcagccagagctggtcgctggcggccgacgcgggccgtgtatatgatgaagaagtggaggagccagtactcaaggctgaggcagaaaaaacagagcaggagaagacacgagagcagaaagaagtagatctcattcctaaagtccaggaggctgtgaactatggcttacaagtattggacagtgcctttgagcaacttgatatcaaagcaggaaactcagactccgaggaagatgatgctaatgggcgggtggaactgatccttgaaccaaaggatctatacattgatcgtcctttaccatatctcattgggtcaaagctgttcatggaacaagaagatgtaggtcttggagagctgtccagtgaagaaggctctgtaggcagtgatcgtggcagtattgtggacactgaggaagagaaagaagaggaggagtcagatgaagattttgcccatcacagtgacaatgaacaaaaccagcacaccacacaaatgagtgatgaggaagaggatgatgatggctgtgacctttttgctgactctgagaaggaggaggaagatattgaggacattgaagaaaatactagacctaaaagaagcagacctacatcgtttgcagatgagctggctgcccgcatcaagggggatgccatgggtcgagtggacgaggagccgacaaccttaccctcaggagaagcaaaacctcggaagacactcaaagagaagaaggaaaggagaactccttcagacgatgaagaggataacttattcgcaccccccaagctgaccgacgaggacttctcgccatttggctctggaggtggcctgttcagtggcggcaaggggctatttgatgatgaggacgaggagagtgacctcttcacggaagcctcccaggatcggcaagctggagcctctgttaaggaggagtcttcatcatccaaacctggaaagaaaatcccagcaggagctgtttctgtatttttaggagacacggatgtgtttggtgctgcctccgttccatcactgaaggagccacagaagcctgagcagcccactccaaggaaaagcccctatggtccccctcccactggcctctttgatgatgatgatggtgatgatgatgacgactttttctcggcaccccacagcaaaccttctaaaacacgcaaagtccaatccactgccgatatctttggtgacgaagaaggagatctgttcaaagaaaaagccgtagcatcgccagaagccactgtgagtcagacagatgaaaataaagcaagagcagaaaaaaaggatttgttttcttctcaaagtgcgagtaacttaaaaggtgcatctctgctgcctggcaagctccccacgtcggtttccctgtttgatgatgaagatgaagaggataatctttttgggggtacagctgctaagaagcagacattgtctctacaagctcagagagaagagaaagcaaaagcctccgagctctccaaaaagaaagcatctgccctgttgttcagcagtgatgaggaggaccagtggaatattcctgcttcacagacccacttagcatctgacagcaggtctaaaggagaacccagggattctgggaccctccagagccaggaggccaaggctgtgaaaaagaccagtctctttgaggaagacaaagaagatgatctttttgccattgccaaggacagatacatcctacctcctattgttcccgaagttgtctgtcaagttttgtgtatggaaagtaattcataccttcatcagatctcaaaagaagctttacacacacaagaagaagttgagccaaaagaagacccagagagtgtcactcctctttgaagacgatgttgatagcggaggctctctgtttggctctcctcccacatctgttcctcctgcaacaaagaaaaaagagactgtctctgaggcaccacctttgctgttcagcgatgaagaagagaaggaggcacaacttggagtgaagtctgtggataagaaggttgagagtgccaaggagtcattaaaatttgggagaactgatgtggctgagtcagaaaaggaaggacttttgactagatctgctcaggaaacagtcaagcattctgatttattttcttcatcatccccatgggacaaaggaaccaagcctagaaccaaaactgttcttagcttgtttgatgaggaagaggataaaatggaagatcaaaacattatccaggctccacagaaagaagtaggaaagggctgcgatcctgatgcccaccccaagagcacaggtgtcttccaggatgaagagctgcttttcagccacaagctccaaaaggacaatgacccagatgttgacctttttgctggcaccaaaaaaaccaagctgttagagccaagtgttgggagcctgtttggggatgatgaagatgatgatcttttcagctctgccaagtcccagcctttggtacaagagaaaaagagagtagtgaaaaaagaccactctgttaactctttcaaaaaccagaaacatcctgaatccattcaaggtagtaaagaaaaaggcatatggaagccggaaacacctcaggactcatcaggtctcgctccatttaaaaccaaagaaccatccactcggatcgggaagatacaagcaaatttagcgatcaacccagcggccttgctgcccacagcggcttcccagatctctgaagtaaagcctgttttgccagaattggcttttccttcatctgaacacagaaggagccacggtctggaaagtgtgcctgtccttcccgggagtggggaggccggtgtgagttttgatcttccagctcaggcagacaccttacacagtgcaaacaagagccgtgtcaagatgagagggaagcgtagaccgcagacccgtgcagctaggcggctggctgctcaggagtccagcgaggctgaggacatgagcgtccccagaggacccattgcacagtgggctgatggcgccatttccccaaatggccatcggccacagctcagagcagccagtggagaagacagcactgaggaggccctggcagctgccgctgcaccttgggaaggtggtcctgtgcctggagtggacacaagcccctttgcaaagtctctgggtcattccagaggggaggctgacctttttgattctggggacattttttccacgggcactggatctcagtccgtggagagaacaaaacccaaggcaaagatagcagagaatcctgccaacccaccagtgggtggtaaagcaaagagccccatgtttcctgctctaggcgaggccagcagtgatgatgatctctttcagtctgctaaaccaaaaccagcaaagaaaacaaatccctttcctctcctggaagatgaggatgacctctttacagatcagaaagtcaagaagaatgagacaaaatccagtagtcagcaggatgtcatattaacaacacaagatatttttgaggatgatatatttgctacggaagcaattaaaccctctcagaaaaccagagagaaggagaaaacattggaatctaatttatttgatgataacattgatatctttgctgacttaactgtaaaaccaaaagaaaagtccaaaaagaaagtggaagccaagtctatatttgatgatgatatggatgacatcttctccactggtatccaggctaagacaaccaaaccaaaaagccgatctgcacaggccgcacctgaaccaagatttgaacacaaggtgtccaacatctttgatgatcccctgaatgcctttggaggccagtagagcacacagggtatccacatgttaccctgcagctacattgttgagttagtgatgatattgtatatgctcatggtcttaactggattacaaaaagcaaatactagaacagctagctcatcttttacccaatgtacttagtatttttctgcactggtttaatcatgcttaatactacaaaacaaaaataaatatttcacagtggttggtttgttttgtttttaaaccacagtttgatttagttagccttgctggggccataatatgcttcagggtgtgtaaaagaagaaatctctttgtggctttcatgggcagggaatctcagagatagcaaatgccacctgaccagaagtctttgttatatggatgggaaccctaacttagggcttgggcaggggaaagagaaagaagatgagagattatacttcatgagtcttagcaatatgggagcaggttttcactgaattctgagggtgcctctgcatgtcctccaaggcaaagtttggcaaactgtggcccccccactgtcatattttgttaataaaattttattggaacacaatcaca

SEQ ID NO: 6727 - protein, 709 aa, Homo sapiens; identical to SEQ ID NO: 6611

SEQ ID NO: 6728 - DNA, 4484 bp, Homo sapiens
gctctgcggtcctcggcctgtgctggcagcctcggagcccaccgagccgggcggctgggatgatgaaccggacgacccccgaccaggagctggtgccggcgtcggagcccgtgtgggagcggccgtggtcggtggaggagatccgcaggagcagccagagctggtcgctggcggccgacgcgggccgtgtatatgatgaagaagtggaggagccagtactcaaggctgaggcagaaaaaacagagcaggagaagacacgagagcagaaagaagtagatctcattcctaaagtccaggaggctgtgaactatggcttacaagtattggacagtgcctttgagcaacttgatatcaaagcaggaaactcagactccgaggaagatgatgctaatgggcgggtggaactgatccttgaaccaaaggatctatacattgatcgtcctttaccatatctcattgggtcaaagctgttcatggaacaagaagatgtaggtcttggagagctgtccagtgaagaaggctctgtaggcagtgatcgtggcagtattgtggacactgaggaagagaaagaagaggaggagtcagatgaagattttgcccatcacagtgacaatgaacaaaaccagcacaccacacaaatgagtgatgaggaagaggatgatgatggctgtgacctttttgctgactctgagaaggaggaggaagatattgaggacattgaagaaaatactagacctaaaagaagcagacctacatcgtttgcagatgagctggctgcccgcatcaagggggatgccatgggtcgagtggacgaggagccgacaaccttaccctcaggagaagcaaaacctcggaagacactcaaagagaagaaggaaaggagaactccttcagacgatgaagaggataacttattcgcaccccccaagctgaccgacgaggacttctcgccatttggctctggaggtggcctgttcagtggcggcaaggggctatttgatgatgaggacgaggagagtgacctcttcacggaagcctcccaggatcggcaagctggagcctctgttaaggaggagtcttcatcatccaaacctggaaagaaaatcccagcaggagctgtttctgtatttttaggagacacggatgtgtttggtgctgcctccgttccatcactgaaggagccacagaagcctgagcagcccactccaaggaaaagcccctatggtccccctcccactggcctctttgatgatgatgatggtgatgatgatgacgactttttctcggcaccccacagcaaaccttctaaaacacgcaaagtccaatccactgccgatatctttggtgacgaagaaggagatctgttcaaagaaaaagccgtagcatcgccagaagccactgtgagtcagacagatgaaaataaagcaagagcagaaaaaaaggttaccttatcttacagcaaaaatctcaagccctcatcagaaacaaagactcaaaaaggcttattttcagatgaggaggactctgaggatttgttttcttctcaaagtgcgagtaacttaaaaggtgcatctctgctgcctggcaagctccccacgtcggtttccctgtttgatgatgaagatgaagaggataatctttttgggggtacagctgctaagaagcagacattgtctctacaagctcagagagaagagaaagcaaaagcctccgagctctccaaaaagaaagcatctgccctgttgttcagcagtgatgaggaggaccagtggaatattcctgcttcacagacccacttagcatctgacagcaggtctaaaggagaacccagggattctgggaccctccagagccaggaggccaaggctgtgaaaaagaccagtctctttgaggaagacaaagaagatgatctttttgccattgccaaggacagccaaaagaagacccagagagtgtcactcctctttgaagacgatgttgatagcggaggctctctgtttggctctcctcccacatctgttcctcctgcaacaaagaaaaaagagactgtctctgaggcaccacctttgctgttcagcgatgaagaagagaaggaggcacaacttggagtgaagtctgtggataagaaggttgagagtgccaaggagtcattaaaatttgggagaactgatgtggctgagtcagaaaaggaaggacttttgactagatctgctcaggaaacagtcaagcattctgatttattttcttcatcatccccatgggacaaaggaaccaagcctagaaccaaaactgttcttagcttgtttgatgaggaagaggataaaatggaagatcaaaacattatccaggctccacagaaagaagtaggaaagggctgcgatcctgatgcccaccccaagagcacaggtgtcttccaggatgaagagctgcttttcagccacaagctccaaaaggacaatgacccagatgttgacctttttgctggcaccaaaaaaaccaagctgttagagccaagtgttgggagcctgtttggggatgatgaagatgatgatcttttcagctctgccaagtcccagcctttggtacaagagaaaaagagagtagtgaaaaaagaccactctgttaactctttcaaaaaccagaaacatcctgaatccattcaaggtagtaaagaaaaaggcatatggaagccggaaacacctcaggactcatcaggtctcgctccatttaaaaccaaagaaccatccactcggatcgggaagatacaagcaaatttagcgatcaacccagcggccttgctgcccacagcggcttcccagatctctgaagtaaagcctgttttgccagaattggcttttccttcatctgaacacagaaggagccacggtctggaaagtgtgcctgtccttcccgggagtggggaggccggtgtgagttttgatcttccagctcaggcagacaccttacacagtgcaaacaagagccgtgtcaagatgagagggaagcgtagaccgcagacccgtgcagctaggcggctggctgctcaggagtccagcgaggctgaggacatgagcgtccccagaggacccattgcacagtgggctgatggcgccatttccccaaatggccatcggccacagctcagagcagccagtggagaagacagcactgaggaggccctggcagctgccgctgcaccttgggaaggtggtcctgtgcctggagtggacacaagcccctttgcaaagtctctgggtcattccagaggggaggctgacctttttgattctggggacattttttccacgggcactggatctcagtccgtggagagaacaaaacccaaggcaaagatagcagagaatcctgccaacccaccagtgggtggtaaagcaaagagccccatgtttcctgctctaggcgaggccagcagtgatgatgatctctttcagtctgctaaaccaaaaccagcaaagaaaacaaatccctttcctctcctggaagatgaggatgacctctttacagatcagaaagtcaagaagaatgagacaaaatccagtagtcagcaggatgtcatattaacaacacaagatatttttgaggatgatatatttgctacggaagcaattaaaccctctcagaaaaccagagagaaggagaaaacattggaatctaatttatttgatgataacattgatatctttgctgacttaactgtaaaaccaaaagaaaagtccaaaaagaaagtggaagccaagtctatatttgatgatgatatggatgacatcttctccactggtatccaggctaagacaaccaaaccaaaaagccgatctgcacaggccgcacctgaaccaagatttgaacacaaggtgtccaacatctttgatgatcccctgaatgcctttggaggccagtagagcacacagggtatccacatgttaccctgcagctacattgttgagttagtgatgatattgtatatgctcatggtcttaactggattacaaaaagcaaatactagaacagctagctcatcttttacccaatgtacttagtatttttctgcactggtttaatcatgcttaatactacaaaacaaaaataaatatttcacagtggttggtttgttttgtttttaaaccacagtttgatttagttagccttgctggggccataatatgcttcagggtgtgtaaaagaagaaatctctttgtggctttcatgggcagggaatctcagagatagcaaatgccacctgaccagaagtctttgttatatggatgggaaccctaacttagggcttgggcaggggaaagagaaagaagatgagagattatacttcatgagtcttagcaatatgggagcaggttttcactgaattctgagggtgcctctgcatgtcctccaaggcaaagtttggcaaactgtggcccccccactgtcatattttgttaataaaattttattggaacacaatcaca

SEQ ID NO: 6729 - protein, 1286 aa, Homo sapiens
MMNRTTPDQELVPASEPVWERPWSVEEIRRSSQSWSLAADAGRVYDEEVEEPVLKAEAEKTEQEKTREQKEVDLIPKVQEAVNYGLQVLDSAFEQLDIKAGNSDSEEDDANGRVELILEPKDLYIDRPLPYLIGSKLFMEQEDVGLGELSSEEGSVGSDRGSIVDTEEEKEEEESDEDFAHHSDNEQNQHTTQMSDEEEDDDGCDLFADSEKEEEDIEDIEENTRPKRSRPTSFADELAARIKGDAMGRVDEEPTTLPSGEAKPRKTLKEKKERRTPSDDEEDNLFAPPKLTDEDFSPFGSGGGLFSGGKGLFDDEDEESDLFTEASQDRQAGASVKEESSSSKPGKKIPAGAVSVFLGDTDVFGAASVPSLKEPQKPEQPTPRKSPYGPPPTGLFDDDDGDDDDDFFSAPHSKPSKTRKVQSTADIFGDEEGDLFKEKAVASPEATVSQTDENKARAEKKVTLSYSKNLKPSSETKTQKGLFSDEEDSEDLFSSQSASNLKGASLLPGKLPTSVSLFDDEDEEDNLFGGTAAKKQTLSLQAQREEKAKASELSKKKASALLFSSDEEDQWNIPASQTHLASDSRSKGEPRDSGTLQSQEAKAVKKTSLFEEDKEDDLFAIAKDSQKKTQRVSLLFEDDVDSGGSLFGSPPTSVPPATKKKETVSEAPPLLFSDEEEKEAQLGVKSVDKKVESAKESLKFGRTDVAESEKEGLLTRSAQETVKHSDLFSSSSPWDKGTKPRTKTVLSLFDEEEDKMEDQNIIQAPQKEVGKGCDPDAHPKSTGVFQDEELLFSHKLQKDNDPDVDLFAGTKKTKLLEPSVGSLFGDDEDDDLFSSAKSQPLVQEKKRVVKKDHSVNSFKNQKHPESIQGSKEKGIWKPETPQDSSGLAPFKTKEPSTRIGKIQANLAINPAALLPTAASQISEVKPVLPELAFPSSEHRRSHGLESVPVLPGSGEAGVSFDLPAQADTLHSANKSRVKMRGKRRPQTRAARRLAAQESSEAEDMSVPRGPIAQWADGAISPNGHRPQLRAASGEDSTEEALAAAAAPWEGGPVPGVDTSPFAKSLGHSRGEADLFDSGDIFSTGTGSQSVERTKPKAKIAENPANPPVGGKAKSPMFPALGEASSDDDLFQSAKPKPAKKTNPFPLLEDEDDLFTDQKVKKNETKSSSQQDVILTTQDIFEDDIFATEAIKPSQKTREKEKTLESNLFDDNIDIFADLTVKPKEKSKKKVEAKSIFDDDMDDIFSTGIQAKTTKPKSRSAQAAPEPRFEHKVSNIFDDPLNAFGGQ

SEQ ID NO: 6730 - DNA, 4310 bp, Homo sapiens
gctctgcggtcctcggcctgtgctggcagcctcggagcccaccgagccgggcggctgggatgatgaaccggacgacccccgaccaggagctggtgccggcgtcggagcccgtgtgggagcggccgtggtcggtggaggagatccgcaggagcagccagagctggtcgctggcggccgacgcgggccgtgtatatgatgaagaagtggaggagccagtactcaaggctgaggcagaaaaaacagagcaggagaagacacgagagcagaaagaagtagatctcattcctaaagtccaggaggctgtgaactatggcttacaagtattggacagtgcctttgagcaacttgatatcaaagcaggaaactcagactccgaggaagatgatgctaatgggcgggtggaactgatccttgaaccaaaggatctatacattgatcgtcctttaccatatctcattgggtcaaagctgttcatggaacaagaagatgtaggtcttggagagctgtccagtgaagaaggctctgtaggcagtgatcgtggcagtattgtggacactgaggaagagaaagaagaggaggagtcagatgaagattttgcccatcacagtgacaatgaacaaaaccagaaaagaagcagacctacatcgtttgcagatgagctggctgcccgcatcaagggggatgccatgggtcgagtggacgaggagccgacaaccttaccctcaggagaagcaaaacctcggaagacactcaaagagaagaaggaaaggagaactccttcagacgatgaagaggataacttattcgcaccccccaagctgaccgacgaggacttctcgccatttggctctggaggtggcctgttcagtggcggcaaggggctatttgatgatgaggacgaggagagtgacctcttcacggaagcctcccaggatcggcaagctggagcctctgttaaggaggagtcttcatcatccaaacctggaaagaaaatcccagcaggagctgtttctgtatttttaggagacacggatgtgtttggtgctgcctccgttccatcactgaaggagccacagaagcctgagcagcccactccaaggaaaagcccctatggtccccctcccactggcctctttgatgatgatgatggtgatgatgatgacgactttttctcggcaccccacagcaaaccttctaaaacacgcaaagtccaatccactgccgatatctttggtgacgaagaaggagatctgttcaaagaaaaagccgtagcatcgccagaagccactgtgagtcagacagatgaaaataaagcaagagcagaaaaaaaggttaccttatcttacagcaaaaatctcaagccctcatcagaaacaaagactcaaaaaggcttattttcagatgaggaggactctgaggatttgttttcttctcaaagtgcgagtaacttaaaaggtgcatctctgctgcctggcaagctccccacgtcggtttccctgtttgatgatgaagatgaagaggataatctttttgggggtacagctgctaagaagcagacattgtctctacaagctcagagagaagagaaagcaaaagcctccgagctctccaaaaagaaagcatctgccctgttgttcagcagtgatgaggaggaccagtggaatattcctgcttcacagacccacttagcatctgacagcaggtctaaaggagaacccagggattctgggaccctccagagccaggaggccaaggctgtgaaaaagaccagtctctttgaggaagacaaagaagatgatctttttgccattgccaaggacagccaaaagaagacccagagagtgtcactcctctttgaagacgatgttgatagcggaggctctctgtttggctctcctcccacatctgttcctcctgcaacaaagaaaaaagagactgtctctgaggcaccacctttgctgttcagcgatgaagaagagaaggaggcacaacttggagtgaagtctgtggataagaaggttgagagtgccaaggagtcattaaaatttgggagaactgatgtggctgagtcagaaaaggaaggacttttgactagatctgctcaggaaacagtcaagcattctgatttattttcttcatcatccccatgggacaaaggaaccaagcctagaaccaaaactgttcttagcttgtttgatgaggaagaggataaaatggaagatcaaaacattatccaggctccacagaaagaagtaggaaagggctgcgatcctgatgcccaccccaagagcacaggtgtcttccaggatgaagagctgcttttcagccacaagctccaaaaggacaatgacccagatgttgacctttttgctggcaccaaaaaaaccaagctgttagagccaagtgttgggagcctgtttggggatgatgaagatgatgatcttttcagctctgccaagtcccagcctttggtacaagagaaaaagagagtagtgaaaaaagaccactctgttaactctttcaaaaaccagaaacatcctgaatccattcaaggtagtaaagaaaaaggcatatggaagccggaaacacctcaggcaaatttagcgatcaacccagcggccttgctgcccacagcggcttcccagatctctgaagtaaagcctgttttgccagaattggcttttccttcatctgaacacagaaggagccacggtctggaaagtgtgcctgtccttcccgggagtggggaggccggtgtgagttttgatcttccagctcaggcagacaccttacacagtgcaaacaagagccgtgtcaagatgagagggaagcgtagaccgcagacccgtgcagctaggcggctggctgctcaggagtccagcgaggctgaggacatgagcgtccccagaggacccattgcacagtgggctgatggcgccatttccccaaatggccatcggccacagctcagagcagccagtggagaagacagcactgaggaggccctggcagctgccgctgcaccttgggaaggtggtcctgtgcctggagtggacacaagcccctttgcaaagtctctgggtcattccagaggggaggctgacctttttgattctggggacattttttccacgggcactggatctcagtccgtggagagaacaaaacccaaggcaaagatagcagagaatcctgccaacccaccagtgggtggtaaagcaaagagccccatgtttcctgctctaggcgaggccagcagtgatgatgatctctttcagtctgctaaaccaaaaccagcaaagaaaacaaatccctttcctctcctggaagatgaggatgacctctttacagatcagaaagtcaagaagaatgagacaaaatccagtagtcagcaggatgtcatattaacaacacaagatatttttgaggatgatatatttgctacggaagcaattaaaccctctcagaaaaccagagagaaggagaaaacattggaatctaatttatttgatgataacattgatatctttgctgacttaactgtaaaaccaaaagaaaagtccaaaaagaaagtggaagccaagtctatatttgatgatgatatggatgacatcttctccactggtatccaggctaagacaaccaaaccaaaaagccgatctgcacaggccgcacctgaaccaagatttgaacacaaggtgtccaacatctttgatgatcccctgaatgcctttggaggccagtagagcacacagggtatccacatgttaccctgcagctacattgttgagttagtgatgatattgtatatgctcatggtcttaactggattacaaaaagcaaatactagaacagctagctcatcttttacccaatgtacttagtatttttctgcactggtttaatcatgcttaatactacaaaacaaaaataaatatttcacagtggttggtttgttttgtttttaaaccacagtttgatttagttagccttgctggggccataatatgcttcagggtgtgtaaaagaagaaatctctttgtggctttcatgggcagggaatctcagagatagcaaatgccacctgaccagaagtctttgttatatggatgggaaccctaacttagggcttgggcaggggaaagagaaagaagatgagagattatacttcatgagtcttagcaatatgggagcaggttttcactgaattctgagggtgcctctgcatgtcctccaaggcaaagtttggcaaactgtggcccccccactgtcatattttgttaataaaattttattggaacacaatcaca

SEQ ID NO: 6731 - protein, 1228 aa, Homo sapiens
MMNRTTPDQELVPASEPVWERPWSVEEIRRSSQSWSLAADAGRVYDEEVEEPVLKAEAEKTEQEKTREQKEVDLIPKVQEAVNYGLQVLDSAFEQLDIKAGNSDSEEDDANGRVELILEPKDLYIDRPLPYLIGSKLFMEQEDVGLGELSSEEGSVGSDRGSIVDTEEEKEEEESDEDFAHHSDNEQNQKRSRPTSFADELAARIKGDAMGRVDEEPTTLPSGEAKPRKTLKEKKERRTPSDDEEDNLFAPPKLTDEDFSPFGSGGGLFSGGKGLFDDEDEESDLFTEASQDRQAGASVKEESSSSKPGKKIPAGAVSVFLGDTDVFGAASVPSLKEPQKPEQPTPRKSPYGPPPTGLFDDDDGDDDDDFFSAPHSKPSKTRKVQSTADIFGDEEGDLFKEKAVASPEATVSQTDENKARAEKKVTLSYSKNLKPSSETKTQKGLFSDEEDSEDLFSSQSASNLKGASLLPGKLPTSVSLFDDEDEEDNLFGGTAAKKQTLSLQAQREEKAKASELSKKKASALLFSSDEEDQWNIPASQTHLASDSRSKGEPRDSGTLQSQEAKAVKKTSLFEEDKEDDLFAIAKDSQKKTQRVSLLFEDDVDSGGSLFGSPPTSVPPATKKKETVSEAPPLLFSDEEEKEAQLGVKSVDKKVESAKESLKFGRTDVAESEKEGLLTRSAQETVKHSDLFSSSSPWDKGTKPRTKTVLSLFDEEEDKMEDQNIIQAPQKEVGKGCDPDAHPKSTGVFQDEELLFSHKLQKDNDPDVDLFAGTKKTKLLEPSVGSLFGDDEDDDLFSSAKSQPLVQEKKRVVKKDHSVNSFKNQKHPESIQGSKEKGIWKPETPQANLAINPAALLPTAASQISEVKPVLPELAFPSSEHRRSHGLESVPVLPGSGEAGVSFDLPAQADTLHSANKSRVKMRGKRRPQTRAARRLAAQESSEAEDMSVPRGPIAQWADGAISPNGHRPQLRAASGEDSTEEALAAAAAPWEGGPVPGVDTSPFAKSLGHSRGEADLFDSGDIFSTGTGSQSVERTKPKAKIAENPANPPVGGKAKSPMFPALGEASSDDDLFQSAKPKPAKKTNPFPLLEDEDDLFTDQKVKKNETKSSSQQDVILTTQDIFEDDIFATEAIKPSQKTREKEKTLESNLFDDNIDIFADLTVKPKEKSKKKVEAKSIFDDDMDDIFSTGIQAKTTKPKSRSAQAAPEPRFEHKVSNIFDDPLNAFGGQ

SEQ ID NO: 6732 - DNA, 285 bp, Homo sapiens
atgcctcacaggggacagggcagcatttccttcagcagtggagcctattcctttcatcatgtacaggatctatacattgatcgtcctttaccatatctcattgggtcaaagctgttcatggaacaagaagatgtaggtcttggagagctgtccagtgaagaaggctctgtaggcagtgatcgtggcagtattgtggacactgaggaagagaaagaagaggaggtaagggctgtttggtatgaccaggtcacggtgggcagcaagcttaatttaagatgggcctag

SEQ ID NO: 6733 - protein, 94 aa, Homo sapiens
MPHRGQGSISFSSGAYSFHHVQDLYIDRPLPYLIGSKLFMEQEDVGLGELSSEEGSVGSDRGSIVDTEEEKEEEVRAVWYDQVTVGSKLNLRWA

SEQ ID NO: 6734 - DNA, 4095 bp, Homo sapiens
tacaggatctatacattgatcgtcctttaccatatctcattgggtcaaagctgttcatggaacaagaagatgtaggtcttggagagctgtccagtgaagaaggctctgtaggcagtgatcgtggcagtattgtggacactgaggaagagaaagaagaggaggagtcagatgaagattttgcccatcacagtgacaatgaacaaaaccagcacaccacacaaatgagtgatgaggaagaggatgatgatggctgtgacctttttgctgactctgagaaggaggaggaagatattgaggacattgaagaaaatactagacctaaaagaagcagacctacatcgtttgcagatgagctggctgcccgcatcaagggggatgccatgggtcgagtggacgaggagccgacaaccttaccctcaggagaagcaaaacctcggaagacactcaaagagaagaaggaaaggagaactccttcagacgatgaagaggataacttattcgcaccccccaagctgaccgacgaggacttctcgccatttggctctggaggtggcctgttcagtggcggcaaggggctatttgatgatgaggacgaggagagtgacctcttcacggaagcctcccaggatcggcaagctggagcctctgttaaggaggagtcttcatcatccaaacctggaaagaaaatcccagcaggagctgtttctgtatttttaggagacacggatgtgtttggtgctgcctccgttccatcactgaaggagccacagaagcctgagcagcccactccaaggaaaagcccctatggtccccctcccactggcctctttgatgatgatgatggtgatgatgatgacgactttttctcggcaccccacagcaaaccttctaaaacacgcaaagtccaatccactgccgatatctttggtgacgaagaaggagatctgttcaaagaaaaagccgtagcatcgccagaagccactgtgagtcagacagatgaaaataaagcaagagcagaaaaaaaggatttgttttcttctcaaagtgcgagtaacttaaaaggtgcatctctgctgcctggcaagctccccacgtcggtttccctgtttgatgatgaagatgaagaggataatctttttgggggtacagctgctaagaagcagacattgtctctacaagctcagagagaagagaaagcaaaagcctccgagctctccaaaaagaaagcatctgccctgttgttcagcagtgatgaggaggaccagtggaatattcctgcttcacagacccacttagcatctgacagcaggtctaaaggagaacccagggattctgggaccctccagagccaggaggccaaggctgtgaaaaagaccagtctctttgaggaagacaaagaagatgatctttttgccattgccaaggacagatacatcctacctcctattgttcccgaagttgtctgtcaagttttgtgtatggaaagtaattcataccttcatcagatctcaaaagaagctttacacacacaagaagaagttgagccaaaagaagacccagagagtgtcactcctctttgaagacgatgttgatagcggaggctctctgtttggctctcctcccacatctgttcctcctgcaacaaagaaaaaagagactgtctctgaggcaccacctttgctgttcagcgatgaagaagagaaggaggcacaacttggagtgaagtctgtggataagaaggttgagagtgccaaggagtcattaaaatttgggagaactgatgtggctgagtcagaaaaggaaggacttttgactagatctgctcaggaaacagtcaagcattctgatttattttcttcatcatccccatgggacaaaggaaccaagcctagaaccaaaactgttcttagcttgtttgatgaggaagaggataaaatggaagatcaaaacattatccaggctccacagaaagaagtaggaaagggctgcgatcctgatgcccaccccaagagcacaggtgtcttccaggatgaagagctgcttttcagccacaagctccaaaaggacaatgacccagatgttgacctttttgctggcaccaaaaaaaccaagctgttagagccaagtgttgggagcctgtttggggatgatgaagatgatgatcttttcagctctgccaagtcccagcctttggtacaagagaaaaagagagtagtgaaaaaagaccactctgttaactctttcaaaaaccagaaacatcctgaatccattcaaggtagtaaagaaaaaggcatatggaagccggaaacacctcaggactcatcaggtctcgctccatttaaaaccaaagaaccatccactcggatcgggaagatacaagcaaatttagcgatcaacccagcggccttgctgcccacagcggcttcccagatctctgaagtaaagcctgttttgccagaattggcttttccttcatctgaacacagaaggagccacggtctggaaagtgtgcctgtccttcccgggagtggggaggccggtgtgagttttgatcttccagctcaggcagacaccttacacagtgcaaacaagagccgtgtcaagatgagagggaagcgtagaccgcagacccgtgcagctaggcggctggctgctcaggagtccagcgaggctgaggacatgagcgtccccagaggacccattgcacagtgggctgatggcgccatttccccaaatggccatcggccacagctcagagcagccagtggagaagacagcactgaggaggccctggcagctgccgctgcaccttgggaaggtggtcctgtgcctggagtggacacaagcccctttgcaaagtctctgggtcattccagaggggaggctgacctttttgattctggggacattttttccacgggcactggatctcagtccgtggagagaacaaaacccaaggcaaagatagcagagaatcctgccaacccaccagtgggtggtaaagcaaagagccccatgtttcctgctctaggcgaggccagcagtgatgatgatctctttcagtctgctaaaccaaaaccagcaaagaaaacaaatccctttcctctcctggaagatgaggatgacctctttacagatcagaaagtcaagaagaatgagacaaaatccagtagtcagcaggatgtcatattaacaacacaagatatttttgaggatgatatatttgctacggaagcaattaaaccctctcagaaaaccagagagaaggagaaaacattggaatctaatttatttgatgataacattgatatctttgctgacttaactgtaaaaccaaaagaaaagtccaaaaagaaagtggaagccaagtctatatttgatgatgatatggatgacatcttctccactggtatccaggctaagacaaccaaaccaaaaagccgatctgcacaggccgcacctgaaccaagatttgaacacaaggtgtccaacatctttgatgatcccctgaatgcctttggaggccagtagagcacacagggtatccacatgttaccctgcagctacattgttgagttagtgatgatattgtatatgctcatggtcttaactggattacaaaaagcaaatactagaacagctagctcatcttttacccaatgtacttagtatttttctgcactggtttaatcatgcttaatactacaaaacaaaaataaatatttcacagtggttggtttgttttgtttttaaaccacagtttgatttagttagccttgctggggccataatatgcttcagggtgtgtaaaagaagaaatctctttgtggctttcatgggcagggaatctcagagatagcaaatgccacctgaccagaagtctttgttatatggatgggaaccctaacttagggcttgggcaggggaaagagaaagaagatgagagattatacttcatgagtcttagcaatatgggagcaggttttcactgaattctgagggtgcctctgcatgtcctccaaggcaaagtttggcaaactgtggcccccccactgtcatattttgttaataaaattttattggaacacaatcaca

SEQ ID NO: 6735 - protein, 709 aa, Homo sapiens; identical to SEQ ID NO: 6611

SEQ ID NO: 6736 - DNA, 4119 bp, Homo sapiens
tacaggatctatacattgatcgtcctttaccatatctcattgggtcaaagctgttcatggaacaagaagatgtaggtcttggagagctgtccagtgaagaaggctctgtaggcagtgatcgtggcagtattgtggacactgaggaagagaaagaagaggaggagtcagatgaagattttgcccatcacagtgacaatgaacaaaaccagcacaccacacaaatgagtgatgaggaagaggatgatgatggctgtgacctttttgctgactctgagaaggaggaggaagatattgaggacattgaagaaaatactagacctaaaagaagcagacctacatcgtttgcagatgagctggctgcccgcatcaagggggatgccatgggtcgagtggacgaggagccgacaaccttaccctcaggagaagcaaaacctcggaagacactcaaagagaagaaggaaaggagaactccttcagacgatgaagaggataacttattcgcaccccccaagctgaccgacgaggacttctcgccatttggctctggaggtggcctgttcagtggcggcaaggggctatttgatgatgaggacgaggagagtgacctcttcacggaagcctcccaggatcggcaagctggagcctctgttaaggaggagtcttcatcatccaaacctggaaagaaaatcccagcaggagctgtttctgtatttttaggagacacggatgtgtttggtgctgcctccgttccatcactgaaggagccacagaagcctgagcagcccactccaaggaaaagcccctatggtccccctcccactggcctctttgatgatgatgatggtgatgatgatgacgactttttctcggcaccccacagcaaaccttctaaaacacgcaaagtccaatccactgccgatatctttggtgacgaagaaggagatctgttcaaagaaaaagccgtagcatcgccagaagccactgtgagtcagacagatgaaaataaagcaagagcagaaaaaaaggttaccttatcttacagcaaaaatctcaagccctcatcagaaacaaagactcaaaaaggcttattttcagatgaggaggactctgaggatttgttttcttctcaaagtgcgagtaacttaaaaggtgcatctctgctgcctggcaagctccccacgtcggtttccctgtttgatgatgaagatgaagaggataatctttttgggggtacagctgctaagaagcagacattgtctctacaagctcagagagaagagaaagcaaaagcctccgagctctccaaaaagaaagcatctgccctgttgttcagcagtgatgaggaggaccagtggaatattcctgcttcacagacccacttagcatctgacagcaggtctaaaggagaacccagggattctgggaccctccagagccaggaggccaaggctgtgaaaaagaccagtctctttgaggaagacaaagaagatgatctttttgccattgccaaggacagatacatcctacctcctattgttcccgaagttgtctgtcaagttttgtgtatggaaagtaattcataccttcatcagatctcaaaagaagctttacacacacaagaagaagttgagccaaaagaagacccagagagtgtcactcctctttgaagacgatgttgatagcggaggctctctgtttggctctcctcccacatctgttcctcctgcaacaaagaaaaaagagactgtctctgaggcaccacctttgctgttcagcgatgaagaagagaaggaggcacaacttggagtgaagtctgtggataagaaggttgagagtgccaaggagtcattaaaatttgggagaactgatgtggctgagtcagaaaaggaaggacttttgactagatctgctcaggaaacagtcaagcattctgatttattttcttcatcatccccatgggacaaaggaaccaagcctagaaccaaaactgttcttagcttgtttgatgaggaagaggataaaatggaagatcaaaacattatccaggctccacagaaagaagtaggaaagggctgcgatcctgatgcccaccccaagagcacaggtgtcttccaggatgaagagctgcttttcagccacaagctccaaaaggacaatgacccagatgttgacctttttgctggcaccaaaaaaaccaagctgttagagccaagtgttgggagcctgtttggggatgatgaagatgatgatcttttcagctctgccaagtcccagcctttggtacaagagaaaaagagagtagtgaaaaaagaccactctgttaactctttcaaaaaccagaaacatcctgaatccattcaaggtagtaaagaaaaaggcatatggaagccggaaacacctcaggcaaatttagcgatcaacccagcggccttgctgcccacagcggcttcccagatctctgaagtaaagcctgttttgccagaattggcttttccttcatctgaacacagaaggagccacggtctggaaagtgtgcctgtccttcccgggagtggggaggccggtgtgagttttgatcttccagctcaggcagacaccttacacagtgcaaacaagagccgtgtcaagatgagagggaagcgtagaccgcagacccgtgcagctaggcggctggctgctcaggagtccagcgaggctgaggacatgagcgtccccagaggacccattgcacagtgggctgatggcgccatttccccaaatggccatcggccacagctcagagcagccagtggagaagacagcactgaggaggccctggcagctgccgctgcaccttgggaaggtggtcctgtgcctggagtggacacaagcccctttgcaaagtctctgggtcattccagaggggaggctgacctttttgattctggggacattttttccacgggcactggatctcagtccgtggagagaacaaaacccaaggcaaagatagcagagaatcctgccaacccaccagtgggtggtaaagcaaagagccccatgtttcctgctctaggcgaggccagcagtgatgatgatctctttcagtctgctaaaccaaaaccagcaaagaaaacaaatccctttcctctcctggaagatgaggatgacctctttacagatcagaaagtcaagaagaatgagacaaaatccagtagtcagcaggatgtcatattaacaacacaagatatttttgaggatgatatatttgctacggaagcaattaaaccctctcagaaaaccagagagaaggagaaaacattggaatctaatttatttgatgataacattgatatctttgctgacttaactgtaaaaccaaaagaaaagtccaaaaagaaagtggaagccaagtctatatttgatgatgatatggatgacatcttctccactggtatccaggctaagacaaccaaaccaaaaagccgatctgcacaggccgcacctgaaccaagatttgaacacaaggtgtccaacatctttgatgatcccctgaatgcctttggaggccagtagagcacacagggtatccacatgttaccctgcagctacattgttgagttagtgatgatattgtatatgctcatggtcttaactggattacaaaaagcaaatactagaacagctagctcatcttttacccaatgtacttagtatttttctgcactggtttaatcatgcttaatactacaaaacaaaaataaatatttcacagtggttggtttgttttgtttttaaaccacagtttgatttagttagccttgctggggccataatatgcttcagggtgtgtaaaagaagaaatctctttgtggctttcatgggcagggaatctcagagatagcaaatgccacctgaccagaagtctttgttatatggatgggaaccctaacttagggcttgggcaggggaaagagaaagaagatgagagattatacttcatgagtcttagcaatatgggagcaggttttcactgaattctgagggtgcctctgcatgtcctccaaggcaaagtttggcaaactgtggcccccccactgtcatattttgttaataaaattttattggaacacaatcaca

SEQ ID NO: 6737 - protein, 688 aa, Homo sapiens; identical to SEQ ID NO: 6613

SEQ ID NO: 6738 - DNA, 4182 bp, Homo sapiens
tacaggatctatacattgatcgtcctttaccatatctcattgggtcaaagctgttcatggaacaagaagatgtaggtcttggagagctgtccagtgaagaaggctctgtaggcagtgatcgtggcagtattgtggacactgaggaagagaaagaagaggaggagtcagatgaagattttgcccatcacagtgacaatgaacaaaaccagcacaccacacaaatgagtgatgaggaagaggatgatgatggctgtgacctttttgctgactctgagaaggaggaggaagatattgaggacattgaagaaaatactagacctaaaagaagcagacctacatcgtttgcagatgagctggctgcccgcatcaagggggatgccatgggtcgagtggacgaggagccgacaaccttaccctcaggagaagcaaaacctcggaagacactcaaagagaagaaggaaaggagaactccttcagacgatgaagaggataacttattcgcaccccccaagctgaccgacgaggacttctcgccatttggctctggaggtggcctgttcagtggcggcaaggggctatttgatgatgaggacgaggagagtgacctcttcacggaagcctcccaggatcggcaagctggagcctctgttaaggaggagtcttcatcatccaaacctggaaagaaaatcccagcaggagctgtttctgtatttttaggagacacggatgtgtttggtgctgcctccgttccatcactgaaggagccacagaagcctgagcagcccactccaaggaaaagcccctatggtccccctcccactggcctctttgatgatgatgatggtgatgatgatgacgactttttctcggcaccccacagcaaaccttctaaaacacgcaaagtccaatccactgccgatatctttggtgacgaagaaggagatctgttcaaagaaaaagccgtagcatcgccagaagccactgtgagtcagacagatgaaaataaagcaagagcagaaaaaaaggttaccttatcttacagcaaaaatctcaagccctcatcagaaacaaagactcaaaaaggcttattttcagatgaggaggactctgaggatttgttttcttctcaaagtgcgagtaacttaaaaggtgcatctctgctgcctggcaagctccccacgtcggtttccctgtttgatgatgaagatgaagaggataatctttttgggggtacagctgctaagaagcagacattgtctctacaagctcagagagaagagaaagcaaaagcctccgagctctccaaaaagaaagcatctgccctgttgttcagcagtgatgaggaggaccagtggaatattcctgcttcacagacccacttagcatctgacagcaggtctaaaggagaacccagggattctgggaccctccagagccaggaggccaaggctgtgaaaaagaccagtctctttgaggaagacaaagaagatgatctttttgccattgccaaggacagatacatcctacctcctattgttcccgaagttgtctgtcaagttttgtgtatggaaagtaattcataccttcatcagatctcaaaagaagctttacacacacaagaagaagttgagccaaaagaagacccagagagtgtcactcctctttgaagacgatgttgatagcggaggctctctgtttggctctcctcccacatctgttcctcctgcaacaaagaaaaaagagactgtctctgaggcaccacctttgctgttcagcgatgaagaagagaaggaggcacaacttggagtgaagtctgtggataagaaggttgagagtgccaaggagtcattaaaatttgggagaactgatgtggctgagtcagaaaaggaaggacttttgactagatctgctcaggaaacagtcaagcattctgatttattttcttcatcatccccatgggacaaaggaaccaagcctagaaccaaaactgttcttagcttgtttgatgaggaagaggataaaatggaagatcaaaacattatccaggctccacagaaagaagtaggaaagggctgcgatcctgatgcccaccccaagagcacaggtgtcttccaggatgaagagctgcttttcagccacaagctccaaaaggacaatgacccagatgttgacctttttgctggcaccaaaaaaaccaagctgttagagccaagtgttgggagcctgtttggggatgatgaagatgatgatcttttcagctctgccaagtcccagcctttggtacaagagaaaaagagagtagtgaaaaaagaccactctgttaactctttcaaaaaccagaaacatcctgaatccattcaaggtagtaaagaaaaaggcatatggaagccggaaacacctcaggactcatcaggtctcgctccatttaaaaccaaagaaccatccactcggatcgggaagatacaagcaaatttagcgatcaacccagcggccttgctgcccacagcggcttcccagatctctgaagtaaagcctgttttgccagaattggcttttccttcatctgaacacagaaggagccacggtctggaaagtgtgcctgtccttcccgggagtggggaggccggtgtgagttttgatcttccagctcaggcagacaccttacacagtgcaaacaagagccgtgtcaagatgagagggaagcgtagaccgcagacccgtgcagctaggcggctggctgctcaggagtccagcgaggctgaggacatgagcgtccccagaggacccattgcacagtgggctgatggcgccatttccccaaatggccatcggccacagctcagagcagccagtggagaagacagcactgaggaggccctggcagctgccgctgcaccttgggaaggtggtcctgtgcctggagtggacacaagcccctttgcaaagtctctgggtcattccagaggggaggctgacctttttgattctggggacattttttccacgggcactggatctcagtccgtggagagaacaaaacccaaggcaaagatagcagagaatcctgccaacccaccagtgggtggtaaagcaaagagccccatgtttcctgctctaggcgaggccagcagtgatgatgatctctttcagtctgctaaaccaaaaccagcaaagaaaacaaatccctttcctctcctggaagatgaggatgacctctttacagatcagaaagtcaagaagaatgagacaaaatccagtagtcagcaggatgtcatattaacaacacaagatatttttgaggatgatatatttgctacggaagcaattaaaccctctcagaaaaccagagagaaggagaaaacattggaatctaatttatttgatgataacattgatatctttgctgacttaactgtaaaaccaaaagaaaagtccaaaaagaaagtggaagccaagtctatatttgatgatgatatggatgacatcttctccactggtatccaggctaagacaaccaaaccaaaaagccgatctgcacaggccgcacctgaaccaagatttgaacacaaggtgtccaacatctttgatgatcccctgaatgcctttggaggccagtagagcacacagggtatccacatgttaccctgcagctacattgttgagttagtgatgatattgtatatgctcatggtcttaactggattacaaaaagcaaatactagaacagctagctcatcttttacccaatgtacttagtatttttctgcactggtttaatcatgcttaatactacaaaacaaaaataaatatttcacagtggttggtttgttttgtttttaaaccacagtttgatttagttagccttgctggggccataatatgcttcagggtgtgtaaaagaagaaatctctttgtggctttcatgggcagggaatctcagagatagcaaatgccacctgaccagaagtctttgttatatggatgggaaccctaacttagggcttgggcaggggaaagagaaagaagatgagagattatacttcatgagtcttagcaatatgggagcaggttttcactgaattctgagggtgcctctgcatgtcctccaaggcaaagtttggcaaactgtggcccccccactgtcatattttgttaataaaattttattggaacacaatcaca

SEQ ID NO: 6739 - protein, 709 aa, Homo sapiens; identical to SEQ ID NO: 6611

SEQ ID NO: 6740 - DNA, 4004 bp, Homo sapiens
tacaggatctatacattgatcgtcctttaccatatctcattgggtcaaagctgttcatggaacaagaagatgtaggtcttggagagctgtccagtgaagaaggctctgtaggcagtgatcgtggcagtattgtggacactgaggaagagaaagaagaggaggagtcagatgaagattttgcccatcacagtgacaatgaacaaaaccagcacaccacacaaatgagtgatgaggaagaggatgatgatggctgtgacctttttgctgactctgagaaggaggaggaagatattgaggacattgaagaaaatactagacctaaaagaagcagacctacatcgtttgcagatgagctggctgcccgcatcaagggggatgccatgggtcgagtggacgaggagccgacaaccttaccctcaggagaagcaaaacctcggaagacactcaaagagaagaaggaaaggagaactccttcagacgatgaagaggataacttattcgcaccccccaagctgaccgacgaggacttctcgccatttggctctggaggtggcctgttcagtggcggcaaggggctatttgatgatgaggacgaggagagtgacctcttcacggaagcctcccaggatcggcaagctggagcctctgttaaggaggagtcttcatcatccaaacctggaaagaaaatcccagcaggagctgtttctgtatttttaggagacacggatgtgtttggtgctgcctccgttccatcactgaaggagccacagaagcctgagcagcccactccaaggaaaagcccctatggtccccctcccactggcctctttgatgatgatgatggtgatgatgatgacgactttttctcggcaccccacagcaaaccttctaaaacacgcaaagtccaatccactgccgatatctttggtgacgaagaaggagatctgttcaaagaaaaagccgtagcatcgccagaagccactgtgagtcagacagatgaaaataaagcaagagcagaaaaaaaggttaccttatcttacagcaaaaatctcaagccctcatcagaaacaaagactcaaaaaggcttattttcagatgaggaggactctgaggatttgttttcttctcaaagtgcgagtaacttaaaaggtgcatctctgctgcctggcaagctccccacgtcggtttccctgtttgatgatgaagatgaagaggataatctttttgggggtacagctgctaagaagcagacattgtctctacaagctcagagagaagagaaagcaaaagcctccgagctctccaaaaagaaagcatctgccctgttgttcagcagtgatgaggaggaccagtggaatattcctgcttcacagacccacttagcatctgacagcaggtctaaaggagaacccagggattctgggaccctccagagccaggaggccaaggctgtgaaaaagaccagtctctttgaggaagacaaagaagatgatctttttgccattgccaaggacagccaaaagaagacccagagagtgtcactcctctttgaagacgatgttgatagcggaggctctctgtttggctctcctcccacatctgttcctcctgcaacaaagaaaaaagagactgtctctgaggcaccacctttgctgttcagcgatgaagaagagaaggaggcacaacttggagtgaagtctgtggataagaaggttgagagtgccaaggagtcattaaaatttgggagaactgatgtggctgagtcagaaaaggaaggacttttgactagatctgctcaggaaacagtcaagcattctgatttattttcttcatcatccccatgggacaaaggaaccaagcctagaaccaaaactgttcttagcttgtttgatgaggaagaggataaaatggaagatcaaaacattatccaggctccacagaaagaagtaggaaagggctgcgatcctgatgcccaccccaagagcacaggtgtcttccaggatgaagagctgcttttcagccacaagctccaaaaggacaatgacccagatgttgacctttttgctggcaccaaaaaaaccaagctgttagagccaagtgttgggagcctgtttggggatgatgaagatgatgatcttttcagctctgccaagtcccagcctttggtacaagagaaaaagagagtagtgaaaaaagaccactctgttaactctttcaaaaaccagaaacatcctgaatccattcaaggtagtaaagaaaaaggcatatggaagccggaaacacctcaggcaaatttagcgatcaacccagcggccttgctgcccacagcggcttcccagatctctgaagtaaagcctgttttgccagaattggcttttccttcatctgaacacagaaggagccacggtctggaaagtgtgcctgtccttcccgggagtggggaggccggtgtgagttttgatcttccagctcaggcagacaccttacacagtgcaaacaagagccgtgtcaagatgagagggaagcgtagaccgcagacccgtgcagctaggcggctggctgctcaggagtccagcgaggctgaggacatgagcgtccccagaggacccattgcacagtgggctgatggcgccatttccccaaatggccatcggccacagctcagagcagccagtggagaagacagcactgaggaggccctggcagctgccgctgcaccttgggaaggtggtcctgtgcctggagtggacacaagcccctttgcaaagtctctgggtcattccagaggggaggctgacctttttgattctggggacattttttccacgggcactggatctcagtccgtggagagaacaaaacccaaggcaaagatagcagagaatcctgccaacccaccagtgggtggtaaagcaaagagccccatgtttcctgctctaggcgaggccagcagtgatgatgatctctttcagtctgctaaaccaaaaccagcaaagaaaacaaatccctttcctctcctggaagatgaggatgacctctttacagatcagaaagtcaagaagaatgagacaaaatccagtagtcagcaggatgtcatattaacaacacaagatatttttgaggatgatatatttgctacggaagcaattaaaccctctcagaaaaccagagagaaggagaaaacattggaatctaatttatttgatgataacattgatatctttgctgacttaactgtaaaaccaaaagaaaagtccaaaaagaaagtggaagccaagtctatatttgatgatgatatggatgacatcttctccactggtatccaggctaagacaaccaaaccaaaaagccgatctgcacaggccgcacctgaaccaagatttgaacacaaggtgtccaacatctttgatgatcccctgaatgcctttggaggccagtagagcacacagggtatccacatgttaccctgcagctacattgttgagttagtgatgatattgtatatgctcatggtcttaactggattacaaaaagcaaatactagaacagctagctcatcttttacccaatgtacttagtatttttctgcactggtttaatcatgcttaatactacaaaacaaaaataaatatttcacagtggttggtttgttttgtttttaaaccacagtttgatttagttagccttgctggggccataatatgcttcagggtgtgtaaaagaagaaatctctttgtggctttcatgggcagggaatctcagagatagcaaatgccacctgaccagaagtctttgttatatggatgggaaccctaacttagggcttgggcaggggaaagagaaagaagatgagagattatacttcatgagtcttagcaatatgggagcaggttttcactgaattctgagggtgcctctgcatgtcctccaaggcaaagtttggcaaactgtggcccccccactgtcatattttgttaataaaattttattggaacacaatcaca

SEQ ID NO: 6741 - protein, 1127 aa, Homo sapiens; identical to SEQ ID NO: 6653

SEQ ID NO: 6742 - DNA, 4067 bp, Homo sapiens
tacaggatctatacattgatcgtcctttaccatatctcattgggtcaaagctgttcatggaacaagaagatgtaggtcttggagagctgtccagtgaagaaggctctgtaggcagtgatcgtggcagtattgtggacactgaggaagagaaagaagaggaggagtcagatgaagattttgcccatcacagtgacaatgaacaaaaccagcacaccacacaaatgagtgatgaggaagaggatgatgatggctgtgacctttttgctgactctgagaaggaggaggaagatattgaggacattgaagaaaatactagacctaaaagaagcagacctacatcgtttgcagatgagctggctgcccgcatcaagggggatgccatgggtcgagtggacgaggagccgacaaccttaccctcaggagaagcaaaacctcggaagacactcaaagagaagaaggaaaggagaactccttcagacgatgaagaggataacttattcgcaccccccaagctgaccgacgaggacttctcgccatttggctctggaggtggcctgttcagtggcggcaaggggctatttgatgatgaggacgaggagagtgacctcttcacggaagcctcccaggatcggcaagctggagcctctgttaaggaggagtcttcatcatccaaacctggaaagaaaatcccagcaggagctgtttctgtatttttaggagacacggatgtgtttggtgctgcctccgttccatcactgaaggagccacagaagcctgagcagcccactccaaggaaaagcccctatggtccccctcccactggcctctttgatgatgatgatggtgatgatgatgacgactttttctcggcaccccacagcaaaccttctaaaacacgcaaagtccaatccactgccgatatctttggtgacgaagaaggagatctgttcaaagaaaaagccgtagcatcgccagaagccactgtgagtcagacagatgaaaataaagcaagagcagaaaaaaaggttaccttatcttacagcaaaaatctcaagccctcatcagaaacaaagactcaaaaaggcttattttcagatgaggaggactctgaggatttgttttcttctcaaagtgcgagtaacttaaaaggtgcatctctgctgcctggcaagctccccacgtcggtttccctgtttgatgatgaagatgaagaggataatctttttgggggtacagctgctaagaagcagacattgtctctacaagctcagagagaagagaaagcaaaagcctccgagctctccaaaaagaaagcatctgccctgttgttcagcagtgatgaggaggaccagtggaatattcctgcttcacagacccacttagcatctgacagcaggtctaaaggagaacccagggattctgggaccctccagagccaggaggccaaggctgtgaaaaagaccagtctctttgaggaagacaaagaagatgatctttttgccattgccaaggacagccaaaagaagacccagagagtgtcactcctctttgaagacgatgttgatagcggaggctctctgtttggctctcctcccacatctgttcctcctgcaacaaagaaaaaagagactgtctctgaggcaccacctttgctgttcagcgatgaagaagagaaggaggcacaacttggagtgaagtctgtggataagaaggttgagagtgccaaggagtcattaaaatttgggagaactgatgtggctgagtcagaaaaggaaggacttttgactagatctgctcaggaaacagtcaagcattctgatttattttcttcatcatccccatgggacaaaggaaccaagcctagaaccaaaactgttcttagcttgtttgatgaggaagaggataaaatggaagatcaaaacattatccaggctccacagaaagaagtaggaaagggctgcgatcctgatgcccaccccaagagcacaggtgtcttccaggatgaagagctgcttttcagccacaagctccaaaaggacaatgacccagatgttgacctttttgctggcaccaaaaaaaccaagctgttagagccaagtgttgggagcctgtttggggatgatgaagatgatgatcttttcagctctgccaagtcccagcctttggtacaagagaaaaagagagtagtgaaaaaagaccactctgttaactctttcaaaaaccagaaacatcctgaatccattcaaggtagtaaagaaaaaggcatatggaagccggaaacacctcaggactcatcaggtctcgctccatttaaaaccaaagaaccatccactcggatcgggaagatacaagcaaatttagcgatcaacccagcggccttgctgcccacagcggcttcccagatctctgaagtaaagcctgttttgccagaattggcttttccttcatctgaacacagaaggagccacggtctggaaagtgtgcctgtccttcccgggagtggggaggccggtgtgagttttgatcttccagctcaggcagacaccttacacagtgcaaacaagagccgtgtcaagatgagagggaagcgtagaccgcagacccgtgcagctaggcggctggctgctcaggagtccagcgaggctgaggacatgagcgtccccagaggacccattgcacagtgggctgatggcgccatttccccaaatggccatcggccacagctcagagcagccagtggagaagacagcactgaggaggccctggcagctgccgctgcaccttgggaaggtggtcctgtgcctggagtggacacaagcccctttgcaaagtctctgggtcattccagaggggaggctgacctttttgattctggggacattttttccacgggcactggatctcagtccgtggagagaacaaaacccaaggcaaagatagcagagaatcctgccaacccaccagtgggtggtaaagcaaagagccccatgtttcctgctctaggcgaggccagcagtgatgatgatctctttcagtctgctaaaccaaaaccagcaaagaaaacaaatccctttcctctcctggaagatgaggatgacctctttacagatcagaaagtcaagaagaatgagacaaaatccagtagtcagcaggatgtcatattaacaacacaagatatttttgaggatgatatatttgctacggaagcaattaaaccctctcagaaaaccagagagaaggagaaaacattggaatctaatttatttgatgataacattgatatctttgctgacttaactgtaaaaccaaaagaaaagtccaaaaagaaagtggaagccaagtctatatttgatgatgatatggatgacatcttctccactggtatccaggctaagacaaccaaaccaaaaagccgatctgcacaggccgcacctgaaccaagatttgaacacaaggtgtccaacatctttgatgatcccctgaatgcctttggaggccagtagagcacacagggtatccacatgttaccctgcagctacattgttgagttagtgatgatattgtatatgctcatggtcttaactggattacaaaaagcaaatactagaacagctagctcatcttttacccaatgtacttagtatttttctgcactggtttaatcatgcttaatactacaaaacaaaaataaatatttcacagtggttggtttgttttgtttttaaaccacagtttgatttagttagccttgctggggccataatatgcttcagggtgtgtaaaagaagaaatctctttgtggctttcatgggcagggaatctcagagatagcaaatgccacctgaccagaagtctttgttatatggatgggaaccctaacttagggcttgggcaggggaaagagaaagaagatgagagattatacttcatgagtcttagcaatatgggagcaggttttcactgaattctgagggtgcctctgcatgtcctccaaggcaaagtttggcaaactgtggcccccccactgtcatattttgttaataaaattttattggaacacaatcaca

SEQ ID NO: 6743 - protein, 1148 aa, Homo sapiens; identical to SEQ ID NO: 6637

SEQ ID NO: 6744 - DNA, 4032 bp, Homo sapiens
tacaggatctatacattgatcgtcctttaccatatctcattgggtcaaagctgttcatggaacaagaagatgtaggtcttggagagctgtccagtgaagaaggctctgtaggcagtgatcgtggcagtattgtggacactgaggaagagaaagaagaggaggagtcagatgaagattttgcccatcacagtgacaatgaacaaaaccagcacaccacacaaatgagtgatgaggaagaggatgatgatggctgtgacctttttgctgactctgagaaggaggaggaagatattgaggacattgaagaaaatactagacctaaaagaagcagacctacatcgtttgcagatgagctggctgcccgcatcaagggggatgccatgggtcgagtggacgaggagccgacaaccttaccctcaggagaagcaaaacctcggaagacactcaaagagaagaaggaaaggagaactccttcagacgatgaagaggataacttattcgcaccccccaagctgaccgacgaggacttctcgccatttggctctggaggtggcctgttcagtggcggcaaggggctatttgatgatgaggacgaggagagtgacctcttcacggaagcctcccaggatcggcaagctggagcctctgttaaggaggagtcttcatcatccaaacctggaaagaaaatcccagcaggagctgtttctgtatttttaggagacacggatgtgtttggtgctgcctccgttccatcactgaaggagccacagaagcctgagcagcccactccaaggaaaagcccctatggtccccctcccactggcctctttgatgatgatgatggtgatgatgatgacgactttttctcggcaccccacagcaaaccttctaaaacacgcaaagtccaatccactgccgatatctttggtgacgaagaaggagatctgttcaaagaaaaagccgtagcatcgccagaagccactgtgagtcagacagatgaaaataaagcaagagcagaaaaaaaggatttgttttcttctcaaagtgcgagtaacttaaaaggtgcatctctgctgcctggcaagctccccacgtcggtttccctgtttgatgatgaagatgaagaggataatctttttgggggtacagctgctaagaagcagacattgtctctacaagctcagagagaagagaaagcaaaagcctccgagctctccaaaaagaaagcatctgccctgttgttcagcagtgatgaggaggaccagtggaatattcctgcttcacagacccacttagcatctgacagcaggtctaaaggagaacccagggattctgggaccctccagagccaggaggccaaggctgtgaaaaagaccagtctctttgaggaagacaaagaagatgatctttttgccattgccaaggacagatacatcctacctcctattgttcccgaagttgtctgtcaagttttgtgtatggaaagtaattcataccttcatcagatctcaaaagaagctttacacacacaagaagaagttgagccaaaagaagacccagagagtgtcactcctctttgaagacgatgttgatagcggaggctctctgtttggctctcctcccacatctgttcctcctgcaacaaagaaaaaagagactgtctctgaggcaccacctttgctgttcagcgatgaagaagagaaggaggcacaacttggagtgaagtctgtggataagaaggttgagagtgccaaggagtcattaaaatttgggagaactgatgtggctgagtcagaaaaggaaggacttttgactagatctgctcaggaaacagtcaagcattctgatttattttcttcatcatccccatgggacaaaggaaccaagcctagaaccaaaactgttcttagcttgtttgatgaggaagaggataaaatggaagatcaaaacattatccaggctccacagaaagaagtaggaaagggctgcgatcctgatgcccaccccaagagcacaggtgtcttccaggatgaagagctgcttttcagccacaagctccaaaaggacaatgacccagatgttgacctttttgctggcaccaaaaaaaccaagctgttagagccaagtgttgggagcctgtttggggatgatgaagatgatgatcttttcagctctgccaagtcccagcctttggtacaagagaaaaagagagtagtgaaaaaagaccactctgttaactctttcaaaaaccagaaacatcctgaatccattcaaggtagtaaagaaaaaggcatatggaagccggaaacacctcaggcaaatttagcgatcaacccagcggccttgctgcccacagcggcttcccagatctctgaagtaaagcctgttttgccagaattggcttttccttcatctgaacacagaaggagccacggtctggaaagtgtgcctgtccttcccgggagtggggaggccggtgtgagttttgatcttccagctcaggcagacaccttacacagtgcaaacaagagccgtgtcaagatgagagggaagcgtagaccgcagacccgtgcagctaggcggctggctgctcaggagtccagcgaggctgaggacatgagcgtccccagaggacccattgcacagtgggctgatggcgccatttccccaaatggccatcggccacagctcagagcagccagtggagaagacagcactgaggaggccctggcagctgccgctgcaccttgggaaggtggtcctgtgcctggagtggacacaagcccctttgcaaagtctctgggtcattccagaggggaggctgacctttttgattctggggacattttttccacgggcactggatctcagtccgtggagagaacaaaacccaaggcaaagatagcagagaatcctgccaacccaccagtgggtggtaaagcaaagagccccatgtttcctgctctaggcgaggccagcagtgatgatgatctctttcagtctgctaaaccaaaaccagcaaagaaaacaaatccctttcctctcctggaagatgaggatgacctctttacagatcagaaagtcaagaagaatgagacaaaatccagtagtcagcaggatgtcatattaacaacacaagatatttttgaggatgatatatttgctacggaagcaattaaaccctctcagaaaaccagagagaaggagaaaacattggaatctaatttatttgatgataacattgatatctttgctgacttaactgtaaaaccaaaagaaaagtccaaaaagaaagtggaagccaagtctatatttgatgatgatatggatgacatcttctccactggtatccaggctaagacaaccaaaccaaaaagccgatctgcacaggccgcacctgaaccaagatttgaacacaaggtgtccaacatctttgatgatcccctgaatgcctttggaggccagtagagcacacagggtatccacatgttaccctgcagctacattgttgagttagtgatgatattgtatatgctcatggtcttaactggattacaaaaagcaaatactagaacagctagctcatcttttacccaatgtacttagtatttttctgcactggtttaatcatgcttaatactacaaaacaaaaataaatatttcacagtggttggtttgttttgtttttaaaccacagtttgatttagttagccttgctggggccataatatgcttcagggtgtgtaaaagaagaaatctctttgtggctttcatgggcagggaatctcagagatagcaaatgccacctgaccagaagtctttgttatatggatgggaaccctaacttagggcttgggcaggggaaagagaaagaagatgagagattatacttcatgagtcttagcaatatgggagcaggttttcactgaattctgagggtgcctctgcatgtcctccaaggcaaagtttggcaaactgtggcccccccactgtcatattttgttaataaaattttattggaacacaatcaca

SEQ ID NO: 6745 - protein, 688 aa, Homo sapiens; identical to SEQ ID NO: 6613

SEQ ID NO: 6746 - DNA, 3681 bp, Homo sapiens
tacaggatctatacattgatcgtcctttaccatatctcattgggtcaaagctgttcatggaacaagaagatgtaggtcttggagagctgtccagtgaagaaggctctgtaggcagtgatcgtggcagtattgtggacactgaggaagagaaagaagaggaggagtcagatgaagattttgcccatcacagtgacaatgaacaaaaccagcacaccacacaaatgagtgatgaggaagaggatgatgatggctgtgacctttttgctgactctgagaaggaggaggaagatattgaggacattgaagaaaatactagacctaaaagaagcagacctacatcgtttgcagatgagctggctgcccgcatcaagggggatgccatgggtcgagtggacgaggagccgacaaccttaccctcaggagaagcaaaacctcggaagacactcaaagagaagaaggaaaggagaactccttcagacgatgaagaggataacttattcgcaccccccaagctgaccgacgaggacttctcgccatttggctctggaggtggcctgttcagtggcggcaaggggctatttgatgatgaggacgaggagagtgacctcttcacggaagcctcccaggatcggcaagctggagcctctgttaaggaggagtcttcatcatccaaacctggaaagaaaatcccagcaggagctgtttctgtatttttaggagacacggatgtgtttggtgctgcctccgttccatcactgaaggagccacagaagcctgagcagcccactccaaggaaaagcccctatggtccccctcccactggcctctttgatgatgatgatggtgatgatgatgacgactttttctcggcaccccacagcaaaccttctaaaacacgcaaagtccaatccactgccgatatctttggtgacgaagaaggagatctgttcaaagaaaaagccgtagcatcgccagaagccactgtgagtcagacagatgaaaataaagcaagagcagaaaaaaaggttaccttatcttacagcaaaaatctcaagccctcatcagaaacaaagactcaaaaaggcttattttcagatgaggaggactctgaggatttgttttcttctcaaagtgcgagtaacttaaaaggtgcatctctgctgcctggcaagctccccacgtcggtttccctgtttgatgatgaagatgaagaggataatctttttgggggtacagctgctaagaagcagacattgtctctacaagctcagagagaagagaaagcaaaagcctccgagctctccaaaaagaaagcatctgccctgttgttcagcagtgatgaggagccaaaagaagacccagagagtgtcactcctctttgaagacgatgttgatagcggaggctctctgtttggctctcctcccacatctgttcctcctgcaacaaaggaaggacttttgactagatctgctcaggaaacagtcaagcattctgatttattttcttcatcatccccatgggacaaaggaaccaagcctagaaccaaaactgttcttagcttgtttgatgaggaagaggataaaatggaagatcaaaacattatccaggctccacagaaagaagtaggaaagggctgcgatcctgatgcccaccccaagagcacaggtgtcttccaggatgaagagctgcttttcagccacaagctccaaaaggacaatgacccagatgttgacctttttgctggcaccaaaaaaaccaagctgttagagccaagtgttgggagcctgtttggggatgatgaagatgatgatcttttcagctctgccaagtcccagcctttggtacaagagaaaaagagagtagtgaaaaaagaccactctgttaactctttcaaaaaccagaaacatcctgaatccattcaaggtagtaaagaaaaaggcatatggaagccggaaacacctcaggcaaatttagcgatcaacccagcggccttgctgcccacagcggcttcccagatctctgaagtaaagcctgttttgccagaattggcttttccttcatctgaacacagaaggagccacggtctggaaagtgtgcctgtccttcccgggagtggggaggccggtgtgagttttgatcttccagctcaggcagacaccttacacagtgcaaacaagagccgtgtcaagatgagagggaagcgtagaccgcagacccgtgcagctaggcggctggctgctcaggagtccagcgaggctgaggacatgagcgtccccagaggacccattgcacagtgggctgatggcgccatttccccaaatggccatcggccacagctcagagcagccagtggagaagacagcactgaggaggccctggcagctgccgctgcaccttgggaaggtggtcctgtgcctggagtggacacaagcccctttgcaaagtctctgggtcattccagaggggaggctgacctttttgattctggggacattttttccacgggcactggatctcagtccgtggagagaacaaaacccaaggcaaagatagcagagaatcctgccaacccaccagtgggtggtaaagcaaagagccccatgtttcctgctctaggcgaggccagcagtgatgatgatctctttcagtctgctaaaccaaaaccagcaaagaaaacaaatccctttcctctcctggaagatgaggatgacctctttacagatcagaaagtcaagaagaatgagacaaaatccagtagtcagcaggatgtcatattaacaacacaagatatttttgaggatgatatatttgctacggaagcaattaaaccctctcagaaaaccagagagaaggagaaaacattggaatctaatttatttgatgataacattgatatctttgctgacttaactgtaaaaccaaaagaaaagtccaaaaagaaagtggaagccaagtctatatttgatgatgatatggatgacatcttctccactggtatccaggctaagacaaccaaaccaaaaagccgatctgcacaggccgcacctgaaccaagatttgaacacaaggtgtccaacatctttgatgatcccctgaatgcctttggaggccagtagagcacacagggtatccacatgttaccctgcagctacattgttgagttagtgatgatattgtatatgctcatggtcttaactggattacaaaaagcaaatactagaacagctagctcatcttttacccaatgtacttagtatttttctgcactggtttaatcatgcttaatactacaaaacaaaaataaatatttcacagtggttggtttgttttgtttttaaaccacagtttgatttagttagccttgctggggccataatatgcttcagggtgtgtaaaagaagaaatctctttgtggctttcatgggcagggaatctcagagatagcaaatgccacctgaccagaagtctttgttatatggatgggaaccctaacttagggcttgggcaggggaaagagaaagaagatgagagattatacttcatgagtcttagcaatatgggagcaggttttcactgaattctgagggtgcctctgcatgtcctccaaggcaaagtttggcaaactgtggcccccccactgtcatattttgttaataaaattttattggaacacaatcaca

SEQ ID NO: 6747 - protein, 639 aa, Homo sapiens; identical to SEQ ID NO: 6629

SEQ ID NO: 6748 - DNA, 3744 bp, Homo sapiens
tacaggatctatacattgatcgtcctttaccatatctcattgggtcaaagctgttcatggaacaagaagatgtaggtcttggagagctgtccagtgaagaaggctctgtaggcagtgatcgtggcagtattgtggacactgaggaagagaaagaagaggaggagtcagatgaagattttgcccatcacagtgacaatgaacaaaaccagcacaccacacaaatgagtgatgaggaagaggatgatgatggctgtgacctttttgctgactctgagaaggaggaggaagatattgaggacattgaagaaaatactagacctaaaagaagcagacctacatcgtttgcagatgagctggctgcccgcatcaagggggatgccatgggtcgagtggacgaggagccgacaaccttaccctcaggagaagcaaaacctcggaagacactcaaagagaagaaggaaaggagaactccttcagacgatgaagaggataacttattcgcaccccccaagctgaccgacgaggacttctcgccatttggctctggaggtggcctgttcagtggcggcaaggggctatttgatgatgaggacgaggagagtgacctcttcacggaagcctcccaggatcggcaagctggagcctctgttaaggaggagtcttcatcatccaaacctggaaagaaaatcccagcaggagctgtttctgtatttttaggagacacggatgtgtttggtgctgcctccgttccatcactgaaggagccacagaagcctgagcagcccactccaaggaaaagcccctatggtccccctcccactggcctctttgatgatgatgatggtgatgatgatgacgactttttctcggcaccccacagcaaaccttctaaaacacgcaaagtccaatccactgccgatatctttggtgacgaagaaggagatctgttcaaagaaaaagccgtagcatcgccagaagccactgtgagtcagacagatgaaaataaagcaagagcagaaaaaaaggttaccttatcttacagcaaaaatctcaagccctcatcagaaacaaagactcaaaaaggcttattttcagatgaggaggactctgaggatttgttttcttctcaaagtgcgagtaacttaaaaggtgcatctctgctgcctggcaagctccccacgtcggtttccctgtttgatgatgaagatgaagaggataatctttttgggggtacagctgctaagaagcagacattgtctctacaagctcagagagaagagaaagcaaaagcctccgagctctccaaaaagaaagcatctgccctgttgttcagcagtgatgaggagccaaaagaagacccagagagtgtcactcctctttgaagacgatgttgatagcggaggctctctgtttggctctcctcccacatctgttcctcctgcaacaaaggaaggacttttgactagatctgctcaggaaacagtcaagcattctgatttattttcttcatcatccccatgggacaaaggaaccaagcctagaaccaaaactgttcttagcttgtttgatgaggaagaggataaaatggaagatcaaaacattatccaggctccacagaaagaagtaggaaagggctgcgatcctgatgcccaccccaagagcacaggtgtcttccaggatgaagagctgcttttcagccacaagctccaaaaggacaatgacccagatgttgacctttttgctggcaccaaaaaaaccaagctgttagagccaagtgttgggagcctgtttggggatgatgaagatgatgatcttttcagctctgccaagtcccagcctttggtacaagagaaaaagagagtagtgaaaaaagaccactctgttaactctttcaaaaaccagaaacatcctgaatccattcaaggtagtaaagaaaaaggcatatggaagccggaaacacctcaggactcatcaggtctcgctccatttaaaaccaaagaaccatccactcggatcgggaagatacaagcaaatttagcgatcaacccagcggccttgctgcccacagcggcttcccagatctctgaagtaaagcctgttttgccagaattggcttttccttcatctgaacacagaaggagccacggtctggaaagtgtgcctgtccttcccgggagtggggaggccggtgtgagttttgatcttccagctcaggcagacaccttacacagtgcaaacaagagccgtgtcaagatgagagggaagcgtagaccgcagacccgtgcagctaggcggctggctgctcaggagtccagcgaggctgaggacatgagcgtccccagaggacccattgcacagtgggctgatggcgccatttccccaaatggccatcggccacagctcagagcagccagtggagaagacagcactgaggaggccctggcagctgccgctgcaccttgggaaggtggtcctgtgcctggagtggacacaagcccctttgcaaagtctctgggtcattccagaggggaggctgacctttttgattctggggacattttttccacgggcactggatctcagtccgtggagagaacaaaacccaaggcaaagatagcagagaatcctgccaacccaccagtgggtggtaaagcaaagagccccatgtttcctgctctaggcgaggccagcagtgatgatgatctctttcagtctgctaaaccaaaaccagcaaagaaaacaaatccctttcctctcctggaagatgaggatgacctctttacagatcagaaagtcaagaagaatgagacaaaatccagtagtcagcaggatgtcatattaacaacacaagatatttttgaggatgatatatttgctacggaagcaattaaaccctctcagaaaaccagagagaaggagaaaacattggaatctaatttatttgatgataacattgatatctttgctgacttaactgtaaaaccaaaagaaaagtccaaaaagaaagtggaagccaagtctatatttgatgatgatatggatgacatcttctccactggtatccaggctaagacaaccaaaccaaaaagccgatctgcacaggccgcacctgaaccaagatttgaacacaaggtgtccaacatctttgatgatcccctgaatgcctttggaggccagtagagcacacagggtatccacatgttaccctgcagctacattgttgagttagtgatgatattgtatatgctcatggtcttaactggattacaaaaagcaaatactagaacagctagctcatcttttacccaatgtacttagtatttttctgcactggtttaatcatgcttaatactacaaaacaaaaataaatatttcacagtggttggtttgttttgtttttaaaccacagtttgatttagttagccttgctggggccataatatgcttcagggtgtgtaaaagaagaaatctctttgtggctttcatgggcagggaatctcagagatagcaaatgccacctgaccagaagtctttgttatatggatgggaaccctaacttagggcttgggcaggggaaagagaaagaagatgagagattatacttcatgagtcttagcaatatgggagcaggttttcactgaattctgagggtgcctctgcatgtcctccaaggcaaagtttggcaaactgtggcccccccactgtcatattttgttaataaaattttattggaacacaatcaca

SEQ ID NO: 6749 - protein, 660 aa, Homo sapiens; identical to SEQ ID NO: 6621

SEQ ID NO: 6750 - DNA, 3980 bp, Homo sapiens
tacaggatctatacattgatcgtcctttaccatatctcattgggtcaaagctgttcatggaacaagaagatgtaggtcttggagagctgtccagtgaagaaggctctgtaggcagtgatcgtggcagtattgtggacactgaggaagagaaagaagaggaggagtcagatgaagattttgcccatcacagtgacaatgaacaaaaccagcacaccacacaaatgagtgatgaggaagaggatgatgatggctgtgacctttttgctgactctgagaaggaggaggaagatattgaggacattgaagaaaatactagacctaaaagaagcagacctacatcgtttgcagatgagctggctgcccgcatcaagggggatgccatgggtcgagtggacgaggagccgacaaccttaccctcaggagaagcaaaacctcggaagacactcaaagagaagaaggaaaggagaactccttcagacgatgaagaggataacttattcgcaccccccaagctgaccgacgaggacttctcgccatttggctctggaggtggcctgttcagtggcggcaaggggctatttgatgatgaggacgaggagagtgacctcttcacggaagcctcccaggatcggcaagctggagcctctgttaaggaggagtcttcatcatccaaacctggaaagaaaatcccagcaggagctgtttctgtatttttaggagacacggatgtgtttggtgctgcctccgttccatcactgaaggagccacagaagcctgagcagcccactccaaggaaaagcccctatggtccccctcccactggcctctttgatgatgatgatggtgatgatgatgacgactttttctcggcaccccacagcaaaccttctaaaacacgcaaagtccaatccactgccgatatctttggtgacgaagaaggagatctgttcaaagaaaaagccgtagcatcgccagaagccactgtgagtcagacagatgaaaataaagcaagagcagaaaaaaaggatttgttttcttctcaaagtgcgagtaacttaaaaggtgcatctctgctgcctggcaagctccccacgtcggtttccctgtttgatgatgaagatgaagaggataatctttttgggggtacagctgctaagaagcagacattgtctctacaagctcagagagaagagaaagcaaaagcctccgagctctccaaaaagaaagcatctgccctgttgttcagcagtgatgaggaggaccagtggaatattcctgcttcacagacccacttagcatctgacagcaggtctaaaggagaacccagggattctgggaccctccagagccaggaggccaaggctgtgaaaaagaccagtctctttgaggaagacaaagaagatgatctttttgccattgccaaggacagccaaaagaagacccagagagtgtcactcctctttgaagacgatgttgatagcggaggctctctgtttggctctcctcccacatctgttcctcctgcaacaaagaaaaaagagactgtctctgaggcaccacctttgctgttcagcgatgaagaagagaaggaggcacaacttggagtgaagtctgtggataagaaggttgagagtgccaaggagtcattaaaatttgggagaactgatgtggctgagtcagaaaaggaaggacttttgactagatctgctcaggaaacagtcaagcattctgatttattttcttcatcatccccatgggacaaaggaaccaagcctagaaccaaaactgttcttagcttgtttgatgaggaagaggataaaatggaagatcaaaacattatccaggctccacagaaagaagtaggaaagggctgcgatcctgatgcccaccccaagagcacaggtgtcttccaggatgaagagctgcttttcagccacaagctccaaaaggacaatgacccagatgttgacctttttgctggcaccaaaaaaaccaagctgttagagccaagtgttgggagcctgtttggggatgatgaagatgatgatcttttcagctctgccaagtcccagcctttggtacaagagaaaaagagagtagtgaaaaaagaccactctgttaactctttcaaaaaccagaaacatcctgaatccattcaaggtagtaaagaaaaaggcatatggaagccggaaacacctcaggactcatcaggtctcgctccatttaaaaccaaagaaccatccactcggatcgggaagatacaagcaaatttagcgatcaacccagcggccttgctgcccacagcggcttcccagatctctgaagtaaagcctgttttgccagaattggcttttccttcatctgaacacagaaggagccacggtctggaaagtgtgcctgtccttcccgggagtggggaggccggtgtgagttttgatcttccagctcaggcagacaccttacacagtgcaaacaagagccgtgtcaagatgagagggaagcgtagaccgcagacccgtgcagctaggcggctggctgctcaggagtccagcgaggctgaggacatgagcgtccccagaggacccattgcacagtgggctgatggcgccatttccccaaatggccatcggccacagctcagagcagccagtggagaagacagcactgaggaggccctggcagctgccgctgcaccttgggaaggtggtcctgtgcctggagtggacacaagcccctttgcaaagtctctgggtcattccagaggggaggctgacctttttgattctggggacattttttccacgggcactggatctcagtccgtggagagaacaaaacccaaggcaaagatagcagagaatcctgccaacccaccagtgggtggtaaagcaaagagccccatgtttcctgctctaggcgaggccagcagtgatgatgatctctttcagtctgctaaaccaaaaccagcaaagaaaacaaatccctttcctctcctggaagatgaggatgacctctttacagatcagaaagtcaagaagaatgagacaaaatccagtagtcagcaggatgtcatattaacaacacaagatatttttgaggatgatatatttgctacggaagcaattaaaccctctcagaaaaccagagagaaggagaaaacattggaatctaatttatttgatgataacattgatatctttgctgacttaactgtaaaaccaaaagaaaagtccaaaaagaaagtggaagccaagtctatatttgatgatgatatggatgacatcttctccactggtatccaggctaagacaaccaaaccaaaaagccgatctgcacaggccgcacctgaaccaagatttgaacacaaggtgtccaacatctttgatgatcccctgaatgcctttggaggccagtagagcacacagggtatccacatgttaccctgcagctacattgttgagttagtgatgatattgtatatgctcatggtcttaactggattacaaaaagcaaatactagaacagctagctcatcttttacccaatgtacttagtatttttctgcactggtttaatcatgcttaatactacaaaacaaaaataaatatttcacagtggttggtttgttttgtttttaaaccacagtttgatttagttagccttgctggggccataatatgcttcagggtgtgtaaaagaagaaatctctttgtggctttcatgggcagggaatctcagagatagcaaatgccacctgaccagaagtctttgttatatggatgggaaccctaacttagggcttgggcaggggaaagagaaagaagatgagagattatacttcatgagtcttagcaatatgggagcaggttttcactgaattctgagggtgcctctgcatgtcctccaaggcaaagtttggcaaactgtggcccccccactgtcatattttgttaataaaattttattggaacacaatcaca

SEQ ID NO: 6751 - protein, 1119 aa, Homo sapiens; identical to SEQ ID NO: 6659

SEQ ID NO: 6752 - DNA, 3917 bp, Homo sapiens
tacaggatctatacattgatcgtcctttaccatatctcattgggtcaaagctgttcatggaacaagaagatgtaggtcttggagagctgtccagtgaagaaggctctgtaggcagtgatcgtggcagtattgtggacactgaggaagagaaagaagaggaggagtcagatgaagattttgcccatcacagtgacaatgaacaaaaccagcacaccacacaaatgagtgatgaggaagaggatgatgatggctgtgacctttttgctgactctgagaaggaggaggaagatattgaggacattgaagaaaatactagacctaaaagaagcagacctacatcgtttgcagatgagctggctgcccgcatcaagggggatgccatgggtcgagtggacgaggagccgacaaccttaccctcaggagaagcaaaacctcggaagacactcaaagagaagaaggaaaggagaactccttcagacgatgaagaggataacttattcgcaccccccaagctgaccgacgaggacttctcgccatttggctctggaggtggcctgttcagtggcggcaaggggctatttgatgatgaggacgaggagagtgacctcttcacggaagcctcccaggatcggcaagctggagcctctgttaaggaggagtcttcatcatccaaacctggaaagaaaatcccagcaggagctgtttctgtatttttaggagacacggatgtgtttggtgctgcctccgttccatcactgaaggagccacagaagcctgagcagcccactccaaggaaaagcccctatggtccccctcccactggcctctttgatgatgatgatggtgatgatgatgacgactttttctcggcaccccacagcaaaccttctaaaacacgcaaagtccaatccactgccgatatctttggtgacgaagaaggagatctgttcaaagaaaaagccgtagcatcgccagaagccactgtgagtcagacagatgaaaataaagcaagagcagaaaaaaaggatttgttttcttctcaaagtgcgagtaacttaaaaggtgcatctctgctgcctggcaagctccccacgtcggtttccctgtttgatgatgaagatgaagaggataatctttttgggggtacagctgctaagaagcagacattgtctctacaagctcagagagaagagaaagcaaaagcctccgagctctccaaaaagaaagcatctgccctgttgttcagcagtgatgaggaggaccagtggaatattcctgcttcacagacccacttagcatctgacagcaggtctaaaggagaacccagggattctgggaccctccagagccaggaggccaaggctgtgaaaaagaccagtctctttgaggaagacaaagaagatgatctttttgccattgccaaggacagccaaaagaagacccagagagtgtcactcctctttgaagacgatgttgatagcggaggctctctgtttggctctcctcccacatctgttcctcctgcaacaaagaaaaaagagactgtctctgaggcaccacctttgctgttcagcgatgaagaagagaaggaggcacaacttggagtgaagtctgtggataagaaggttgagagtgccaaggagtcattaaaatttgggagaactgatgtggctgagtcagaaaaggaaggacttttgactagatctgctcaggaaacagtcaagcattctgatttattttcttcatcatccccatgggacaaaggaaccaagcctagaaccaaaactgttcttagcttgtttgatgaggaagaggataaaatggaagatcaaaacattatccaggctccacagaaagaagtaggaaagggctgcgatcctgatgcccaccccaagagcacaggtgtcttccaggatgaagagctgcttttcagccacaagctccaaaaggacaatgacccagatgttgacctttttgctggcaccaaaaaaaccaagctgttagagccaagtgttgggagcctgtttggggatgatgaagatgatgatcttttcagctctgccaagtcccagcctttggtacaagagaaaaagagagtagtgaaaaaagaccactctgttaactctttcaaaaaccagaaacatcctgaatccattcaaggtagtaaagaaaaaggcatatggaagccggaaacacctcaggcaaatttagcgatcaacccagcggccttgctgcccacagcggcttcccagatctctgaagtaaagcctgttttgccagaattggcttttccttcatctgaacacagaaggagccacggtctggaaagtgtgcctgtccttcccgggagtggggaggccggtgtgagttttgatcttccagctcaggcagacaccttacacagtgcaaacaagagccgtgtcaagatgagagggaagcgtagaccgcagacccgtgcagctaggcggctggctgctcaggagtccagcgaggctgaggacatgagcgtccccagaggacccattgcacagtgggctgatggcgccatttccccaaatggccatcggccacagctcagagcagccagtggagaagacagcactgaggaggccctggcagctgccgctgcaccttgggaaggtggtcctgtgcctggagtggacacaagcccctttgcaaagtctctgggtcattccagaggggaggctgacctttttgattctggggacattttttccacgggcactggatctcagtccgtggagagaacaaaacccaaggcaaagatagcagagaatcctgccaacccaccagtgggtggtaaagcaaagagccccatgtttcctgctctaggcgaggccagcagtgatgatgatctctttcagtctgctaaaccaaaaccagcaaagaaaacaaatccctttcctctcctggaagatgaggatgacctctttacagatcagaaagtcaagaagaatgagacaaaatccagtagtcagcaggatgtcatattaacaacacaagatatttttgaggatgatatatttgctacggaagcaattaaaccctctcagaaaaccagagagaaggagaaaacattggaatctaatttatttgatgataacattgatatctttgctgacttaactgtaaaaccaaaagaaaagtccaaaaagaaagtggaagccaagtctatatttgatgatgatatggatgacatcttctccactggtatccaggctaagacaaccaaaccaaaaagccgatctgcacaggccgcacctgaaccaagatttgaacacaaggtgtccaacatctttgatgatcccctgaatgcctttggaggccagtagagcacacagggtatccacatgttaccctgcagctacattgttgagttagtgatgatattgtatatgctcatggtcttaactggattacaaaaagcaaatactagaacagctagctcatcttttacccaatgtacttagtatttttctgcactggtttaatcatgcttaatactacaaaacaaaaataaatatttcacagtggttggtttgttttgtttttaaaccacagtttgatttagttagccttgctggggccataatatgcttcagggtgtgtaaaagaagaaatctctttgtggctttcatgggcagggaatctcagagatagcaaatgccacctgaccagaagtctttgttatatggatgggaaccctaacttagggcttgggcaggggaaagagaaagaagatgagagattatacttcatgagtcttagcaatatgggagcaggttttcactgaattctgagggtgcctctgcatgtcctccaaggcaaagtttggcaaactgtggcccccccactgtcatattttgttaataaaattttattggaacacaatcaca

SEQ ID NO: 6753 - protein, 1098 aa, Homo sapiens; identical to SEQ ID NO: 6617

SEQ ID NO: 6754 - DNA, 424 bp, Homo sapiens
ggaggagcctaaaggctgacagtatctcttctttagcttaataactagtagttctaatttggtattttatactcttagcacaccacacaaatgagtgatgaggaagaggatgatgatggctgtgacctttttgctgactctgagaaggaggaggaagatattgaggacattgaagaaaatactagacctaaaagaagcagacctacatcgtttgcagatgagctggctgcccgcatcaagggggatgccatgggtcgagtggacgaggagccgacaagtgagccccagccacgttgatggggagtaggggaggagtagtgcagggccctctgctggcttcaccaaaggcggatttctctttttattagtaattactacatatatttattagtaattgctacatataatttaaattgtagcgctt

SEQ ID NO: 6755 - protein, 69 aa, Homo sapiens
MRKRMMMAVTFLLTLRRRRKILRTLKKILDLKEADLHRLQMSWLPASRGMPWVEWTRSRQVSPSHVDGE

SEQ ID NO: 6756 - DNA, 3779 bp, Homo sapiens
tttacagcaatcatttcttgtcttcctagaattcttagaagtatagaaacttaggaatctcaagcatttgttttcaataaaggatacaccaggccttttcctgcaaacagccatgtcgattacattagacttgtccctgtgtcagtttgcagatccctttgtttattctgcccttccttcccccagattggttggggaatgggtcttgaatgtggcgtctgacccgaatgcttgcttcagagtaaatctagatccagggtgctggcctagagaatgaatgctgtgtgccacagacgtggacagacttgagagtggaggcccagagagtcttttgagggtgtcagtggactgtgccaggggtttagtgtgaaattcatcagactgcctcacactttgttaaatagtgtcagataaactccatgccagtttggagacacagcagatgccaacccgggaatttgagttctggacccatctttaatactccctgcaaaacattgctttctgtttgctagatgaagaggataacttattcgcaccccccaagctgaccgacgaggacttctcgccatttggctctggaggtggcctgttcagtggcggcaaggggctatttgatgatgaggacgaggagagtgacctcttcacggaagcctcccaggatcggcaagctggagcctctgttaaggaggagtcttcatcatccaaacctggaaagaaaatcccagcaggagctgtttctgtatttttaggagacacggatgtgtttggtgctgcctccgttccatcactgaaggagccacagaagcctgagcagcccactccaaggaaaagcccctatggtccccctcccactggcctctttgatgatgatgatggtgatgatgatgacgactttttctcggcaccccacagcaaaccttctaaaacacgcaaagtccaatccactgccgatatctttggtgacgaagaaggagatctgttcaaagaaaaagccgtagcatcgccagaagccactgtgagtcagacagatgaaaataaagcaagagcagaaaaaaaggttaccttatcttacagcaaaaatctcaagccctcatcagaaacaaagactcaaaaaggcttattttcagatgaggaggactctgaggatttgttttcttctcaaagtgcgagtaacttaaaaggtgcatctctgctgcctggcaagctccccacgtcggtttccctgtttgatgatgaagatgaagaggataatctttttgggggtacagctgctaagaagcagacattgtctctacaagctcagagagaagagaaagcaaaagcctccgagctctccaaaaagaaagcatctgccctgttgttcagcagtgatgaggagccaaaagaagacccagagagtgtcactcctctttgaagacgatgttgatagcggaggctctctgtttggctctcctcccacatctgttcctcctgcaacaaaggaaggacttttgactagatctgctcaggaaacagtcaagcattctgatttattttcttcatcatccccatgggacaaaggaaccaagcctagaaccaaaactgttcttagcttgtttgatgaggaagaggataaaatggaagatcaaaacattatccaggctccacagaaagaagtaggaaagggctgcgatcctgatgcccaccccaagagcacaggtgtcttccaggatgaagagctgcttttcagccacaagctccaaaaggacaatgacccagatgttgacctttttgctggcaccaaaaaaaccaagctgttagagccaagtgttgggagcctgtttggggatgatgaagatgatgatcttttcagctctgccaagtcccagcctttggtacaagagaaaaagagagtagtgaaaaaagaccactctgttaactctttcaaaaaccagaaacatcctgaatccattcaaggtagtaaagaaaaaggcatatggaagccggaaacacctcaggactcatcaggtctcgctccatttaaaaccaaagaaccatccactcggatcgggaagatacaagcaaatttagcgatcaacccagcggccttgctgcccacagcggcttcccagatctctgaagtaaagcctgttttgccagaattggcttttccttcatctgaacacagaaggagccacggtctggaaagtgtgcctgtccttcccgggagtggggaggccggtgtgagttttgatcttccagctcaggcagacaccttacacagtgcaaacaagagccgtgtcaagatgagagggaagcgtagaccgcagacccgtgcagctaggcggctggctgctcaggagtccagcgaggctgaggacatgagcgtccccagaggacccattgcacagtgggctgatggcgccatttccccaaatggccatcggccacagctcagagcagccagtggagaagacagcactgaggaggccctggcagctgccgctgcaccttgggaaggtggtcctgtgcctggagtggacacaagcccctttgcaaagtctctgggtcattccagaggggaggctgacctttttgattctggggacattttttccacgggcactggatctcagtccgtggagagaacaaaacccaaggcaaagatagcagagaatcctgccaacccaccagtgggtggtaaagcaaagagccccatgtttcctgctctaggcgaggccagcagtgatgatgatctctttcagtctgctaaaccaaaaccagcaaagaaaacaaatccctttcctctcctggaagatgaggatgacctctttacagatcagaaagtcaagaagaatgagacaaaatccagtagtcagcaggatgtcatattaacaacacaagatatttttgaggatgatatatttgctacggaagcaattaaaccctctcagaaaaccagagagaaggagaaaacattggaatctaatttatttgatgataacattgatatctttgctgacttaactgtaaaaccaaaagaaaagtccaaaaagaaagtggaagccaagtctatatttgatgatgatatggatgacatcttctccactggtatccaggctaagacaaccaaaccaaaaagccgatctgcacaggccgcacctgaaccaagatttgaacacaaggtgtccaacatctttgatgatcccctgaatgcctttggaggccagtagagcacacagggtatccacatgttaccctgcagctacattgttgagttagtgatgatattgtatatgctcatggtcttaactggattacaaaaagcaaatactagaacagctagctcatcttttacccaatgtacttagtatttttctgcactggtttaatcatgcttaatactacaaaacaaaaataaatatttcacagtggttggtttgttttgtttttaaaccacagtttgatttagttagccttgctggggccataatatgcttcagggtgtgtaaaagaagaaatctctttgtggctttcatgggcagggaatctcagagatagcaaatgccacctgaccagaagtctttgttatatggatgggaaccctaacttagggcttgggcaggggaaagagaaagaagatgagagattatacttcatgagtcttagcaatatgggagcaggttttcactgaattctgagggtgcctctgcatgtcctccaaggcaaagtttggcaaactgtggcccccccactgtcatattttgttaataaaattttattggaacacaatcaca

SEQ ID NO: 6757 - protein, 660 aa, Homo sapiens; identical to SEQ ID NO: 6621

SEQ ID NO: 6758 - DNA, 4130 bp, Homo sapiens
tttacagcaatcatttcttgtcttcctagaattcttagaagtatagaaacttaggaatctcaagcatttgttttcaataaaggatacaccaggccttttcctgcaaacagccatgtcgattacattagacttgtccctgtgtcagtttgcagatccctttgtttattctgcccttccttcccccagattggttggggaatgggtcttgaatgtggcgtctgacccgaatgcttgcttcagagtaaatctagatccagggtgctggcctagagaatgaatgctgtgtgccacagacgtggacagacttgagagtggaggcccagagagtcttttgagggtgtcagtggactgtgccaggggtttagtgtgaaattcatcagactgcctcacactttgttaaatagtgtcagataaactccatgccagtttggagacacagcagatgccaacccgggaatttgagttctggacccatctttaatactccctgcaaaacattgctttctgtttgctagatgaagaggataacttattcgcaccccccaagctgaccgacgaggacttctcgccatttggctctggaggtggcctgttcagtggcggcaaggggctatttgatgatgaggacgaggagagtgacctcttcacggaagcctcccaggatcggcaagctggagcctctgttaaggaggagtcttcatcatccaaacctggaaagaaaatcccagcaggagctgtttctgtatttttaggagacacggatgtgtttggtgctgcctccgttccatcactgaaggagccacagaagcctgagcagcccactccaaggaaaagcccctatggtccccctcccactggcctctttgatgatgatgatggtgatgatgatgacgactttttctcggcaccccacagcaaaccttctaaaacacgcaaagtccaatccactgccgatatctttggtgacgaagaaggagatctgttcaaagaaaaagccgtagcatcgccagaagccactgtgagtcagacagatgaaaataaagcaagagcagaaaaaaaggatttgttttcttctcaaagtgcgagtaacttaaaaggtgcatctctgctgcctggcaagctccccacgtcggtttccctgtttgatgatgaagatgaagaggataatctttttgggggtacagctgctaagaagcagacattgtctctacaagctcagagagaagagaaagcaaaagcctccgagctctccaaaaagaaagcatctgccctgttgttcagcagtgatgaggaggaccagtggaatattcctgcttcacagacccacttagcatctgacagcaggtctaaaggagaacccagggattctgggaccctccagagccaggaggccaaggctgtgaaaaagaccagtctctttgaggaagacaaagaagatgatctttttgccattgccaaggacagatacatcctacctcctattgttcccgaagttgtctgtcaagttttgtgtatggaaagtaattcataccttcatcagatctcaaaagaagctttacacacacaagaagaagttgagccaaaagaagacccagagagtgtcactcctctttgaagacgatgttgatagcggaggctctctgtttggctctcctcccacatctgttcctcctgcaacaaagaaaaaagagactgtctctgaggcaccacctttgctgttcagcgatgaagaagagaaggaggcacaacttggagtgaagtctgtggataagaaggttgagagtgccaaggagtcattaaaatttgggagaactgatgtggctgagtcagaaaaggaaggacttttgactagatctgctcaggaaacagtcaagcattctgatttattttcttcatcatccccatgggacaaaggaaccaagcctagaaccaaaactgttcttagcttgtttgatgaggaagaggataaaatggaagatcaaaacattatccaggctccacagaaagaagtaggaaagggctgcgatcctgatgcccaccccaagagcacaggtgtcttccaggatgaagagctgcttttcagccacaagctccaaaaggacaatgacccagatgttgacctttttgctggcaccaaaaaaaccaagctgttagagccaagtgttgggagcctgtttggggatgatgaagatgatgatcttttcagctctgccaagtcccagcctttggtacaagagaaaaagagagtagtgaaaaaagaccactctgttaactctttcaaaaaccagaaacatcctgaatccattcaaggtagtaaagaaaaaggcatatggaagccggaaacacctcaggactcatcaggtctcgctccatttaaaaccaaagaaccatccactcggatcgggaagatacaagcaaatttagcgatcaacccagcggccttgctgcccacagcggcttcccagatctctgaagtaaagcctgttttgccagaattggcttttccttcatctgaacacagaaggagccacggtctggaaagtgtgcctgtccttcccgggagtggggaggccggtgtgagttttgatcttccagctcaggcagacaccttacacagtgcaaacaagagccgtgtcaagatgagagggaagcgtagaccgcagacccgtgcagctaggcggctggctgctcaggagtccagcgaggctgaggacatgagcgtccccagaggacccattgcacagtgggctgatggcgccatttccccaaatggccatcggccacagctcagagcagccagtggagaagacagcactgaggaggccctggcagctgccgctgcaccttgggaaggtggtcctgtgcctggagtggacacaagcccctttgcaaagtctctgggtcattccagaggggaggctgacctttttgattctggggacattttttccacgggcactggatctcagtccgtggagagaacaaaacccaaggcaaagatagcagagaatcctgccaacccaccagtgggtggtaaagcaaagagccccatgtttcctgctctaggcgaggccagcagtgatgatgatctctttcagtctgctaaaccaaaaccagcaaagaaaacaaatccctttcctctcctggaagatgaggatgacctctttacagatcagaaagtcaagaagaatgagacaaaatccagtagtcagcaggatgtcatattaacaacacaagatatttttgaggatgatatatttgctacggaagcaattaaaccctctcagaaaaccagagagaaggagaaaacattggaatctaatttatttgatgataacattgatatctttgctgacttaactgtaaaaccaaaagaaaagtccaaaaagaaagtggaagccaagtctatatttgatgatgatatggatgacatcttctccactggtatccaggctaagacaaccaaaccaaaaagccgatctgcacaggccgcacctgaaccaagatttgaacacaaggtgtccaacatctttgatgatcccctgaatgcctttggaggccagtagagcacacagggtatccacatgttaccctgcagctacattgttgagttagtgatgatattgtatatgctcatggtcttaactggattacaaaaagcaaatactagaacagctagctcatcttttacccaatgtacttagtatttttctgcactggtttaatcatgcttaatactacaaaacaaaaataaatatttcacagtggttggtttgttttgtttttaaaccacagtttgatttagttagccttgctggggccataatatgcttcagggtgtgtaaaagaagaaatctctttgtggctttcatgggcagggaatctcagagatagcaaatgccacctgaccagaagtctttgttatatggatgggaaccctaacttagggcttgggcaggggaaagagaaagaagatgagagattatacttcatgagtcttagcaatatgggagcaggttttcactgaattctgagggtgcctctgcatgtcctccaaggcaaagtttggcaaactgtggcccccccactgtcatattttgttaataaaattttattggaacacaatcaca

SEQ ID NO: 6759 - protein, 709 aa, Homo sapiens; identical to SEQ ID NO: 6611

SEQ ID NO: 6760 - DNA, 4015 bp, Homo sapiens
tttacagcaatcatttcttgtcttcctagaattcttagaagtatagaaacttaggaatctcaagcatttgttttcaataaaggatacaccaggccttttcctgcaaacagccatgtcgattacattagacttgtccctgtgtcagtttgcagatccctttgtttattctgcccttccttcccccagattggttggggaatgggtcttgaatgtggcgtctgacccgaatgcttgcttcagagtaaatctagatccagggtgctggcctagagaatgaatgctgtgtgccacagacgtggacagacttgagagtggaggcccagagagtcttttgagggtgtcagtggactgtgccaggggtttagtgtgaaattcatcagactgcctcacactttgttaaatagtgtcagataaactccatgccagtttggagacacagcagatgccaacccgggaatttgagttctggacccatctttaatactccctgcaaaacattgctttctgtttgctagatgaagaggataacttattcgcaccccccaagctgaccgacgaggacttctcgccatttggctctggaggtggcctgttcagtggcggcaaggggctatttgatgatgaggacgaggagagtgacctcttcacggaagcctcccaggatcggcaagctggagcctctgttaaggaggagtcttcatcatccaaacctggaaagaaaatcccagcaggagctgtttctgtatttttaggagacacggatgtgtttggtgctgcctccgttccatcactgaaggagccacagaagcctgagcagcccactccaaggaaaagcccctatggtccccctcccactggcctctttgatgatgatgatggtgatgatgatgacgactttttctcggcaccccacagcaaaccttctaaaacacgcaaagtccaatccactgccgatatctttggtgacgaagaaggagatctgttcaaagaaaaagccgtagcatcgccagaagccactgtgagtcagacagatgaaaataaagcaagagcagaaaaaaaggatttgttttcttctcaaagtgcgagtaacttaaaaggtgcatctctgctgcctggcaagctccccacgtcggtttccctgtttgatgatgaagatgaagaggataatctttttgggggtacagctgctaagaagcagacattgtctctacaagctcagagagaagagaaagcaaaagcctccgagctctccaaaaagaaagcatctgccctgttgttcagcagtgatgaggaggaccagtggaatattcctgcttcacagacccacttagcatctgacagcaggtctaaaggagaacccagggattctgggaccctccagagccaggaggccaaggctgtgaaaaagaccagtctctttgaggaagacaaagaagatgatctttttgccattgccaaggacagccaaaagaagacccagagagtgtcactcctctttgaagacgatgttgatagcggaggctctctgtttggctctcctcccacatctgttcctcctgcaacaaagaaaaaagagactgtctctgaggcaccacctttgctgttcagcgatgaagaagagaaggaggcacaacttggagtgaagtctgtggataagaaggttgagagtgccaaggagtcattaaaatttgggagaactgatgtggctgagtcagaaaaggaaggacttttgactagatctgctcaggaaacagtcaagcattctgatttattttcttcatcatccccatgggacaaaggaaccaagcctagaaccaaaactgttcttagcttgtttgatgaggaagaggataaaatggaagatcaaaacattatccaggctccacagaaagaagtaggaaagggctgcgatcctgatgcccaccccaagagcacaggtgtcttccaggatgaagagctgcttttcagccacaagctccaaaaggacaatgacccagatgttgacctttttgctggcaccaaaaaaaccaagctgttagagccaagtgttgggagcctgtttggggatgatgaagatgatgatcttttcagctctgccaagtcccagcctttggtacaagagaaaaagagagtagtgaaaaaagaccactctgttaactctttcaaaaaccagaaacatcctgaatccattcaaggtagtaaagaaaaaggcatatggaagccggaaacacctcaggactcatcaggtctcgctccatttaaaaccaaagaaccatccactcggatcgggaagatacaagcaaatttagcgatcaacccagcggccttgctgcccacagcggcttcccagatctctgaagtaaagcctgttttgccagaattggcttttccttcatctgaacacagaaggagccacggtctggaaagtgtgcctgtccttcccgggagtggggaggccggtgtgagttttgatcttccagctcaggcagacaccttacacagtgcaaacaagagccgtgtcaagatgagagggaagcgtagaccgcagacccgtgcagctaggcggctggctgctcaggagtccagcgaggctgaggacatgagcgtccccagaggacccattgcacagtgggctgatggcgccatttccccaaatggccatcggccacagctcagagcagccagtggagaagacagcactgaggaggccctggcagctgccgctgcaccttgggaaggtggtcctgtgcctggagtggacacaagcccctttgcaaagtctctgggtcattccagaggggaggctgacctttttgattctggggacattttttccacgggcactggatctcagtccgtggagagaacaaaacccaaggcaaagatagcagagaatcctgccaacccaccagtgggtggtaaagcaaagagccccatgtttcctgctctaggcgaggccagcagtgatgatgatctctttcagtctgctaaaccaaaaccagcaaagaaaacaaatccctttcctctcctggaagatgaggatgacctctttacagatcagaaagtcaagaagaatgagacaaaatccagtagtcagcaggatgtcatattaacaacacaagatatttttgaggatgatatatttgctacggaagcaattaaaccctctcagaaaaccagagagaaggagaaaacattggaatctaatttatttgatgataacattgatatctttgctgacttaactgtaaaaccaaaagaaaagtccaaaaagaaagtggaagccaagtctatatttgatgatgatatggatgacatcttctccactggtatccaggctaagacaaccaaaccaaaaagccgatctgcacaggccgcacctgaaccaagatttgaacacaaggtgtccaacatctttgatgatcccctgaatgcctttggaggccagtagagcacacagggtatccacatgttaccctgcagctacattgttgagttagtgatgatattgtatatgctcatggtcttaactggattacaaaaagcaaatactagaacagctagctcatcttttacccaatgtacttagtatttttctgcactggtttaatcatgcttaatactacaaaacaaaaataaatatttcacagtggttggtttgttttgtttttaaaccacagtttgatttagttagccttgctggggccataatatgcttcagggtgtgtaaaagaagaaatctctttgtggctttcatgggcagggaatctcagagatagcaaatgccacctgaccagaagtctttgttatatggatgggaaccctaacttagggcttgggcaggggaaagagaaagaagatgagagattatacttcatgagtcttagcaatatgggagcaggttttcactgaattctgagggtgcctctgcatgtcctccaaggcaaagtttggcaaactgtggcccccccactgtcatattttgttaataaaattttattggaacacaatcaca

SEQ ID NO: 6761 - protein, 531 aa, Homo sapiens
MEDQNIIQAPQKEVGKGCDPDAHPKSTGVFQDEELLFSHKLQKDNDPDVDLFAGTKKTKLLEPSVGSLFGDDEDDDLFSSAKSQPLVQEKKRVVKKDHSVNSFKNQKHPESIQGSKEKGIWKPETPQDSSGLAPFKTKEPSTRIGKIQANLAINPAALLPTAASQISEVKPVLPELAFPSSEHRRSHGLESVPVLPGSGEAGVSFDLPAQADTLHSANKSRVKMRGKRRPQTRAARRLAAQESSEAEDMSVPRGPIAQWADGAISPNGHRPQLRAASGEDSTEEALAAAAAPWEGGPVPGVDTSPFAKSLGHSRGEADLFDSGDIFSTGTGSQSVERTKPKAKIAENPANPPVGGKAKSPMFPALGEASSDDDLFQSAKPKPAKKTNPFPLLEDEDDLFTDQKVKKNETKSSSQQDVILTTQDIFEDDIFATEAIKPSQKTREKEKTLESNLFDDNIDIFADLTVKPKEKSKKKVEAKSIFDDDMDDIFSTGIQAKTTKPKSRSAQAAPEPRFEHKVSNIFDDPLNAFGGQ

SEQ ID NO: 6762 - DNA, 4154 bp, Homo sapiens
tttacagcaatcatttcttgtcttcctagaattcttagaagtatagaaacttaggaatctcaagcatttgttttcaataaaggatacaccaggccttttcctgcaaacagccatgtcgattacattagacttgtccctgtgtcagtttgcagatccctttgtttattctgcccttccttcccccagattggttggggaatgggtcttgaatgtggcgtctgacccgaatgcttgcttcagagtaaatctagatccagggtgctggcctagagaatgaatgctgtgtgccacagacgtggacagacttgagagtggaggcccagagagtcttttgagggtgtcagtggactgtgccaggggtttagtgtgaaattcatcagactgcctcacactttgttaaatagtgtcagataaactccatgccagtttggagacacagcagatgccaacccgggaatttgagttctggacccatctttaatactccctgcaaaacattgctttctgtttgctagatgaagaggataacttattcgcaccccccaagctgaccgacgaggacttctcgccatttggctctggaggtggcctgttcagtggcggcaaggggctatttgatgatgaggacgaggagagtgacctcttcacggaagcctcccaggatcggcaagctggagcctctgttaaggaggagtcttcatcatccaaacctggaaagaaaatcccagcaggagctgtttctgtatttttaggagacacggatgtgtttggtgctgcctccgttccatcactgaaggagccacagaagcctgagcagcccactccaaggaaaagcccctatggtccccctcccactggcctctttgatgatgatgatggtgatgatgatgacgactttttctcggcaccccacagcaaaccttctaaaacacgcaaagtccaatccactgccgatatctttggtgacgaagaaggagatctgttcaaagaaaaagccgtagcatcgccagaagccactgtgagtcagacagatgaaaataaagcaagagcagaaaaaaaggttaccttatcttacagcaaaaatctcaagccctcatcagaaacaaagactcaaaaaggcttattttcagatgaggaggactctgaggatttgttttcttctcaaagtgcgagtaacttaaaaggtgcatctctgctgcctggcaagctccccacgtcggtttccctgtttgatgatgaagatgaagaggataatctttttgggggtacagctgctaagaagcagacattgtctctacaagctcagagagaagagaaagcaaaagcctccgagctctccaaaaagaaagcatctgccctgttgttcagcagtgatgaggaggaccagtggaatattcctgcttcacagacccacttagcatctgacagcaggtctaaaggagaacccagggattctgggaccctccagagccaggaggccaaggctgtgaaaaagaccagtctctttgaggaagacaaagaagatgatctttttgccattgccaaggacagatacatcctacctcctattgttcccgaagttgtctgtcaagttttgtgtatggaaagtaattcataccttcatcagatctcaaaagaagctttacacacacaagaagaagttgagccaaaagaagacccagagagtgtcactcctctttgaagacgatgttgatagcggaggctctctgtttggctctcctcccacatctgttcctcctgcaacaaagaaaaaagagactgtctctgaggcaccacctttgctgttcagcgatgaagaagagaaggaggcacaacttggagtgaagtctgtggataagaaggttgagagtgccaaggagtcattaaaatttgggagaactgatgtggctgagtcagaaaaggaaggacttttgactagatctgctcaggaaacagtcaagcattctgatttattttcttcatcatccccatgggacaaaggaaccaagcctagaaccaaaactgttcttagcttgtttgatgaggaagaggataaaatggaagatcaaaacattatccaggctccacagaaagaagtaggaaagggctgcgatcctgatgcccaccccaagagcacaggtgtcttccaggatgaagagctgcttttcagccacaagctccaaaaggacaatgacccagatgttgacctttttgctggcaccaaaaaaaccaagctgttagagccaagtgttgggagcctgtttggggatgatgaagatgatgatcttttcagctctgccaagtcccagcctttggtacaagagaaaaagagagtagtgaaaaaagaccactctgttaactctttcaaaaaccagaaacatcctgaatccattcaaggtagtaaagaaaaaggcatatggaagccggaaacacctcaggcaaatttagcgatcaacccagcggccttgctgcccacagcggcttcccagatctctgaagtaaagcctgttttgccagaattggcttttccttcatctgaacacagaaggagccacggtctggaaagtgtgcctgtccttcccgggagtggggaggccggtgtgagttttgatcttccagctcaggcagacaccttacacagtgcaaacaagagccgtgtcaagatgagagggaagcgtagaccgcagacccgtgcagctaggcggctggctgctcaggagtccagcgaggctgaggacatgagcgtccccagaggacccattgcacagtgggctgatggcgccatttccccaaatggccatcggccacagctcagagcagccagtggagaagacagcactgaggaggccctggcagctgccgctgcaccttgggaaggtggtcctgtgcctggagtggacacaagcccctttgcaaagtctctgggtcattccagaggggaggctgacctttttgattctggggacattttttccacgggcactggatctcagtccgtggagagaacaaaacccaaggcaaagatagcagagaatcctgccaacccaccagtgggtggtaaagcaaagagccccatgtttcctgctctaggcgaggccagcagtgatgatgatctctttcagtctgctaaaccaaaaccagcaaagaaaacaaatccctttcctctcctggaagatgaggatgacctctttacagatcagaaagtcaagaagaatgagacaaaatccagtagtcagcaggatgtcatattaacaacacaagatatttttgaggatgatatatttgctacggaagcaattaaaccctctcagaaaaccagagagaaggagaaaacattggaatctaatttatttgatgataacattgatatctttgctgacttaactgtaaaaccaaaagaaaagtccaaaaagaaagtggaagccaagtctatatttgatgatgatatggatgacatcttctccactggtatccaggctaagacaaccaaaccaaaaagccgatctgcacaggccgcacctgaaccaagatttgaacacaaggtgtccaacatctttgatgatcccctgaatgcctttggaggccagtagagcacacagggtatccacatgttaccctgcagctacattgttgagttagtgatgatattgtatatgctcatggtcttaactggattacaaaaagcaaatactagaacagctagctcatcttttacccaatgtacttagtatttttctgcactggtttaatcatgcttaatactacaaaacaaaaataaatatttcacagtggttggtttgttttgtttttaaaccacagtttgatttagttagccttgctggggccataatatgcttcagggtgtgtaaaagaagaaatctctttgtggctttcatgggcagggaatctcagagatagcaaatgccacctgaccagaagtctttgttatatggatgggaaccctaacttagggcttgggcaggggaaagagaaagaagatgagagattatacttcatgagtcttagcaatatgggagcaggttttcactgaattctgagggtgcctctgcatgtcctccaaggcaaagtttggcaaactgtggcccccccactgtcatattttgttaataaaattttattggaacacaatcaca

SEQ ID NO: 6763 - protein, 688 aa, Homo sapiens; identical to SEQ ID NO: 6613

SEQ ID NO: 6764 - DNA, 4039 bp, Homo sapiens
tttacagcaatcatttcttgtcttcctagaattcttagaagtatagaaacttaggaatctcaagcatttgttttcaataaaggatacaccaggccttttcctgcaaacagccatgtcgattacattagacttgtccctgtgtcagtttgcagatccctttgtttattctgcccttccttcccccagattggttggggaatgggtcttgaatgtggcgtctgacccgaatgcttgcttcagagtaaatctagatccagggtgctggcctagagaatgaatgctgtgtgccacagacgtggacagacttgagagtggaggcccagagagtcttttgagggtgtcagtggactgtgccaggggtttagtgtgaaattcatcagactgcctcacactttgttaaatagtgtcagataaactccatgccagtttggagacacagcagatgccaacccgggaatttgagttctggacccatctttaatactccctgcaaaacattgctttctgtttgctagatgaagaggataacttattcgcaccccccaagctgaccgacgaggacttctcgccatttggctctggaggtggcctgttcagtggcggcaaggggctatttgatgatgaggacgaggagagtgacctcttcacggaagcctcccaggatcggcaagctggagcctctgttaaggaggagtcttcatcatccaaacctggaaagaaaatcccagcaggagctgtttctgtatttttaggagacacggatgtgtttggtgctgcctccgttccatcactgaaggagccacagaagcctgagcagcccactccaaggaaaagcccctatggtccccctcccactggcctctttgatgatgatgatggtgatgatgatgacgactttttctcggcaccccacagcaaaccttctaaaacacgcaaagtccaatccactgccgatatctttggtgacgaagaaggagatctgttcaaagaaaaagccgtagcatcgccagaagccactgtgagtcagacagatgaaaataaagcaagagcagaaaaaaaggttaccttatcttacagcaaaaatctcaagccctcatcagaaacaaagactcaaaaaggcttattttcagatgaggaggactctgaggatttgttttcttctcaaagtgcgagtaacttaaaaggtgcatctctgctgcctggcaagctccccacgtcggtttccctgtttgatgatgaagatgaagaggataatctttttgggggtacagctgctaagaagcagacattgtctctacaagctcagagagaagagaaagcaaaagcctccgagctctccaaaaagaaagcatctgccctgttgttcagcagtgatgaggaggaccagtggaatattcctgcttcacagacccacttagcatctgacagcaggtctaaaggagaacccagggattctgggaccctccagagccaggaggccaaggctgtgaaaaagaccagtctctttgaggaagacaaagaagatgatctttttgccattgccaaggacagccaaaagaagacccagagagtgtcactcctctttgaagacgatgttgatagcggaggctctctgtttggctctcctcccacatctgttcctcctgcaacaaagaaaaaagagactgtctctgaggcaccacctttgctgttcagcgatgaagaagagaaggaggcacaacttggagtgaagtctgtggataagaaggttgagagtgccaaggagtcattaaaatttgggagaactgatgtggctgagtcagaaaaggaaggacttttgactagatctgctcaggaaacagtcaagcattctgatttattttcttcatcatccccatgggacaaaggaaccaagcctagaaccaaaactgttcttagcttgtttgatgaggaagaggataaaatggaagatcaaaacattatccaggctccacagaaagaagtaggaaagggctgcgatcctgatgcccaccccaagagcacaggtgtcttccaggatgaagagctgcttttcagccacaagctccaaaaggacaatgacccagatgttgacctttttgctggcaccaaaaaaaccaagctgttagagccaagtgttgggagcctgtttggggatgatgaagatgatgatcttttcagctctgccaagtcccagcctttggtacaagagaaaaagagagtagtgaaaaaagaccactctgttaactctttcaaaaaccagaaacatcctgaatccattcaaggtagtaaagaaaaaggcatatggaagccggaaacacctcaggcaaatttagcgatcaacccagcggccttgctgcccacagcggcttcccagatctctgaagtaaagcctgttttgccagaattggcttttccttcatctgaacacagaaggagccacggtctggaaagtgtgcctgtccttcccgggagtggggaggccggtgtgagttttgatcttccagctcaggcagacaccttacacagtgcaaacaagagccgtgtcaagatgagagggaagcgtagaccgcagacccgtgcagctaggcggctggctgctcaggagtccagcgaggctgaggacatgagcgtccccagaggacccattgcacagtgggctgatggcgccatttccccaaatggccatcggccacagctcagagcagccagtggagaagacagcactgaggaggccctggcagctgccgctgcaccttgggaaggtggtcctgtgcctggagtggacacaagcccctttgcaaagtctctgggtcattccagaggggaggctgacctttttgattctggggacattttttccacgggcactggatctcagtccgtggagagaacaaaacccaaggcaaagatagcagagaatcctgccaacccaccagtgggtggtaaagcaaagagccccatgtttcctgctctaggcgaggccagcagtgatgatgatctctttcagtctgctaaaccaaaaccagcaaagaaaacaaatccctttcctctcctggaagatgaggatgacctctttacagatcagaaagtcaagaagaatgagacaaaatccagtagtcagcaggatgtcatattaacaacacaagatatttttgaggatgatatatttgctacggaagcaattaaaccctctcagaaaaccagagagaaggagaaaacattggaatctaatttatttgatgataacattgatatctttgctgacttaactgtaaaaccaaaagaaaagtccaaaaagaaagtggaagccaagtctatatttgatgatgatatggatgacatcttctccactggtatccaggctaagacaaccaaaccaaaaagccgatctgcacaggccgcacctgaaccaagatttgaacacaaggtgtccaacatctttgatgatcccctgaatgcctttggaggccagtagagcacacagggtatccacatgttaccctgcagctacattgttgagttagtgatgatattgtatatgctcatggtcttaactggattacaaaaagcaaatactagaacagctagctcatcttttacccaatgtacttagtatttttctgcactggtttaatcatgcttaatactacaaaacaaaaataaatatttcacagtggttggtttgttttgtttttaaaccacagtttgatttagttagccttgctggggccataatatgcttcagggtgtgtaaaagaagaaatctctttgtggctttcatgggcagggaatctcagagatagcaaatgccacctgaccagaagtctttgttatatggatgggaaccctaacttagggcttgggcaggggaaagagaaagaagatgagagattatacttcatgagtcttagcaatatgggagcaggttttcactgaattctgagggtgcctctgcatgtcctccaaggcaaagtttggcaaactgtggcccccccactgtcatattttgttaataaaattttattggaacacaatcaca

SEQ ID NO: 6765 - protein, 510 aa, Homo sapiens
MEDQNIIQAPQKEVGKGCDPDAHPKSTGVFQDEELLFSHKLQKDNDPDVDLFAGTKKTKLLEPSVGSLFGDDEDDDLFSSAKSQPLVQEKKRVVKKDHSVNSFKNQKHPESIQGSKEKGIWKPETPQANLAINPAALLPTAASQISEVKPVLPELAFPSSEHRRSHGLESVPVLPGSGEAGVSFDLPAQADTLHSANKSRVKMRGKRRPQTRAARRLAAQESSEAEDMSVPRGPIAQWADGAISPNGHRPQLRAASGEDSTEEALAAAAAPWEGGPVPGVDTSPFAKSLGHSRGEADLFDSGDIFSTGTGSQSVERTKPKAKIAENPANPPVGGKAKSPMFPALGEASSDDDLFQSAKPKPAKKTNPFPLLEDEDDLFTDQKVKKNETKSSSQQDVILTTQDIFEDDIFATEAIKPSQKTREKEKTLESNLFDDNIDIFADLTVKPKEKSKKKVEAKSIFDDDMDDIFSTGIQAKTTKPKSRSAQAAPEPRFEHKVSNIFDDPLNAFGGQ

SEQ ID NO: 6766 - DNA, 4102 bp, Homo sapiens
tttacagcaatcatttcttgtcttcctagaattcttagaagtatagaaacttaggaatctcaagcatttgttttcaataaaggatacaccaggccttttcctgcaaacagccatgtcgattacattagacttgtccctgtgtcagtttgcagatccctttgtttattctgcccttccttcccccagattggttggggaatgggtcttgaatgtggcgtctgacccgaatgcttgcttcagagtaaatctagatccagggtgctggcctagagaatgaatgctgtgtgccacagacgtggacagacttgagagtggaggcccagagagtcttttgagggtgtcagtggactgtgccaggggtttagtgtgaaattcatcagactgcctcacactttgttaaatagtgtcagataaactccatgccagtttggagacacagcagatgccaacccgggaatttgagttctggacccatctttaatactccctgcaaaacattgctttctgtttgctagatgaagaggataacttattcgcaccccccaagctgaccgacgaggacttctcgccatttggctctggaggtggcctgttcagtggcggcaaggggctatttgatgatgaggacgaggagagtgacctcttcacggaagcctcccaggatcggcaagctggagcctctgttaaggaggagtcttcatcatccaaacctggaaagaaaatcccagcaggagctgtttctgtatttttaggagacacggatgtgtttggtgctgcctccgttccatcactgaaggagccacagaagcctgagcagcccactccaaggaaaagcccctatggtccccctcccactggcctctttgatgatgatgatggtgatgatgatgacgactttttctcggcaccccacagcaaaccttctaaaacacgcaaagtccaatccactgccgatatctttggtgacgaagaaggagatctgttcaaagaaaaagccgtagcatcgccagaagccactgtgagtcagacagatgaaaataaagcaagagcagaaaaaaaggttaccttatcttacagcaaaaatctcaagccctcatcagaaacaaagactcaaaaaggcttattttcagatgaggaggactctgaggatttgttttcttctcaaagtgcgagtaacttaaaaggtgcatctctgctgcctggcaagctccccacgtcggtttccctgtttgatgatgaagatgaagaggataatctttttgggggtacagctgctaagaagcagacattgtctctacaagctcagagagaagagaaagcaaaagcctccgagctctccaaaaagaaagcatctgccctgttgttcagcagtgatgaggaggaccagtggaatattcctgcttcacagacccacttagcatctgacagcaggtctaaaggagaacccagggattctgggaccctccagagccaggaggccaaggctgtgaaaaagaccagtctctttgaggaagacaaagaagatgatctttttgccattgccaaggacagccaaaagaagacccagagagtgtcactcctctttgaagacgatgttgatagcggaggctctctgtttggctctcctcccacatctgttcctcctgcaacaaagaaaaaagagactgtctctgaggcaccacctttgctgttcagcgatgaagaagagaaggaggcacaacttggagtgaagtctgtggataagaaggttgagagtgccaaggagtcattaaaatttgggagaactgatgtggctgagtcagaaaaggaaggacttttgactagatctgctcaggaaacagtcaagcattctgatttattttcttcatcatccccatgggacaaaggaaccaagcctagaaccaaaactgttcttagcttgtttgatgaggaagaggataaaatggaagatcaaaacattatccaggctccacagaaagaagtaggaaagggctgcgatcctgatgcccaccccaagagcacaggtgtcttccaggatgaagagctgcttttcagccacaagctccaaaaggacaatgacccagatgttgacctttttgctggcaccaaaaaaaccaagctgttagagccaagtgttgggagcctgtttggggatgatgaagatgatgatcttttcagctctgccaagtcccagcctttggtacaagagaaaaagagagtagtgaaaaaagaccactctgttaactctttcaaaaaccagaaacatcctgaatccattcaaggtagtaaagaaaaaggcatatggaagccggaaacacctcaggactcatcaggtctcgctccatttaaaaccaaagaaccatccactcggatcgggaagatacaagcaaatttagcgatcaacccagcggccttgctgcccacagcggcttcccagatctctgaagtaaagcctgttttgccagaattggcttttccttcatctgaacacagaaggagccacggtctggaaagtgtgcctgtccttcccgggagtggggaggccggtgtgagttttgatcttccagctcaggcagacaccttacacagtgcaaacaagagccgtgtcaagatgagagggaagcgtagaccgcagacccgtgcagctaggcggctggctgctcaggagtccagcgaggctgaggacatgagcgtccccagaggacccattgcacagtgggctgatggcgccatttccccaaatggccatcggccacagctcagagcagccagtggagaagacagcactgaggaggccctggcagctgccgctgcaccttgggaaggtggtcctgtgcctggagtggacacaagcccctttgcaaagtctctgggtcattccagaggggaggctgacctttttgattctggggacattttttccacgggcactggatctcagtccgtggagagaacaaaacccaaggcaaagatagcagagaatcctgccaacccaccagtgggtggtaaagcaaagagccccatgtttcctgctctaggcgaggccagcagtgatgatgatctctttcagtctgctaaaccaaaaccagcaaagaaaacaaatccctttcctctcctggaagatgaggatgacctctttacagatcagaaagtcaagaagaatgagacaaaatccagtagtcagcaggatgtcatattaacaacacaagatatttttgaggatgatatatttgctacggaagcaattaaaccctctcagaaaaccagagagaaggagaaaacattggaatctaatttatttgatgataacattgatatctttgctgacttaactgtaaaaccaaaagaaaagtccaaaaagaaagtggaagccaagtctatatttgatgatgatatggatgacatcttctccactggtatccaggctaagacaaccaaaccaaaaagccgatctgcacaggccgcacctgaaccaagatttgaacacaaggtgtccaacatctttgatgatcccctgaatgcctttggaggccagtagagcacacagggtatccacatgttaccctgcagctacattgttgagttagtgatgatattgtatatgctcatggtcttaactggattacaaaaagcaaatactagaacagctagctcatcttttacccaatgtacttagtatttttctgcactggtttaatcatgcttaatactacaaaacaaaaataaatatttcacagtggttggtttgttttgtttttaaaccacagtttgatttagttagccttgctggggccataatatgcttcagggtgtgtaaaagaagaaatctctttgtggctttcatgggcagggaatctcagagatagcaaatgccacctgaccagaagtctttgttatatggatgggaaccctaacttagggcttgggcaggggaaagagaaagaagatgagagattatacttcatgagtcttagcaatatgggagcaggttttcactgaattctgagggtgcctctgcatgtcctccaaggcaaagtttggcaaactgtggcccccccactgtcatattttgttaataaaattttattggaacacaatcaca

SEQ ID NO: 6767 - protein, 531 aa, Homo sapiens; identical to SEQ ID NO: 6761

SEQ ID NO: 6768 - DNA, 4217 bp, Homo sapiens
tttacagcaatcatttcttgtcttcctagaattcttagaagtatagaaacttaggaatctcaagcatttgttttcaataaaggatacaccaggccttttcctgcaaacagccatgtcgattacattagacttgtccctgtgtcagtttgcagatccctttgtttattctgcccttccttcccccagattggttggggaatgggtcttgaatgtggcgtctgacccgaatgcttgcttcagagtaaatctagatccagggtgctggcctagagaatgaatgctgtgtgccacagacgtggacagacttgagagtggaggcccagagagtcttttgagggtgtcagtggactgtgccaggggtttagtgtgaaattcatcagactgcctcacactttgttaaatagtgtcagataaactccatgccagtttggagacacagcagatgccaacccgggaatttgagttctggacccatctttaatactccctgcaaaacattgctttctgtttgctagatgaagaggataacttattcgcaccccccaagctgaccgacgaggacttctcgccatttggctctggaggtggcctgttcagtggcggcaaggggctatttgatgatgaggacgaggagagtgacctcttcacggaagcctcccaggatcggcaagctggagcctctgttaaggaggagtcttcatcatccaaacctggaaagaaaatcccagcaggagctgtttctgtatttttaggagacacggatgtgtttggtgctgcctccgttccatcactgaaggagccacagaagcctgagcagcccactccaaggaaaagcccctatggtccccctcccactggcctctttgatgatgatgatggtgatgatgatgacgactttttctcggcaccccacagcaaaccttctaaaacacgcaaagtccaatccactgccgatatctttggtgacgaagaaggagatctgttcaaagaaaaagccgtagcatcgccagaagccactgtgagtcagacagatgaaaataaagcaagagcagaaaaaaaggttaccttatcttacagcaaaaatctcaagccctcatcagaaacaaagactcaaaaaggcttattttcagatgaggaggactctgaggatttgttttcttctcaaagtgcgagtaacttaaaaggtgcatctctgctgcctggcaagctccccacgtcggtttccctgtttgatgatgaagatgaagaggataatctttttgggggtacagctgctaagaagcagacattgtctctacaagctcagagagaagagaaagcaaaagcctccgagctctccaaaaagaaagcatctgccctgttgttcagcagtgatgaggaggaccagtggaatattcctgcttcacagacccacttagcatctgacagcaggtctaaaggagaacccagggattctgggaccctccagagccaggaggccaaggctgtgaaaaagaccagtctctttgaggaagacaaagaagatgatctttttgccattgccaaggacagatacatcctacctcctattgttcccgaagttgtctgtcaagttttgtgtatggaaagtaattcataccttcatcagatctcaaaagaagctttacacacacaagaagaagttgagccaaaagaagacccagagagtgtcactcctctttgaagacgatgttgatagcggaggctctctgtttggctctcctcccacatctgttcctcctgcaacaaagaaaaaagagactgtctctgaggcaccacctttgctgttcagcgatgaagaagagaaggaggcacaacttggagtgaagtctgtggataagaaggttgagagtgccaaggagtcattaaaatttgggagaactgatgtggctgagtcagaaaaggaaggacttttgactagatctgctcaggaaacagtcaagcattctgatttattttcttcatcatccccatgggacaaaggaaccaagcctagaaccaaaactgttcttagcttgtttgatgaggaagaggataaaatggaagatcaaaacattatccaggctccacagaaagaagtaggaaagggctgcgatcctgatgcccaccccaagagcacaggtgtcttccaggatgaagagctgcttttcagccacaagctccaaaaggacaatgacccagatgttgacctttttgctggcaccaaaaaaaccaagctgttagagccaagtgttgggagcctgtttggggatgatgaagatgatgatcttttcagctctgccaagtcccagcctttggtacaagagaaaaagagagtagtgaaaaaagaccactctgttaactctttcaaaaaccagaaacatcctgaatccattcaaggtagtaaagaaaaaggcatatggaagccggaaacacctcaggactcatcaggtctcgctccatttaaaaccaaagaaccatccactcggatcgggaagatacaagcaaatttagcgatcaacccagcggccttgctgcccacagcggcttcccagatctctgaagtaaagcctgttttgccagaattggcttttccttcatctgaacacagaaggagccacggtctggaaagtgtgcctgtccttcccgggagtggggaggccggtgtgagttttgatcttccagctcaggcagacaccttacacagtgcaaacaagagccgtgtcaagatgagagggaagcgtagaccgcagacccgtgcagctaggcggctggctgctcaggagtccagcgaggctgaggacatgagcgtccccagaggacccattgcacagtgggctgatggcgccatttccccaaatggccatcggccacagctcagagcagccagtggagaagacagcactgaggaggccctggcagctgccgctgcaccttgggaaggtggtcctgtgcctggagtggacacaagcccctttgcaaagtctctgggtcattccagaggggaggctgacctttttgattctggggacattttttccacgggcactggatctcagtccgtggagagaacaaaacccaaggcaaagatagcagagaatcctgccaacccaccagtgggtggtaaagcaaagagccccatgtttcctgctctaggcgaggccagcagtgatgatgatctctttcagtctgctaaaccaaaaccagcaaagaaaacaaatccctttcctctcctggaagatgaggatgacctctttacagatcagaaagtcaagaagaatgagacaaaatccagtagtcagcaggatgtcatattaacaacacaagatatttttgaggatgatatatttgctacggaagcaattaaaccctctcagaaaaccagagagaaggagaaaacattggaatctaatttatttgatgataacattgatatctttgctgacttaactgtaaaaccaaaagaaaagtccaaaaagaaagtggaagccaagtctatatttgatgatgatatggatgacatcttctccactggtatccaggctaagacaaccaaaccaaaaagccgatctgcacaggccgcacctgaaccaagatttgaacacaaggtgtccaacatctttgatgatcccctgaatgcctttggaggccagtagagcacacagggtatccacatgttaccctgcagctacattgttgagttagtgatgatattgtatatgctcatggtcttaactggattacaaaaagcaaatactagaacagctagctcatcttttacccaatgtacttagtatttttctgcactggtttaatcatgcttaatactacaaaacaaaaataaatatttcacagtggttggtttgttttgtttttaaaccacagtttgatttagttagccttgctggggccataatatgcttcagggtgtgtaaaagaagaaatctctttgtggctttcatgggcagggaatctcagagatagcaaatgccacctgaccagaagtctttgttatatggatgggaaccctaacttagggcttgggcaggggaaagagaaagaagatgagagattatacttcatgagtcttagcaatatgggagcaggttttcactgaattctgagggtgcctctgcatgtcctccaaggcaaagtttggcaaactgtggcccccccactgtcatattttgttaataaaattttattggaacacaatcaca

SEQ ID NO: 6769 - protein, 709 aa, Homo sapiens; identical to SEQ ID NO: 6611

SEQ ID NO: 6770 - DNA, 3716 bp, Homo sapiens
tttacagcaatcatttcttgtcttcctagaattcttagaagtatagaaacttaggaatctcaagcatttgttttcaataaaggatacaccaggccttttcctgcaaacagccatgtcgattacattagacttgtccctgtgtcagtttgcagatccctttgtttattctgcccttccttcccccagattggttggggaatgggtcttgaatgtggcgtctgacccgaatgcttgcttcagagtaaatctagatccagggtgctggcctagagaatgaatgctgtgtgccacagacgtggacagacttgagagtggaggcccagagagtcttttgagggtgtcagtggactgtgccaggggtttagtgtgaaattcatcagactgcctcacactttgttaaatagtgtcagataaactccatgccagtttggagacacagcagatgccaacccgggaatttgagttctggacccatctttaatactccctgcaaaacattgctttctgtttgctagatgaagaggataacttattcgcaccccccaagctgaccgacgaggacttctcgccatttggctctggaggtggcctgttcagtggcggcaaggggctatttgatgatgaggacgaggagagtgacctcttcacggaagcctcccaggatcggcaagctggagcctctgttaaggaggagtcttcatcatccaaacctggaaagaaaatcccagcaggagctgtttctgtatttttaggagacacggatgtgtttggtgctgcctccgttccatcactgaaggagccacagaagcctgagcagcccactccaaggaaaagcccctatggtccccctcccactggcctctttgatgatgatgatggtgatgatgatgacgactttttctcggcaccccacagcaaaccttctaaaacacgcaaagtccaatccactgccgatatctttggtgacgaagaaggagatctgttcaaagaaaaagccgtagcatcgccagaagccactgtgagtcagacagatgaaaataaagcaagagcagaaaaaaaggttaccttatcttacagcaaaaatctcaagccctcatcagaaacaaagactcaaaaaggcttattttcagatgaggaggactctgaggatttgttttcttctcaaagtgcgagtaacttaaaaggtgcatctctgctgcctggcaagctccccacgtcggtttccctgtttgatgatgaagatgaagaggataatctttttgggggtacagctgctaagaagcagacattgtctctacaagctcagagagaagagaaagcaaaagcctccgagctctccaaaaagaaagcatctgccctgttgttcagcagtgatgaggagccaaaagaagacccagagagtgtcactcctctttgaagacgatgttgatagcggaggctctctgtttggctctcctcccacatctgttcctcctgcaacaaaggaaggacttttgactagatctgctcaggaaacagtcaagcattctgatttattttcttcatcatccccatgggacaaaggaaccaagcctagaaccaaaactgttcttagcttgtttgatgaggaagaggataaaatggaagatcaaaacattatccaggctccacagaaagaagtaggaaagggctgcgatcctgatgcccaccccaagagcacaggtgtcttccaggatgaagagctgcttttcagccacaagctccaaaaggacaatgacccagatgttgacctttttgctggcaccaaaaaaaccaagctgttagagccaagtgttgggagcctgtttggggatgatgaagatgatgatcttttcagctctgccaagtcccagcctttggtacaagagaaaaagagagtagtgaaaaaagaccactctgttaactctttcaaaaaccagaaacatcctgaatccattcaaggtagtaaagaaaaaggcatatggaagccggaaacacctcaggcaaatttagcgatcaacccagcggccttgctgcccacagcggcttcccagatctctgaagtaaagcctgttttgccagaattggcttttccttcatctgaacacagaaggagccacggtctggaaagtgtgcctgtccttcccgggagtggggaggccggtgtgagttttgatcttccagctcaggcagacaccttacacagtgcaaacaagagccgtgtcaagatgagagggaagcgtagaccgcagacccgtgcagctaggcggctggctgctcaggagtccagcgaggctgaggacatgagcgtccccagaggacccattgcacagtgggctgatggcgccatttccccaaatggccatcggccacagctcagagcagccagtggagaagacagcactgaggaggccctggcagctgccgctgcaccttgggaaggtggtcctgtgcctggagtggacacaagcccctttgcaaagtctctgggtcattccagaggggaggctgacctttttgattctggggacattttttccacgggcactggatctcagtccgtggagagaacaaaacccaaggcaaagatagcagagaatcctgccaacccaccagtgggtggtaaagcaaagagccccatgtttcctgctctaggcgaggccagcagtgatgatgatctctttcagtctgctaaaccaaaaccagcaaagaaaacaaatccctttcctctcctggaagatgaggatgacctctttacagatcagaaagtcaagaagaatgagacaaaatccagtagtcagcaggatgtcatattaacaacacaagatatttttgaggatgatatatttgctacggaagcaattaaaccctctcagaaaaccagagagaaggagaaaacattggaatctaatttatttgatgataacattgatatctttgctgacttaactgtaaaaccaaaagaaaagtccaaaaagaaagtggaagccaagtctatatttgatgatgatatggatgacatcttctccactggtatccaggctaagacaaccaaaccaaaaagccgatctgcacaggccgcacctgaaccaagatttgaacacaaggtgtccaacatctttgatgatcccctgaatgcctttggaggccagtagagcacacagggtatccacatgttaccctgcagctacattgttgagttagtgatgatattgtatatgctcatggtcttaactggattacaaaaagcaaatactagaacagctagctcatcttttacccaatgtacttagtatttttctgcactggtttaatcatgcttaatactacaaaacaaaaataaatatttcacagtggttggtttgttttgtttttaaaccacagtttgatttagttagccttgctggggccataatatgcttcagggtgtgtaaaagaagaaatctctttgtggctttcatgggcagggaatctcagagatagcaaatgccacctgaccagaagtctttgttatatggatgggaaccctaacttagggcttgggcaggggaaagagaaagaagatgagagattatacttcatgagtcttagcaatatgggagcaggttttcactgaattctgagggtgcctctgcatgtcctccaaggcaaagtttggcaaactgtggcccccccactgtcatattttgttaataaaattttattggaacacaatcaca

SEQ ID NO: 6771 - protein, 639 aa, Homo sapiens; identical to SEQ ID NO: 6629

SEQ ID NO: 6772 - DNA, 3952 bp, Homo sapiens
tttacagcaatcatttcttgtcttcctagaattcttagaagtatagaaacttaggaatctcaagcatttgttttcaataaaggatacaccaggccttttcctgcaaacagccatgtcgattacattagacttgtccctgtgtcagtttgcagatccctttgtttattctgcccttccttcccccagattggttggggaatgggtcttgaatgtggcgtctgacccgaatgcttgcttcagagtaaatctagatccagggtgctggcctagagaatgaatgctgtgtgccacagacgtggacagacttgagagtggaggcccagagagtcttttgagggtgtcagtggactgtgccaggggtttagtgtgaaattcatcagactgcctcacactttgttaaatagtgtcagataaactccatgccagtttggagacacagcagatgccaacccgggaatttgagttctggacccatctttaatactccctgcaaaacattgctttctgtttgctagatgaagaggataacttattcgcaccccccaagctgaccgacgaggacttctcgccatttggctctggaggtggcctgttcagtggcggcaaggggctatttgatgatgaggacgaggagagtgacctcttcacggaagcctcccaggatcggcaagctggagcctctgttaaggaggagtcttcatcatccaaacctggaaagaaaatcccagcaggagctgtttctgtatttttaggagacacggatgtgtttggtgctgcctccgttccatcactgaaggagccacagaagcctgagcagcccactccaaggaaaagcccctatggtccccctcccactggcctctttgatgatgatgatggtgatgatgatgacgactttttctcggcaccccacagcaaaccttctaaaacacgcaaagtccaatccactgccgatatctttggtgacgaagaaggagatctgttcaaagaaaaagccgtagcatcgccagaagccactgtgagtcagacagatgaaaataaagcaagagcagaaaaaaaggatttgttttcttctcaaagtgcgagtaacttaaaaggtgcatctctgctgcctggcaagctccccacgtcggtttccctgtttgatgatgaagatgaagaggataatctttttgggggtacagctgctaagaagcagacattgtctctacaagctcagagagaagagaaagcaaaagcctccgagctctccaaaaagaaagcatctgccctgttgttcagcagtgatgaggaggaccagtggaatattcctgcttcacagacccacttagcatctgacagcaggtctaaaggagaacccagggattctgggaccctccagagccaggaggccaaggctgtgaaaaagaccagtctctttgaggaagacaaagaagatgatctttttgccattgccaaggacagccaaaagaagacccagagagtgtcactcctctttgaagacgatgttgatagcggaggctctctgtttggctctcctcccacatctgttcctcctgcaacaaagaaaaaagagactgtctctgaggcaccacctttgctgttcagcgatgaagaagagaaggaggcacaacttggagtgaagtctgtggataagaaggttgagagtgccaaggagtcattaaaatttgggagaactgatgtggctgagtcagaaaaggaaggacttttgactagatctgctcaggaaacagtcaagcattctgatttattttcttcatcatccccatgggacaaaggaaccaagcctagaaccaaaactgttcttagcttgtttgatgaggaagaggataaaatggaagatcaaaacattatccaggctccacagaaagaagtaggaaagggctgcgatcctgatgcccaccccaagagcacaggtgtcttccaggatgaagagctgcttttcagccacaagctccaaaaggacaatgacccagatgttgacctttttgctggcaccaaaaaaaccaagctgttagagccaagtgttgggagcctgtttggggatgatgaagatgatgatcttttcagctctgccaagtcccagcctttggtacaagagaaaaagagagtagtgaaaaaagaccactctgttaactctttcaaaaaccagaaacatcctgaatccattcaaggtagtaaagaaaaaggcatatggaagccggaaacacctcaggcaaatttagcgatcaacccagcggccttgctgcccacagcggcttcccagatctctgaagtaaagcctgttttgccagaattggcttttccttcatctgaacacagaaggagccacggtctggaaagtgtgcctgtccttcccgggagtggggaggccggtgtgagttttgatcttccagctcaggcagacaccttacacagtgcaaacaagagccgtgtcaagatgagagggaagcgtagaccgcagacccgtgcagctaggcggctggctgctcaggagtccagcgaggctgaggacatgagcgtccccagaggacccattgcacagtgggctgatggcgccatttccccaaatggccatcggccacagctcagagcagccagtggagaagacagcactgaggaggccctggcagctgccgctgcaccttgggaaggtggtcctgtgcctggagtggacacaagcccctttgcaaagtctctgggtcattccagaggggaggctgacctttttgattctggggacattttttccacgggcactggatctcagtccgtggagagaacaaaacccaaggcaaagatagcagagaatcctgccaacccaccagtgggtggtaaagcaaagagccccatgtttcctgctctaggcgaggccagcagtgatgatgatctctttcagtctgctaaaccaaaaccagcaaagaaaacaaatccctttcctctcctggaagatgaggatgacctctttacagatcagaaagtcaagaagaatgagacaaaatccagtagtcagcaggatgtcatattaacaacacaagatatttttgaggatgatatatttgctacggaagcaattaaaccctctcagaaaaccagagagaaggagaaaacattggaatctaatttatttgatgataacattgatatctttgctgacttaactgtaaaaccaaaagaaaagtccaaaaagaaagtggaagccaagtctatatttgatgatgatatggatgacatcttctccactggtatccaggctaagacaaccaaaccaaaaagccgatctgcacaggccgcacctgaaccaagatttgaacacaaggtgtccaacatctttgatgatcccctgaatgcctttggaggccagtagagcacacagggtatccacatgttaccctgcagctacattgttgagttagtgatgatattgtatatgctcatggtcttaactggattacaaaaagcaaatactagaacagctagctcatcttttacccaatgtacttagtatttttctgcactggtttaatcatgcttaatactacaaaacaaaaataaatatttcacagtggttggtttgttttgtttttaaaccacagtttgatttagttagccttgctggggccataatatgcttcagggtgtgtaaaagaagaaatctctttgtggctttcatgggcagggaatctcagagatagcaaatgccacctgaccagaagtctttgttatatggatgggaaccctaacttagggcttgggcaggggaaagagaaagaagatgagagattatacttcatgagtcttagcaatatgggagcaggttttcactgaattctgagggtgcctctgcatgtcctccaaggcaaagtttggcaaactgtggcccccccactgtcatattttgttaataaaattttattggaacacaatcaca

SEQ ID NO: 6773 - protein, 510 aa, Homo sapiens; identical to SEQ ID NO: 6765

SEQ ID NO: 6774 - DNA, 4067 bp, Homo sapiens
tttacagcaatcatttcttgtcttcctagaattcttagaagtatagaaacttaggaatctcaagcatttgttttcaataaaggatacaccaggccttttcctgcaaacagccatgtcgattacattagacttgtccctgtgtcagtttgcagatccctttgtttattctgcccttccttcccccagattggttggggaatgggtcttgaatgtggcgtctgacccgaatgcttgcttcagagtaaatctagatccagggtgctggcctagagaatgaatgctgtgtgccacagacgtggacagacttgagagtggaggcccagagagtcttttgagggtgtcagtggactgtgccaggggtttagtgtgaaattcatcagactgcctcacactttgttaaatagtgtcagataaactccatgccagtttggagacacagcagatgccaacccgggaatttgagttctggacccatctttaatactccctgcaaaacattgctttctgtttgctagatgaagaggataacttattcgcaccccccaagctgaccgacgaggacttctcgccatttggctctggaggtggcctgttcagtggcggcaaggggctatttgatgatgaggacgaggagagtgacctcttcacggaagcctcccaggatcggcaagctggagcctctgttaaggaggagtcttcatcatccaaacctggaaagaaaatcccagcaggagctgtttctgtatttttaggagacacggatgtgtttggtgctgcctccgttccatcactgaaggagccacagaagcctgagcagcccactccaaggaaaagcccctatggtccccctcccactggcctctttgatgatgatgatggtgatgatgatgacgactttttctcggcaccccacagcaaaccttctaaaacacgcaaagtccaatccactgccgatatctttggtgacgaagaaggagatctgttcaaagaaaaagccgtagcatcgccagaagccactgtgagtcagacagatgaaaataaagcaagagcagaaaaaaaggatttgttttcttctcaaagtgcgagtaacttaaaaggtgcatctctgctgcctggcaagctccccacgtcggtttccctgtttgatgatgaagatgaagaggataatctttttgggggtacagctgctaagaagcagacattgtctctacaagctcagagagaagagaaagcaaaagcctccgagctctccaaaaagaaagcatctgccctgttgttcagcagtgatgaggaggaccagtggaatattcctgcttcacagacccacttagcatctgacagcaggtctaaaggagaacccagggattctgggaccctccagagccaggaggccaaggctgtgaaaaagaccagtctctttgaggaagacaaagaagatgatctttttgccattgccaaggacagatacatcctacctcctattgttcccgaagttgtctgtcaagttttgtgtatggaaagtaattcataccttcatcagatctcaaaagaagctttacacacacaagaagaagttgagccaaaagaagacccagagagtgtcactcctctttgaagacgatgttgatagcggaggctctctgtttggctctcctcccacatctgttcctcctgcaacaaagaaaaaagagactgtctctgaggcaccacctttgctgttcagcgatgaagaagagaaggaggcacaacttggagtgaagtctgtggataagaaggttgagagtgccaaggagtcattaaaatttgggagaactgatgtggctgagtcagaaaaggaaggacttttgactagatctgctcaggaaacagtcaagcattctgatttattttcttcatcatccccatgggacaaaggaaccaagcctagaaccaaaactgttcttagcttgtttgatgaggaagaggataaaatggaagatcaaaacattatccaggctccacagaaagaagtaggaaagggctgcgatcctgatgcccaccccaagagcacaggtgtcttccaggatgaagagctgcttttcagccacaagctccaaaaggacaatgacccagatgttgacctttttgctggcaccaaaaaaaccaagctgttagagccaagtgttgggagcctgtttggggatgatgaagatgatgatcttttcagctctgccaagtcccagcctttggtacaagagaaaaagagagtagtgaaaaaagaccactctgttaactctttcaaaaaccagaaacatcctgaatccattcaaggtagtaaagaaaaaggcatatggaagccggaaacacctcaggcaaatttagcgatcaacccagcggccttgctgcccacagcggcttcccagatctctgaagtaaagcctgttttgccagaattggcttttccttcatctgaacacagaaggagccacggtctggaaagtgtgcctgtccttcccgggagtggggaggccggtgtgagttttgatcttccagctcaggcagacaccttacacagtgcaaacaagagccgtgtcaagatgagagggaagcgtagaccgcagacccgtgcagctaggcggctggctgctcaggagtccagcgaggctgaggacatgagcgtccccagaggacccattgcacagtgggctgatggcgccatttccccaaatggccatcggccacagctcagagcagccagtggagaagacagcactgaggaggccctggcagctgccgctgcaccttgggaaggtggtcctgtgcctggagtggacacaagcccctttgcaaagtctctgggtcattccagaggggaggctgacctttttgattctggggacattttttccacgggcactggatctcagtccgtggagagaacaaaacccaaggcaaagatagcagagaatcctgccaacccaccagtgggtggtaaagcaaagagccccatgtttcctgctctaggcgaggccagcagtgatgatgatctctttcagtctgctaaaccaaaaccagcaaagaaaacaaatccctttcctctcctggaagatgaggatgacctctttacagatcagaaagtcaagaagaatgagacaaaatccagtagtcagcaggatgtcatattaacaacacaagatatttttgaggatgatatatttgctacggaagcaattaaaccctctcagaaaaccagagagaaggagaaaacattggaatctaatttatttgatgataacattgatatctttgctgacttaactgtaaaaccaaaagaaaagtccaaaaagaaagtggaagccaagtctatatttgatgatgatatggatgacatcttctccactggtatccaggctaagacaaccaaaccaaaaagccgatctgcacaggccgcacctgaaccaagatttgaacacaaggtgtccaacatctttgatgatcccctgaatgcctttggaggccagtagagcacacagggtatccacatgttaccctgcagctacattgttgagttagtgatgatattgtatatgctcatggtcttaactggattacaaaaagcaaatactagaacagctagctcatcttttacccaatgtacttagtatttttctgcactggtttaatcatgcttaatactacaaaacaaaaataaatatttcacagtggttggtttgttttgtttttaaaccacagtttgatttagttagccttgctggggccataatatgcttcagggtgtgtaaaagaagaaatctctttgtggctttcatgggcagggaatctcagagatagcaaatgccacctgaccagaagtctttgttatatggatgggaaccctaacttagggcttgggcaggggaaagagaaagaagatgagagattatacttcatgagtcttagcaatatgggagcaggttttcactgaattctgagggtgcctctgcatgtcctccaaggcaaagtttggcaaactgtggcccccccactgtcatattttgttaataaaattttattggaacacaatcaca

SEQ ID NO: 6775 - protein, 688 aa, Homo sapiens; identical to SEQ ID NO: 6613

SEQ ID NO: 6776 - DNA, 357 bp, Homo sapiens
atgacctacaagaatgttttggatcaagtggagatacaaaggaggaggcagccatgtcctgaccattgtctttctttcccgtcctggctggagagagcacagtggggaagagaaataagagagaagacaacccaaaccttaactctcatgcagtactgggcggtggataatctttttgggggtacagctgctaagaagcagacattgtctctacaagctcagagagaagagaaagcaaaagcctccgagctctccaaaaagaaagcatctgccctgttgttcagcagtgatgaggagtctgatgaagaagcggacagttttgggggagcacgattagatgaaaggggtgtgacctga

SEQ ID NO: 6777 - protein, 118 aa, Homo sapiens
MTYKNVLDQVEIQRRRQPCPDHCLSFPSWLERAQWGREIREKTTQTLTLMQYWAVDNLFGGTAAKKQTLSLQAQREEKAKASELSKKKASALLFSSDEESDEEADSFGGARLDERGVT

SEQ ID NO: 6778 - DNA, 528 bp, Homo sapiens
atgtgcgcactgtgctgcttaggtctaagatctcccagggcctgtgtgaagagcgttgcatttgcatttgctgctgaggctccttggagctacagtgatacaagcatttcatttgtacctgtgttcctgtgtgaaattctcttcctagtggctgtgtgtggaccccagtcctatcccagtcctggtccacacttgactctgactggttgctgtactgccctctccctgagtgaaggacttttgactagatctgctcaggaaacagtcaagcattctgatttattttcttcatcatccccatgggacaaaggaaccaagcctagaaccaaaactgttcttagcttgtttgatgaggaagaggataaaatggaagatcaaaacattatccaggctccacagaaagaagtaggaaagggcaccatctggaaagtcaaacgaccacccacaaaatgggagaaaagatttacagatcatgtatttgataaaggactcagatccagaatatgtaaaagacttataagtcaataa

SEQ ID NO: 6779 - protein, 175 aa, Homo sapiens
MCALCCLGLRSPRACVKSVAFAFAAEAPWSYSDTSISFVPVFLCEILFLVAVCGPQSYPSPGPHLTLTGCCTALSLSEGLLTRSAQETVKHSDLFSSSSPWDKGTKPRTKTVLSLFDEEEDKMEDQNIIQAPQKEVGKGTIWKVKRPPTKWEKRFTDHVFDKGLRSRICKRLISQ

SEQ ID NO: 6780 - DNA, 2605 bp, Homo sapiens
agtcatctcccctctcctcactccacacgccagagtttcatgaatctatactttaatagttagtgttttttgatgccatgccagatttgactctgaagtggagttaaggtaggatgaagaatcttcttcccactaaagaatttatttctccctctggatttccttggaatagaattaaaatagaaataaatataaattacatctgatttcctgcctgctctcagtgttgcctctcccgaggtcattgctgttgggccgtactctgcagcagtcttctcagaacgctgtggagctcctcctgggaacagcccaggactggagagcgagtgacagttccacgtgcaggtgtcccagggtgtctcactgaagccttagtgtcctgagccgtaaacctgaggcacttggacgaacacatcaccactgacccttcctggggctcagatcttttgcttttagagccagtgcattaggctatggttgaatttttgtgtgctccttgaaatttctatttgataaccaacatggtaattttgcctgctggtcagttttaggtgctctgataaactgtgactcttgggaatcttactcatcttgtattccttgactccatatctgatctggcagctttccacttatgtgacagaggaggaggcatacgtgaagtagtgctagtgaaacatcaggccccaggagagatttgaatgcctttcccattaaagagctacagaaagtgacagttttgctccatcacagatttatttacaggcataagaaacacttgtctttctgtttcccaaatggatttttaactggatgtaatcttacacaggactcatcaggtctcgctccatttaaaaccaaagaaccatccactcggatcgggaagatacaagtaattaaaacactggaatcttcattgcctgccctgtggcatctataaacttttttgggtttcctactcttgtcagctgctgccaaacatcttctcatctcttcccccgcctcccctcccctgcacctagttgttgtctcctgtgtgctgcgtctttaacatctattctttgagcccagtggtgggcataggtgtaagacgctctgttttaattctgagactagattgggcgattttcctacgtttctctactcctctcgtattatacattatgtgtaccgaatcttgtcatgtgtcacaataaagataatagactgctgtgttgaagaacaaatacagagtttcatttttcttctttaggcaaatttagcgatcaacccagcggccttgctgcccacagcggcttcccagatctctgaagtaaagcctgttttgccagaattggcttttccttcatctgaacacagaaggagccacggtctggaaagtgtgcctgtccttcccgggagtggggaggccggtgtgagttttgatcttccagctcaggcagacaccttacacagtgcaaacaagagccgtgtcaagatgagagggaagcgtagaccgcagacccgtgcagctaggcggctggctgctcaggagtccagcgaggctgaggacatgagcgtccccagaggacccattgcacagtgggctgatggcgccatttccccaaatggccatcggccacagctcagagcagccagtggagaagacagcactgaggaggccctggcagctgccgctgcaccttgggaaggtggtcctgtgcctggagtggacacaagcccctttgcaaagtctctgggtcattccagaggggaggctgacctttttgattctggggacattttttccacgggcactggatctcagtccgtggagagaacaaaacccaaggcaaagatagcagagaatcctgccaacccaccagtgggtggtaaagcaaagagccccatgtttcctgctctaggcgaggccagcagtgatgatgatctctttcagtctgctaaaccaaaaccagcaaagaaaacaaatccctttcctctcctggaagatgaggatgacctctttacagatcagaaagtcaagaagaatgagacaaaatccagtagtcagcaggatgtcatattaacaacacaagatatttttgaggatgatatatttgctacggaagcaattaaaccctctcagaaaaccagagagaaggagaaaacattggaatctaatttatttgatgataacattgatatctttgctgacttaactgtaaaaccaaaagaaaagtccaaaaagaaagtggaagccaagtctatatttgatgatgatatggatgacatcttctccactggtatccaggctaagacaaccaaaccaaaaagccgatctgcacaggccgcacctgaaccaagatttgaacacaaggtgtccaacatctttgatgatcccctgaatgcctttggaggccagtagagcacacagggtatccacatgttaccctgcagctacattgttgagttagtgatgatattgtatatgctcatggtcttaactggattacaaaaagcaaatactagaacagctagctcatcttttacccaatgtacttagtatttttctgcactggtttaatcatgcttaatactacaaaacaaaaataaatatttcacagtg

SEQ ID NO: 6781 - protein, 308 aa, Homo sapiens
MRGKRRPQTRAARRLAAQESSEAEDMSVPRGPIAQWADGAISPNGHRPQLRAASGEDSTEEALAAAAAPWEGGPVPGVDTSPFAKSLGHSRGEADLFDSGDIFSTGTGSQSVERTKPKAKIAENPANPPVGGKAKSPMFPALGEASSDDDLFQSAKPKPAKKTNPFPLLEDEDDLFTDQKVKKNETKSSSQQDVILTTQDIFEDDIFATEAIKPSQKTREKEKTLESNLFDDNIDIFADLTVKPKEKSKKKVEAKSIFDDDMDDIFSTGIQAKTTKPKSRSAQAAPEPRFEHKVSNIFDDPLNAFGGQ

SEQ ID NO: 6782 - DNA, 3017 bp, Homo sapiens
acttggttgctaattggacccactctactgaggctttgtatagaactcatagaggaagatggcttcaagtaatgaactaccctttgcttttcttaggactaaaatctcaggaagctggtgatgaatgaaaaccttagtcccaatggcactgcacgaggggccaggagagcagcagcatcataagccacagggtggggcagccaaggcaggggcattctgagctgttggggaggggtggcaggcagggtggggcactgtgaggtgtcggggagggcattgtgaagtgtggggtggggcattgtgtgccacatgcctgggctcccacctggggccagtgggcttcagtctgtaggtgactacagaaggaggaggagctccgtctgttctctcttcaggcagttgttgtgtctctcagcacttgttgggttcacaacctattaaataagccggctggtcttcaccctcccagacaagtcaactcaggggaggcagcagggtgcgggccttggcccgcagccctagccggggccggggccagggccagggccagggctggtgcccggggccgcgctgtgaggtgggcaggcgaggagcgggaagaccatctctgcaagtgcagcatagcctcggcctaggacagcgggagtgcgtggccaaagctgtgagcagaggcacaggtggtggcagacagtagaggcgccccatggggaacatactgacctgtcgtgtgcaccctagcgtcagcctcgagtttgaccagcagcaggggtcggtgtgtccctctgaatctgagatctatgaggcaggagctggggacaggatggcaggagcgcccatggctgctgctgtacagcctgctgaggtgactgttgaagttggtgaggacctccacatgcaccacgttcgtgaccgggagatgcctgaagctttggagtttaacccttctgccaatccagaggcaagcacaatattccagaggaactctcaaacagatgttgtagaaataagaagaagcaactgtacaaaccatgtatctactgtgcgtttcagtcaacaatacagcttgtgttcgacaatattccttgatgacagcacagccatccagcattatcttacaatgacaataatatctgtgaccttggagatacctcatcatatcacacaaagagatgcagatagatctttgagcatacctgatgaacagttacactcatttgcggtttccaccgtgcacattatgaagaaaagaaatggaggtgggagtttaaataactattcctcctccattccatcgactcccagcaccagccaggaggaccctcagttcagtgttcctcccactgccaacacacccacccccgtttgcaagcggtccatgcgctggtccaacctgtttacatctgagaaagggagtgacccagacaaagagaggaaagccccggagaatcatgctgacaccatcgggagcggcagagccatccccattaaacagggcatgctcttaaagcgaagtgggaaatggctgaagacatggaaaaagaaatacgtcaccctgtgttccaatggcgtgctcacctattattcaagcttaggtgattatatgaagaatattcataaaaaagagattgaccttcagacatctaccatcaaagtcccaggaaagtggccatccctagccacatcggcctgcacacccatctccacctctaaaagcaatggcctatccaaggacatggacaccgggctgggtgactccatatgcttcagccccagtatctccagcaccaccagccccaagctcaacccgcccccctctcctcatgccaataaaaagaaacacctaaagaagaaaagcaccaacaactttatgattgtgtctgccactggccaaacgtggcactttgaagccacgacgtatgaggagcgggatgcctgggtccaagccatccagagccagatcctggccagcctgcagtcatgcgagagcagtaaaagcaagtcccagctgaccagccagagcaaggccatggccctgcagtcgatccaaaacatgcgtgggaacgcccactgtgtggactgtgagacccagaatcctaagtgggccagtttgaacttgggagtcctcatgtgtattgaatgctcaggaatccaccgcagtcttggcacccgcctttcccgtgtgcgatctctggagctggatgactggccagttgagctcaggaaggttatgtcatctattggcaatgacctagccaacagcatctgggaagggagcagccaggggcagacaaaaccctcagaaaagtccacgagggaagagaaggaacggtggatccgttccaaatatgaggagaagctctttctggccccactaccctgcactgagctgtccctgggccagcagctgctgcgggccaccgctgatgaggacctgcagacagccatcctgctgctggcacatggctcccgtgaggaggtgaacgagacctgtggggagggagacggctgcacggcgctccatctggcctgccgcaaggggaatgtggtcctggcgcagctcctgatctggtacggggtggacgtcatggcccgagatgcccacgggaacacagcgctgacctacgcccggcaggcctccagccaggagtgcatcaacgtgcttctgcagtacggctgccccgacaagtgtgtgtagtatctgttttatttgactgcagtctccttggtgcaaaaacaaaatgggaaaaataaggataactcagaatttcaaaaggaaatcacaaattcagctaataatagcattttcagtacttttcgtaaactaagtaaatacacaaaatgttgatttttctgaccataagacgtattttatgtccttttgccaaggtggatttgttagtctcaggccctcctggccacattgcccaagtcacacaggcttctgtattatgtatttagataaaatgtgtgaaaatatatttgaaataaagttcataaatatgcattgatttttgtac

SEQ ID NO: 6783 - protein, 663 aa, Homo sapiens; identical to SEQ ID NO: 723

SEQ ID NO: 6784 - DNA, 2701 bp, Homo sapiens
ctgataggaagtgaaaggtggctgaggtaatgagaatagacccatctgcagaggatcataaaaccagcaaagacaagatcttgtctaagatgccttcacaaactttgtccatgagaactgtaaggtcttctccagacctgttggctgctgctgtgatctctgcccaagaggagcttctgaccaacatccaaagggcttctggacccactggactcctctggagttgctccttcacatgttcccactctctgtgcggccaccatggaagtcggacctgcccttctgccatgattgactaaaatctcaggaagctggtgatgaatgaaaaccttagtcccaatggcactgcacgaggggccaggagagcagcagcatcataagccacaggcgtcagcctcgagtttgaccagcagcaggggtcggtgtgtccctctgaatctgagatctatgaggcaggagctggggacaggatggcaggagcgcccatggctgctgctgtacagcctgctgaggtgactgttgaagttggtgaggacctccacatgcaccacgttcgtgaccgggagatgcctgaagctttggagtttaacctttctgccaatccagaggcaagcacaatattccagaggaactctcaaacagatgctttggagtttaacccttctgccaatccagaggcaagcacaatattccagaggaactctcaaacagatggtatctactgtgcgtttcagtcaacaatacagcttgtgttcgacaatattccttgatgacagcacagccatccagcattatcttacaatgacaataatatctgtgaccttggagatacctcatcatatcacacaaagagatgcagatagatctttgagcatacctgatgaacagttacactcatttgcggtttccaccgtgcacattatgaagaaaagaaatggaggtgggagtttaaataactattcctcctccattccatcgactcccagcaccagccaggaggaccctcagttcagtgttcctcccactgccaacacacccacccccgtttgcaagcggtccatgcgctggtccaacctgtttacatctgagaaagggagtgacccagacaaagagaggaaagccccggagaatcatgctgacaccatcgggagcggcagagccatccccattaaacagggcatgctcttaaagcgaagtgggaaatggctgaagacatggaaaaagaaatacgtcaccctgtgttccaatggcgtgctcacctattattcaagcttaggtgattatatgaagaatattcataaaaaagagattgaccttcagacatctaccatcaaagtcccaggaaagtggccatccctagccacatcggcctgcacacccatctccacctctaaaagcaatggcctatccaaggacatggacaccgggctgggtgactccatatgcttcagccccagtatctccagcaccaccagccccaagctcaacccgcccccctctcctcatgccaataaaaagaaacacctaaagaagaaaagcaccaacaactttatgattgtgtctgccactggccaaacgtggcactttgaagccacgacgtatgaggagcgggatgcctgggtccaagccatccagagccagatcctggccagcctgcagtcatgcgagagcagtaaaagcaagtcccagctgaccagccagagcaaggccatggccctgcagtcgatccaaaacatgcgtgggaacgcccactgtgtggactgtgagacccagaatcctaagtgggccagtttgaacttgggagtcctcatgtgtattgaatgctcaggaatccaccgcagtcttggcacccgcctttcccgtgtgcgatctctggagctggatgactggccagttgagctcaggaaggttatgtcatctattggcaatgacctagccaacagcatctgggaagggagcagccaggggcagacaaaaccctcagaaaagtccacgagggaagagaaggaacggtggatccgttccaaatatgaggagaagctctttctggccccactaccctgcactgagctgtccctgggccagcagctgctgcgggccaccgctgatgaggacctgcagacagccatcctgctgctggcacatggctcccgtgaggaggtgaacgagacctgtggggagggagacggctgcacggcgctccatctggcctgccgcaaggggaatgtggtcctggcgcagctcctgatctggtacggggtggacgtcatggcccgagatgcccacgggaacacagcgctgacctacgcccggcaggcctccagccaggagtgcatcaacgtgcttctgcagtacggctgccccgacaagtgtgtgtagtatctgttttatttgactgcagtctccttggtgcaaaaacaaaatgggaaaaataaggataactcagaatttcaaaaggaaatcacaaattcagctaataatagcattttcagtacttttcgtaaactaagtaaatacacaaaatgttgatttttctgaccataagacgtattttatgtccttttgccaaggtggatttgttagtctcaggccctcctggccacattgcccaagtcacacaggcttctgtattatgtatttagataaaatgtgtgaaaatatatttgaaataaagttcataaatatgcattgatttttgtac

SEQ ID NO: 6785 - protein, 578 aa, Homo sapiens
MLWSLTLLPIQRQAQYSRGTLKQMVSTVRFSQQYSLCSTIFLDDSTAIQHYLTMTIISVTLEIPHHITQRDADRSLSIPDEQLHSFAVSTVHIMKKRNGGGSLNNYSSSIPSTPSTSQEDPQFSVPPTANTPTPVCKRSMRWSNLFTSEKGSDPDKERKAPENHADTIGSGRAIPIKQGMLLKRSGKWLKTWKKKYVTLCSNGVLTYYSSLGDYMKNIHKKEIDLQTSTIKVPGKWPSLATSACTPISTSKSNGLSKDMDTGLGDSICFSPSISSTTSPKLNPPPSPHANKKKHLKKKSTNNFMIVSATGQTWHFEATTYEERDAWVQAIQSQILASLQSCESSKSKSQLTSQSKAMALQSIQNMRGNAHCVDCETQNPKWASLNLGVLMCIECSGIHRSLGTRLSRVRSLELDDWPVELRKVMSSIGNDLANSIWEGSSQGQTKPSEKSTREEKERWIRSKYEEKLFLAPLPCTELSLGQQLLRATADEDLQTAILLLAHGSREEVNETCGEGDGCTALHLACRKGNVVLAQLLIWYGVDVMARDAHGNTALTYARQASSQECINVLLQYGCPDKCV

SEQ ID NO: 6786 - DNA, 2456 bp, Homo sapiens
gcagaagcagatgcacatcttctctgggaaaattcacctctagtctacacctatgaacctactgggttggtgacatttacaagacagagtcttgaagattttccagaatgggaaagatgtgaaaaacccttgacacgattgcatgtcacttacgaaggtaccatagaagaaaatggccgaggcatgctacaggtggattttgcaaatcattttgttggaggtggtgtaaccagtgcaggacttgtgcaagaagaaatccgctttttaatcaatcctgagttgattatttcacggctcttcactgaggtgctggatcacaatgaatgtctaattatcacagtgtcagagatggctttggattccccattctgtgtgctgctgtctggctcctgaacccacctgtagaggtgtgtcaatcccagctggtgaagtactgagaagaagctacacaaaaggcatcaaagtattagtatctactgtgcgtttcagtcaacaatacagcttgtgttcgacaatattccttgatgacagcacagccatccagcattatcttacaatgacaataatatctgtgaccttggagatacctcatcatatcacacaaagagatgcagatagatctttgagcatacctgatgaacagttacactcatttgcggtttccaccgtgcacattatgaagaaaagaaatggaggtgggagtttaaataactattcctcctccattccatcgactcccagcaccagccaggaggaccctcagttcagtgttcctcccactgccaacacacccacccccgtttgcaagcggtccatgcgctggtccaacctgtttacatctgagaaagggagtgacccagacaaagagaggaaagccccggagaatcatgctgacaccatcgggagcggcagagccatccccattaaacagggcatgctcttaaagcgaagtgggaaatggctgaagacatggaaaaagaaatacgtcaccctgtgttccaatggcgtgctcacctattattcaagcttaggtgattatatgaagaatattcataaaaaagagattgaccttcagacatctaccatcaaagtcccaggaaagtggccatccctagccacatcggcctgcacacccatctccacctctaaaagcaatggcctatccaaggacatggacaccgggctgggtgactccatatgcttcagccccagtatctccagcaccaccagccccaagctcaacccgcccccctctcctcatgccaataaaaagaaacacctaaagaagaaaagcaccaacaactttatgattgtgtctgccactggccaaacgtggcactttgaagccacgacgtatgaggagcgggatgcctgggtccaagccatccagagccagatcctggccagcctgcagtcatgcgagagcagtaaaagcaagtcccagctgaccagccagagcaaggccatggccctgcagtcgatccaaaacatgcgtgggaacgcccactgtgtggactgtgagacccagaatcctaagtgggccagtttgaacttgggagtcctcatgtgtattgaatgctcaggaatccaccgcagtcttggcacccgcctttcccgtgtgcgatctctggagctggatgactggccagttgagctcaggaaggttatgtcatctattggcaatgacctagccaacagcatctgggaagggagcagccaggggcagacaaaaccctcagaaaagtccacgagggaagagaaggaacggtggatccgttccaaatatgaggagaagctctttctggccccactaccctgcactgagctgtccctgggccagcagctgctgcgggccaccgctgatgaggacctgcagacagccatcctgctgctggcacatggctcccgtgaggaggtgaacgagacctgtggggagggagacggctgcacggcgctccatctggcctgccgcaaggggaatgtggtcctggcgcagctcctgatctggtacggggtggacgtcatggcccgagatgcccacgggaacacagcgctgacctacgcccggcaggcctccagccaggagtgcatcaacgtgcttctgcagtacggctgccccgacaagtgtgtgtagtatctgttttatttgactgcagtctccttggtgcaaaaacaaaatgggaaaaataaggataactcagaatttcaaaaggaaatcacaaattcagctaataatagcattttcagtacttttcgtaaactaagtaaatacacaaaatgttgatttttctgaccataagacgtattttatgtccttttgccaaggtggatttgttagtctcaggccctcctggccacattgcccaagtcacacaggcttctgtattatgtatttagataaaatgtgtgaaaatatatttgaaataaagttcataaatatgcattgatttttgtac

SEQ ID NO: 6787 - protein, 525 aa, Homo sapiens
MTIISVTLEIPHHITQRDADRSLSIPDEQLHSFAVSTVHIMKKRNGGGSLNNYSSSIPSTPSTSQEDPQFSVPPTANTPTPVCKRSMRWSNLFTSEKGSDPDKERKAPENHADTIGSGRAIPIKQGMLLKRSGKWLKTWKKKYVTLCSNGVLTYYSSLGDYMKNIHKKEIDLQTSTIKVPGKWPSLATSACTPISTSKSNGLSKDMDTGLGDSICFSPSISSTTSPKLNPPPSPHANKKKHLKKKSTNNFMIVSATGQTWHFEATTYEERDAWVQAIQSQILASLQSCESSKSKSQLTSQSKAMALQSIQNMRGNAHCVDCETQNPKWASLNLGVLMCIECSGIHRSLGTRLSRVRSLELDDWPVELRKVMSSIGNDLANSIWEGSSQGQTKPSEKSTREEKERWIRSKYEEKLFLAPLPCTELSLGQQLLRATADEDLQTAILLLAHGSREEVNETCGEGDGCTALHLACRKGNVVLAQLLIWYGVDVMARDAHGNTALTYARQASSQECINVLLQYGCPDKCV

SEQ ID NO: 6788 - DNA, 933 bp, Homo sapiens
gagagggagtctcactctgtcgcccatgctggagttctgtggcacagtcttggctcactgcaacctctgcctcccagagacgaggttttactacgtaggcgaagttggtctcgaactcctgacctcagatgatccacccgcctcagcctcccaaagtgctgggattacaggcgtgagccaccgcacctggcctgtttattctcttaagagagaaaatgaggggattagtggactgtagttctggacaaggtggaaaactcttaaagtggaagtattggggcaagtgctctgacaggctaggatggtgcagtcagtcccttcacccagaaatcagtagaatgttaacagttcagactcaaaccttgtgaaaaacaggttctagaaaggaaatccctcacagcaactggcaccataatcaagacagaatttttgcagaataaatagagttacctgctttcagccccaggtcgtagctattgtctgccctgctgatatgtgataataatttgtgatcctgttgtcttaaaatggggtcactcatctccagtagaattaagtccacagtgaagttgtccccccatccccagagataaacatatatgaatgaacttacgtgataacaactactgctgcctgggatcatgagagacctgaactgaactgataggaagtgaaaggtggctgaggtaatgagaatagacccatctgcagaggatcataaaaccagcaaagacaagatcttgtctaagatgccttcacaaactttgtccatgagaactgtaaggtcttctccagacctgttggctgctgctgtgatctctgcccaagaggagcttctgaccaacatccaaagggcttctggacccactggactcctctggaggtaccttggtctcccgatccatggctgtgtttttttactccctttatcgc

SEQ ID NO: 6789 - protein, 70 aa, Homo sapiens
MLEFCGTVLAHCNLCLPETRFYYVGEVGLELLTSDDPPASASQSAGITGVSHRTWPVYSLKRENEGISGL

SEQ ID NO: 6790 - DNA, 2120 bp, Homo sapiens
gactcacaggacactaaggctccttttctgaagaagccttttaccagtctcatttaggggatgggaacaacatgtcttcacctagggactttagagcagagcctgtaaacgattatgagggaaatgactctgaagcagaagacttgaatttcagggagactttgccttcatcaagtcaggaaaacacacctagatcaaaggtttttgaaaataaagttaattcagagaaggtaaaactttctcttcggaatttcccacataatgattatgaggatgtttttgaagagccttcagaaagtggcagtgatcccagcatgtggacagccagaggccccttcagaagagacaggtggagcagtgaggatgaggaggctgcagggccatcacaggctctctcccctctactttctgttcaacatcatggatatagtggcccaaatgagagaacaacgttctggcatggttcaaacgaaggagcagtatcacttttgttacgatattgtgcttgaagttcttcggaaacttctgactttggattaagaaagacttctgttgcctctcacttgaaattaccaagtgggtttgcacctcctcataaagaacatgtttgcactgtgctgaagggctttgctatgcatacaatctgctttcttggtttatcagtttattttctttctaaaagctccctgaagggcaatatcatttggcttggggtgatcagtgtttacttattgatcttgctagacaatatcaaaataacttcccacattttccagtgaaacagatgttacataaaacgattgcagcttggctatttggttgaagggattacagagcccaataaaggatttaaaatatattcattaagattttatttggaaaggtggctggagagagctgaggatttccaggactttgtaagttcttattctgggagaacataaggccaataatcatgacctcttccaggcatttttaagacagatgtctattcatgttctttagctagagcctgtactttttgctggcatttgaataacccagtttaaaaagagtccagttagggtggactaactttggacacaaattggcttccatttcctacattttcatactgctgccttcctacagctgctagaccaagacctgttggtctgggaagcatttcatggatagggagagctcctctcggtgaacagtccaaaactaaaatagatgtttatatagaaagcccaagaggagatttttgccatgcctgagttctttcctatcccaccctaacacttaacatattacttagtctgctttgttaaaagcaagtattacctttaacttgcctcttactctttgccctttagctaactaataaagtttgatataggcattattatataattctgagtcattcatggtatatctcatgtttgatgtatttttcaaactaagatctatgatagttttttttccagagttccattaaatcatttatttcctttactttctcacctctgttgaaacatttagaaactggatttgggaacccaattttggaaaaccagattcatagtcatgaaaatggaaacttccatattctgtttttgaaaagatgtggccattattacagtaattttattataggactttgcctcgtacaattaatagtgatattttggacaaggagttctggtgacaagctatacctaattataagctataaaacaatagatatgagtgtttgtacagtttaactcaatggagatcagaatattctatgtattgagaaaatgtttaatatcaatctataaatcttgaatttctaagaggcttattttgttcttttggctgaatgagtatatttgaattggttgaataattaataattctcattgtaaaaataattatatgccaaaaatatatttgatgttaaatcaaatagatgattctgtttacattgttcatatgaataataatctgtgttaatttcattttgataattggcctttaatatttgtatctctaattttattttctctctgttactgtaaaataatagctataatgtataacaattttcttcagaagaattctatgctattattaaaataaaatatttactgtgt

SEQ ID NO: 6791 - protein, 145 aa, Homo sapiens
MSSPRDFRAEPVNDYEGNDSEAEDLNFRETLPSSSQENTPRSKVFENKVNSEKVKLSLRNFPHNDYEDVFEEPSESGSDPSMWTARGPFRRDRWSSEDEEAAGPSQALSPLLSVQHHGYSGPNERTTFWHGSNEGAVSLLLRYCA

SEQ ID NO: 6792 - DNA, 2161 bp, Homo sapiens
gactcacaggacactaaggctccttttctgaagaagccttttaccagtctcatttaggggatgggaacaacatgtcttcacctagggactttagagcagagcctgtgttttctatttgatcagtttttccccccgcctttgttcagtaaacgattatgagggaaatgactctgaagcagaagacttgaatttcagggagactttgccttcatcaagtcaggaaaacacacctagatcaaaggtttttgaaaataaagttaattcagagaaggtaaaactttctcttcggaatttcccacataatgattatgaggatgtttttgaagagccttcagaaagtggcagtgatcccagcatgtggacagccagaggccccttcagaagagacaggtggagcagtgaggatgaggaggctgcagggccatcacaggctctctcccctctactttctgttcaacatcatggatatagtggcccaaatgagagaacaacgttctggcatggttcaaacgaaggagcagtatcacttttgttacgatattgtgcttgaagttcttcggaaacttctgactttggattaagaaagacttctgttgcctctcacttgaaattaccaagtgggtttgcacctcctcataaagaacatgtttgcactgtgctgaagggctttgctatgcatacaatctgctttcttggtttatcagtttattttctttctaaaagctccctgaagggcaatatcatttggcttggggtgatcagtgtttacttattgatcttgctagacaatatcaaaataacttcccacattttccagtgaaacagatgttacataaaacgattgcagcttggctatttggttgaagggattacagagcccaataaaggatttaaaatatattcattaagattttatttggaaaggtggctggagagagctgaggatttccaggactttgtaagttcttattctgggagaacataaggccaataatcatgacctcttccaggcatttttaagacagatgtctattcatgttctttagctagagcctgtactttttgctggcatttgaataacccagtttaaaaagagtccagttagggtggactaactttggacacaaattggcttccatttcctacattttcatactgctgccttcctacagctgctagaccaagacctgttggtctgggaagcatttcatggatagggagagctcctctcggtgaacagtccaaaactaaaatagatgtttatatagaaagcccaagaggagatttttgccatgcctgagttctttcctatcccaccctaacacttaacatattacttagtctgctttgttaaaagcaagtattacctttaacttgcctcttactctttgccctttagctaactaataaagtttgatataggcattattatataattctgagtcattcatggtatatctcatgtttgatgtatttttcaaactaagatctatgatagttttttttccagagttccattaaatcatttatttcctttactttctcacctctgttgaaacatttagaaactggatttgggaacccaattttggaaaaccagattcatagtcatgaaaatggaaacttccatattctgtttttgaaaagatgtggccattattacagtaattttattataggactttgcctcgtacaattaatagtgatattttggacaaggagttctggtgacaagctatacctaattataagctataaaacaatagatatgagtgtttgtacagtttaactcaatggagatcagaatattctatgtattgagaaaatgtttaatatcaatctataaatcttgaatttctaagaggcttattttgttcttttggctgaatgagtatatttgaattggttgaataattaataattctcattgtaaaaataattatatgccaaaaatatatttgatgttaaatcaaatagatgattctgtttacattgttcatatgaataataatctgtgttaatttcattttgataattggcctttaatatttgtatctctaattttattttctctctgttactgtaaaataatagctataatgtataacaattttcttcagaagaattctatgctattattaaaataaaatatttactgtgt

SEQ ID NO: 6793 - protein, 92 aa, Homo sapiens
MIMRMFLKSLQKVAVIPACGQPEAPSEETGGAVRMRRLQGHHRLSPLYFLFNIMDIVAQMREQRSGMVQTKEQYHFCYDIVLEVLRKLLTLD

SEQ ID NO: 6794 - DNA, 2274 bp, Homo sapiens
tggcctgactcacaggacactaaggctccttttctgaagaagccttttaccagtctcatttaggggatgggaacaacatgtcttcacctagggactttagagcagagcctggtttttgaaaataaagttaattcagagaaggtaaaactttctcttcggaatttcccacataatgattatgaggatgtttttgaagagccttcagaaagtggcagtgatcccagcatgtggacagccagaggccccttcagaagagacaggtggagcagtgaggatgaggaggctgcagggccatcacaggctctctcccctctactttctgatacgcgcaaaattgtttctgaaggagaactagatcagttggctcagattcggccattaatattcaattttcatgagcagacagccatcaaggattgtttgaaaatccttgaggaaaaaacagcagcgtatgatatcatgcaggaatttatggctttagaacttaagaatctgcctggtgagttcaactctgggaatcaaccaagcaacagagaaaaaaacagataccgagatattcttccatttcaacatcatggatatagtggcccaaatgagagaacaacgttctggcatggttcaaacgaaggagcagtatcacttttgttacgatattgtgcttgaagttcttcggaaacttctgactttggattaagaaagacttctgttgcctctcacttgaaattaccaagtgggtttgcacctcctcataaagaacatgtttgcactgtgctgaagggctttgctatgcatacaatctgctttcttggtttatcagtttattttctttctaaaagctccctgaagggcaatatcatttggcttggggtgatcagtgtttacttattgatcttgctagacaatatcaaaataacttcccacattttccagtgaaacagatgttacataaaacgattgcagcttggctatttggttgaagggattacagagcccaataaaggatttaaaatatattcattaagattttatttggaaaggtggctggagagagctgaggatttccaggactttgtaagttcttattctgggagaacataaggccaataatcatgacctcttccaggcatttttaagacagatgtctattcatgttctttagctagagcctgtactttttgctggcatttgaataacccagtttaaaaagagtccagttagggtggactaactttggacacaaattggcttccatttcctacattttcatactgctgccttcctacagctgctagaccaagacctgttggtctgggaagcatttcatggatagggagagctcctctcggtgaacagtccaaaactaaaatagatgtttatatagaaagcccaagaggagatttttgccatgcctgagttctttcctatcccaccctaacacttaacatattacttagtctgctttgttaaaagcaagtattacctttaacttgcctcttactctttgccctttagctaactaataaagtttgatataggcattattatataattctgagtcattcatggtatatctcatgtttgatgtatttttcaaactaagatctatgatagttttttttccagagttccattaaatcatttatttcctttactttctcacctctgttgaaacatttagaaactggatttgggaacccaattttggaaaaccagattcatagtcatgaaaatggaaacttccatattctgtttttgaaaagatgtggccattattacagtaattttattataggactttgcctcgtacaattaatagtgatattttggacaaggagttctggtgacaagctatacctaattataagctataaaacaatagatatgagtgtttgtacagtttaactcaatggagatcagaatattctatgtattgagaaaatgtttaatatcaatctataaatcttgaatttctaagaggcttattttgttcttttggctgaatgagtatatttgaattggttgaataattaataattctcattgtaaaaataattatatgccaaaaatatatttgatgttaaatcaaatagatgattctgtttacattgttcatatgaataataatctgtgttaatttcattttgataattggcctttaatatttgtatctctaattttattttctctctgttactgtaaaataatagctataatgtataacaattttcttcagaagaattctatgctattattaaaataaaatatttactgtgt

SEQ ID NO: 6795 - protein, 198 aa, Homo sapiens
MGTTCLHLGTLEQSLVFENKVNSEKVKLSLRNFPHNDYEDVFEEPSESGSDPSMWTARGPFRRDRWSSEDEEAAGPSQALSPLLSDTRKIVSEGELDQLAQIRPLIFNFHEQTAIKDCLKILEEKTAAYDIMQEFMALELKNLPGEFNSGNQPSNREKNRYRDILPFQHHGYSGPNERTTFWHGSNEGAVSLLLRYCA

SEQ ID NO: 6796 - DNA, 1976 bp, Homo sapiens
ctctgtggtaggggaatgccaccaactccctgaggagcagccgtgtggtatgattggtttttgaaaataaagttaattcagagaaggtaaaactttctcttcggaatttcccacataatgattatgaggatgtttttgaagagccttcagaaagtggcagtgatcccagcatgtggacagccagaggccccttcagaagagacaggtggagcagtgaggatgaggaggctgcagggccatcacaggctctctcccctctactttctgttcaacatcatggatatagtggcccaaatgagagaacaacgttctggcatggttcaaacgaaggagcagtatcacttttgttacgatattgtgcttgaagttcttcggaaacttctgactttggattaagaaagacttctgttgcctctcacttgaaattaccaagtgggtttgcacctcctcataaagaacatgtttgcactgtgctgaagggctttgctatgcatacaatctgctttcttggtttatcagtttattttctttctaaaagctccctgaagggcaatatcatttggcttggggtgatcagtgtttacttattgatcttgctagacaatatcaaaataacttcccacattttccagtgaaacagatgttacataaaacgattgcagcttggctatttggttgaagggattacagagcccaataaaggatttaaaatatattcattaagattttatttggaaaggtggctggagagagctgaggatttccaggactttgtaagttcttattctgggagaacataaggccaataatcatgacctcttccaggcatttttaagacagatgtctattcatgttctttagctagagcctgtactttttgctggcatttgaataacccagtttaaaaagagtccagttagggtggactaactttggacacaaattggcttccatttcctacattttcatactgctgccttcctacagctgctagaccaagacctgttggtctgggaagcatttcatggatagggagagctcctctcggtgaacagtccaaaactaaaatagatgtttatatagaaagcccaagaggagatttttgccatgcctgagttctttcctatcccaccctaacacttaacatattacttagtctgctttgttaaaagcaagtattacctttaacttgcctcttactctttgccctttagctaactaataaagtttgatataggcattattatataattctgagtcattcatggtatatctcatgtttgatgtatttttcaaactaagatctatgatagttttttttccagagttccattaaatcatttatttcctttactttctcacctctgttgaaacatttagaaactggatttgggaacccaattttggaaaaccagattcatagtcatgaaaatggaaacttccatattctgtttttgaaaagatgtggccattattacagtaattttattataggactttgcctcgtacaattaatagtgatattttggacaaggagttctggtgacaagctatacctaattataagctataaaacaatagatatgagtgtttgtacagtttaactcaatggagatcagaatattctatgtattgagaaaatgtttaatatcaatctataaatcttgaatttctaagaggcttattttgttcttttggctgaatgagtatatttgaattggttgaataattaataattctcattgtaaaaataattatatgccaaaaatatatttgatgttaaatcaaatagatgattctgtttacattgttcatatgaataataatctgtgttaatttcattttgataattggcctttaatatttgtatctctaattttattttctctctgttactgtaaaataatagctataatgtataacaattttcttcagaagaattctatgctattattaaaataaaatatttactgtgt

SEQ ID NO: 6797 - protein, 92 aa, Homo sapiens; identical to SEQ ID NO: 6793

SEQ ID NO: 6798 - DNA, 2322 bp, Homo sapiens
ctgtggctctgtggtaggggaatgccaccaactccctgaggagcagccgtgtggtatgattgatgattcaacacgcgttcctcttggaaaaagcaaggactacatcaatgctagttatattagaatagtcaattgtggagaagagtatttttatatcgctactcaaggaccactgctgagcaccatagatgacttttggcaaatggtgttggaaaataattcaaatgttattgccatgataaccagagagatagaaggtggaattatcaaatgctaccattactggcccatttctctgaagaagccattggaattgaaacacttccgtgtattcctggagaactaccagatacttcaatatttcatcattcgaatgtttcaagttgtggagaagtccacgggaactagtcactctgtaaaacagttgcagttcaccaagtggccagaccatggcactcctgcctcagcagatagcttcataaaatatattcgttatgcaaggaagagccaccttacaggacccatggttgttcactgcagtgccggcataggccggacaggggtgttcctatgtgtggatgtcgtgttctgtgccatcgtaaagaactgttcattcaacatcatggatatagtggcccaaatgagagaacaacgttctggcatggttcaaacgaaggagcagtatcacttttgttacgatattgtgcttgaagttcttcggaaacttctgactttggattaagaaagacttctgttgcctctcacttgaaattaccaagtgggtttgcacctcctcataaagaacatgtttgcactgtgctgaagggctttgctatgcatacaatctgctttcttggtttatcagtttattttctttctaaaagctccctgaagggcaatatcatttggcttggggtgatcagtgtttacttattgatcttgctagacaatatcaaaataacttcccacattttccagtgaaacagatgttacataaaacgattgcagcttggctatttggttgaagggattacagagcccaataaaggatttaaaatatattcattaagattttatttggaaaggtggctggagagagctgaggatttccaggactttgtaagttcttattctgggagaacataaggccaataatcatgacctcttccaggcatttttaagacagatgtctattcatgttctttagctagagcctgtactttttgctggcatttgaataacccagtttaaaaagagtccagttagggtggactaactttggacacaaattggcttccatttcctacattttcatactgctgccttcctacagctgctagaccaagacctgttggtctgggaagcatttcatggatagggagagctcctctcggtgaacagtccaaaactaaaatagatgtttatatagaaagcccaagaggagatttttgccatgcctgagttctttcctatcccaccctaacacttaacatattacttagtctgctttgttaaaagcaagtattacctttaacttgcctcttactctttgccctttagctaactaataaagtttgatataggcattattatataattctgagtcattcatggtatatctcatgtttgatgtatttttcaaactaagatctatgatagttttttttccagagttccattaaatcatttatttcctttactttctcacctctgttgaaacatttagaaactggatttgggaacccaattttggaaaaccagattcatagtcatgaaaatggaaacttccatattctgtttttgaaaagatgtggccattattacagtaattttattataggactttgcctcgtacaattaatagtgatattttggacaaggagttctggtgacaagctatacctaattataagctataaaacaatagatatgagtgtttgtacagtttaactcaatggagatcagaatattctatgtattgagaaaatgtttaatatcaatctataaatcttgaatttctaagaggcttattttgttcttttggctgaatgagtatatttgaattggttgaataattaataattctcattgtaaaaataattatatgccaaaaatatatttgatgttaaatcaaatagatgattctgtttacattgttcatatgaataataatctgtgttaatttcattttgataattggcctttaatatttgtatctctaattttattttctctctgttactgtaaaataatagctataatgtataacaattttcttcagaagaattctatgctattattaaaataaaatatttactgtgt

SEQ ID NO: 6799 - protein, 228 aa, Homo sapiens; identical to SEQ ID NO: 733

SEQ ID NO: 6800 - DNA, 2225 bp, Homo sapiens
ctgtggctctgtggtaggggaatgccaccaactccctgaggagcagccgtgtggtatgattggtttttgaaaataaagttaattcagagaaggtaaaactttctcttcggaatttcccacataatgattatgaggatgtttttgaagagccttcagaaagtggcagtgatcccagcatgtggacagccagaggccccttcagaagagacaggtggagcagtgaggatgaggaggctgcagggccatcacaggctctctcccctctactttctgatacgcgcaaaattgtttctgaaggagaactagatcagttggctcagattcggccattaatattcaattttcatgagcagacagccatcaaggattgtttgaaaatccttgaggaaaaaacagcagcgtatgatatcatgcaggaatttatggctttagaacttaagaatctgcctggtgagttcaactctgggaatcaaccaagcaacagagaaaaaaacagataccgagatattcttccatttcaacatcatggatatagtggcccaaatgagagaacaacgttctggcatggttcaaacgaaggagcagtatcacttttgttacgatattgtgcttgaagttcttcggaaacttctgactttggattaagaaagacttctgttgcctctcacttgaaattaccaagtgggtttgcacctcctcataaagaacatgtttgcactgtgctgaagggctttgctatgcatacaatctgctttcttggtttatcagtttattttctttctaaaagctccctgaagggcaatatcatttggcttggggtgatcagtgtttacttattgatcttgctagacaatatcaaaataacttcccacattttccagtgaaacagatgttacataaaacgattgcagcttggctatttggttgaagggattacagagcccaataaaggatttaaaatatattcattaagattttatttggaaaggtggctggagagagctgaggatttccaggactttgtaagttcttattctgggagaacataaggccaataatcatgacctcttccaggcatttttaagacagatgtctattcatgttctttagctagagcctgtactttttgctggcatttgaataacccagtttaaaaagagtccagttagggtggactaactttggacacaaattggcttccatttcctacattttcatactgctgccttcctacagctgctagaccaagacctgttggtctgggaagcatttcatggatagggagagctcctctcggtgaacagtccaaaactaaaatagatgtttatatagaaagcccaagaggagatttttgccatgcctgagttctttcctatcccaccctaacacttaacatattacttagtctgctttgttaaaagcaagtattacctttaacttgcctcttactctttgccctttagctaactaataaagtttgatataggcattattatataattctgagtcattcatggtatatctcatgtttgatgtatttttcaaactaagatctatgatagttttttttccagagttccattaaatcatttatttcctttactttctcacctctgttgaaacatttagaaactggatttgggaacccaattttggaaaaccagattcatagtcatgaaaatggaaacttccatattctgtttttgaaaagatgtggccattattacagtaattttattataggactttgcctcgtacaattaatagtgatattttggacaaggagttctggtgacaagctatacctaattataagctataaaacaatagatatgagtgtttgtacagtttaactcaatggagatcagaatattctatgtattgagaaaatgtttaatatcaatctataaatcttgaatttctaagaggcttattttgttcttttggctgaatgagtatatttgaattggttgaataattaataattctcattgtaaaaataattatatgccaaaaatatatttgatgttaaatcaaatagatgattctgtttacattgttcatatgaataataatctgtgttaatttcattttgataattggcctttaatatttgtatctctaattttattttctctctgttactgtaaaataatagctataatgtataacaattttcttcagaagaattctatgctattattaaaataaaatatttactgtgt

SEQ ID NO: 6801 - protein, 145 aa, Homo sapiens; identical to SEQ ID NO: 741

SEQ ID NO: 6802 - DNA, 2933 bp, Homo sapiens
ctgtggctctgtggtaggggaatgccaccaactccctgaggagcagccgtgtggtatgattggtgaacaaaaattgtttgctggcccccaggatactaactagacctttggcctgactcacaggacactaaggctccttttctgaagaagccttttaccagtctcatttaggggatgggaacaacatgtcttcacctagggactttagagcagagcctggtttttgaaaataaagttaattcagagaaggtaaaactttctcttcggaatttcccacataatgattatgaggatgtttttgaagagccttcagaaagtggcagtgatcccagcatgtggacagccagaggccccttcagaagagacaggtggagcagtgaggatgaggaggctgcagggccatcacaggctctctcccctctactttctgatacgcgcaaaattgtttctgaaggagaactagatcagttggctcagattcggccattaatattcaattttcatgagcagacagccatcaaggattgtttgaaaatccttgaggaaaaaacagcagcgtatgatatcatgcaggaatttatggctttagaacttaagaatctgcctggtgagttcaactctgggaatcaaccaagcaacagagaaaaaaacagataccgagatattcttccatatgattcaacacgcgttcctcttggaaaaagcaaggactacatcaatgctagttatattagaatagtcaattgtggagaagagtatttttatatcgctactcaaggaccactgctgagcaccatagatgacttttggcaaatggtgttggaaaataattcaaatgttattgccatgataaccagagagatagaaggtggaattatcaaatgctaccattactggcccatttctctgaagaagccattggaattgaaacacttccgtgtattcctggagaactaccagatacttcaatatttcatcattcgaatgtttcaagttgtggagaagtccacgggaactagtcactctgtaaaacagttgcagttcaccaagtggccagaccatggcactcctgcctcagcagatagcttcataaaatatattcgttatgcaaggaagagccaccttacaggacccatggttgttcactgcagtgccggcataggccggacaggggtgttcctatgtgtggatgtcgtgttctgtgccatcgtaaagaactgttcattcaacatcatggatatagtggcccaaatgagagaacaacgttctggcatggttcaaacgaaggagcagtatcacttttgttacgatattgtgcttgaagttcttcggaaacttctgactttggattaagaaagacttctgttgcctctcacttgaaattaccaagtgggtttgcacctcctcataaagaacatgtttgcactgtgctgaagggctttgctatgcatacaatctgctttcttggtttatcagtttattttctttctaaaagctccctgaagggcaatatcatttggcttggggtgatcagtgtttacttattgatcttgctagacaatatcaaaataacttcccacattttccagtgaaacagatgttacataaaacgattgcagcttggctatttggttgaagggattacagagcccaataaaggatttaaaatatattcattaagattttatttggaaaggtggctggagagagctgaggatttccaggactttgtaagttcttattctgggagaacataaggccaataatcatgacctcttccaggcatttttaagacagatgtctattcatgttctttagctagagcctgtactttttgctggcatttgaataacccagtttaaaaagagtccagttagggtggactaactttggacacaaattggcttccatttcctacattttcatactgctgccttcctacagctgctagaccaagacctgttggtctgggaagcatttcatggatagggagagctcctctcggtgaacagtccaaaactaaaatagatgtttatatagaaagcccaagaggagatttttgccatgcctgagttctttcctatcccaccctaacacttaacatattacttagtctgctttgttaaaagcaagtattacctttaacttgcctcttactctttgccctttagctaactaataaagtttgatataggcattattatataattctgagtcattcatggtatatctcatgtttgatgtatttttcaaactaagatctatgatagttttttttccagagttccattaaatcatttatttcctttactttctcacctctgttgaaacatttagaaactggatttgggaacccaattttggaaaaccagattcatagtcatgaaaatggaaacttccatattctgtttttgaaaagatgtggccattattacagtaattttattataggactttgcctcgtacaattaatagtgatattttggacaaggagttctggtgacaagctatacctaattataagctataaaacaatagatatgagtgtttgtacagtttaactcaatggagatcagaatattctatgtattgagaaaatgtttaatatcaatctataaatcttgaatttctaagaggcttattttgttcttttggctgaatgagtatatttgaattggttgaataattaataattctcattgtaaaaataattatatgccaaaaatatatttgatgttaaatcaaatagatgattctgtttacattgttcatatgaataataatctgtgttaatttcattttgataattggcctttaatatttgtatctctaattttattttctctctgttactgtaaaataatagctataatgtataacaattttcttcagaagaattctatgctattattaaaataaaatatttactgtgt

SEQ ID NO: 6803 - protein, 392 aa, Homo sapiens
MGTTCLHLGTLEQSLVFENKVNSEKVKLSLRNFPHNDYEDVFEEPSESGSDPSMWTARGPFRRDRWSSEDEEAAGPSQALSPLLSDTRKIVSEGELDQLAQIRPLIFNFHEQTAIKDCLKILEEKTAAYDIMQEFMALELKNLPGEFNSGNQPSNREKNRYRDILPYDSTRVPLGKSKDYINASYIRIVNCGEEYFYIATQGPLLSTIDDFWQMVLENNSNVIAMITREIEGGIIKCYHYWPISLKKPLELKHFRVFLENYQILQYFIIRMFQVVEKSTGTSHSVKQLQFTKWPDHGTPASADSFIKYIRYARKSHLTGPMVVHCSAGIGRTGVFLCVDVVFCAIVKNCSFNIMDIVAQMREQRSGMVQTKEQYHFCYDIVLEVLRKLLTLD

SEQ ID NO: 6804 - DNA, 2350 bp, Homo sapiens
ctgtggctctgtggtaggggaatgccaccaactccctgaggagcagccgtgtggtatgattggtttttgaaaataaagttaattcagagaaggtaaaactttctcttcggaatttcccacataatgattatgaggatgtttttgaagagccttcagaaagtggcagtgatcccagcatgtggacagccagaggccccttcagaagagacaggtggagcagtgaggatgaggaggctgcagggccatcacaggctctctcccctctactttctgatacgcgcaaaattgtttctgaaggagaactagatcagttggctcagattcggccattaatattcaattttcatgagcagacagccatcaaggattgtttgaaaatccttgaggaaaaaacagcagcgtatgatatcatgcaggaatttatgacgggaactagtcactctgtaaaacagttgcagttcaccaagtggccagaccatggcactcctgcctcagcagatagcttcataaaatatattcgttatgcaaggaagagccaccttacaggacccatggttgttcactgcagtgccggcataggccggacaggggtgttcctatgtgtggatgtcgtgttctgtgccatcgtaaagaactgttcattcaacatcatggatatagtggcccaaatgagagaacaacgttctggcatggttcaaacgaaggagcagtatcacttttgttacgatattgtgcttgaagttcttcggaaacttctgactttggattaagaaagacttctgttgcctctcacttgaaattaccaagtgggtttgcacctcctcataaagaacatgtttgcactgtgctgaagggctttgctatgcatacaatctgctttcttggtttatcagtttattttctttctaaaagctccctgaagggcaatatcatttggcttggggtgatcagtgtttacttattgatcttgctagacaatatcaaaataacttcccacattttccagtgaaacagatgttacataaaacgattgcagcttggctatttggttgaagggattacagagcccaataaaggatttaaaatatattcattaagattttatttggaaaggtggctggagagagctgaggatttccaggactttgtaagttcttattctgggagaacataaggccaataatcatgacctcttccaggcatttttaagacagatgtctattcatgttctttagctagagcctgtactttttgctggcatttgaataacccagtttaaaaagagtccagttagggtggactaactttggacacaaattggcttccatttcctacattttcatactgctgccttcctacagctgctagaccaagacctgttggtctgggaagcatttcatggatagggagagctcctctcggtgaacagtccaaaactaaaatagatgtttatatagaaagcccaagaggagatttttgccatgcctgagttctttcctatcccaccctaacacttaacatattacttagtctgctttgttaaaagcaagtattacctttaacttgcctcttactctttgccctttagctaactaataaagtttgatataggcattattatataattctgagtcattcatggtatatctcatgtttgatgtatttttcaaactaagatctatgatagttttttttccagagttccattaaatcatttatttcctttactttctcacctctgttgaaacatttagaaactggatttgggaacccaattttggaaaaccagattcatagtcatgaaaatggaaacttccatattctgtttttgaaaagatgtggccattattacagtaattttattataggactttgcctcgtacaattaatagtgatattttggacaaggagttctggtgacaagctatacctaattataagctataaaacaatagatatgagtgtttgtacagtttaactcaatggagatcagaatattctatgtattgagaaaatgtttaatatcaatctataaatcttgaatttctaagaggcttattttgttcttttggctgaatgagtatatttgaattggttgaataattaataattctcattgtaaaaataattatatgccaaaaatatatttgatgttaaatcaaatagatgattctgtttacattgttcatatgaataataatctgtgttaatttcattttgataattggcctttaatatttgtatctctaattttattttctctctgttactgtaaaataatagctataatgtataacaattttcttcagaagaattctatgctattattaaaataaaatatttactgtgt

SEQ ID NO: 6805 - protein, 197 aa, Homo sapiens
MWTARGPFRRDRWSSEDEEAAGPSQALSPLLSDTRKIVSEGELDQLAQIRPLIFNFHEQTAIKDCLKILEEKTAAYDIMQEFMTGTSHSVKQLQFTKWPDHGTPASADSFIKYIRYARKSHLTGPMVVHCSAGIGRTGVFLCVDVVFCAIVKNCSFNIMDIVAQMREQRSGMVQTKEQYHFCYDIVLEVLRKLLTLD

SEQ ID NO: 6806 - DNA, 2386 bp, Homo sapiens
ctgtggctctgtggtaggggaatgccaccaactccctgaggagcagccgtgtggtatgattggtgaacaaaaattgtttgctggcccccaggatactaactagacctttggcctgactcacaggacactaaggctccttttctgaagaagccttttaccagtctcatttaggggatgggaacaacatgtcttcacctagggactttagagcagagcctgtaaacgattatgagggaaatgactctgaagcagaagacttgaatttcagggagactttgccttcatcaagtcaggaaaacacacctagatcaaaggtttttgaaaataaagttaattcagagaaggtaaaactttctcttcggaatttcccacataatgattatgaggatgtttttgaagagccttcagaaagtggcagtgatcccagcatgtggacagccagaggccccttcagaagagacaggtggagcagtgaggatgaggaggctgcagggccatcacaggctctctcccctctactttctgatacgcgcaaaattgtttctgaaggagaactagatcagttggctcagattcggccattaatattcaattttcatgagcagacagccatcaaggattgtttgaaaatccttgaggaaaaaacagcagcgtatgatatcatgcaggaatttatgttcaacatcatggatatagtggcccaaatgagagaacaacgttctggcatggttcaaacgaaggagcagtatcacttttgttacgatattgtgcttgaagttcttcggaaacttctgactttggattaagaaagacttctgttgcctctcacttgaaattaccaagtgggtttgcacctcctcataaagaacatgtttgcactgtgctgaagggctttgctatgcatacaatctgctttcttggtttatcagtttattttctttctaaaagctccctgaagggcaatatcatttggcttggggtgatcagtgtttacttattgatcttgctagacaatatcaaaataacttcccacattttccagtgaaacagatgttacataaaacgattgcagcttggctatttggttgaagggattacagagcccaataaaggatttaaaatatattcattaagattttatttggaaaggtggctggagagagctgaggatttccaggactttgtaagttcttattctgggagaacataaggccaataatcatgacctcttccaggcatttttaagacagatgtctattcatgttctttagctagagcctgtactttttgctggcatttgaataacccagtttaaaaagagtccagttagggtggactaactttggacacaaattggcttccatttcctacattttcatactgctgccttcctacagctgctagaccaagacctgttggtctgggaagcatttcatggatagggagagctcctctcggtgaacagtccaaaactaaaatagatgtttatatagaaagcccaagaggagatttttgccatgcctgagttctttcctatcccaccctaacacttaacatattacttagtctgctttgttaaaagcaagtattacctttaacttgcctcttactctttgccctttagctaactaataaagtttgatataggcattattatataattctgagtcattcatggtatatctcatgtttgatgtatttttcaaactaagatctatgatagttttttttccagagttccattaaatcatttatttcctttactttctcacctctgttgaaacatttagaaactggatttgggaacccaattttggaaaaccagattcatagtcatgaaaatggaaacttccatattctgtttttgaaaagatgtggccattattacagtaattttattataggactttgcctcgtacaattaatagtgatattttggacaaggagttctggtgacaagctatacctaattataagctataaaacaatagatatgagtgtttgtacagtttaactcaatggagatcagaatattctatgtattgagaaaatgtttaatatcaatctataaatcttgaatttctaagaggcttattttgttcttttggctgaatgagtatatttgaattggttgaataattaataattctcattgtaaaaataattatatgccaaaaatatatttgatgttaaatcaaatagatgattctgtttacattgttcatatgaataataatctgtgttaatttcattttgataattggcctttaatatttgtatctctaattttattttctctctgttactgtaaaataatagctataatgtataacaattttcttcagaagaattctatgctattattaaaataaaatatttactgtgt

SEQ ID NO: 6807 - protein, 206 aa, Homo sapiens
MSSPRDFRAEPVNDYEGNDSEAEDLNFRETLPSSSQENTPRSKVFENKVNSEKVKLSLRNFPHNDYEDVFEEPSESGSDPSMWTARGPFRRDRWSSEDEEAAGPSQALSPLLSDTRKIVSEGELDQLAQIRPLIFNFHEQTAIKDCLKILEEKTAAYDIMQEFMFNIMDIVAQMREQRSGMVQTKEQYHFCYDIVLEVLRKLLTLD

SEQ ID NO: 6808 - DNA, 2118 bp, Homo sapiens
ctgtggctctgtggtaggggaatgccaccaactccctgaggagcagccgtgtggtatgattgtgttttctatttgatcagtttttccccccgcctttgttcagtaaacgattatgagggaaatgactctgaagcagaagacttgaatttcagggagactttgccttcatcaagtcaggaaaacacacctagatcaaaggtttttgaaaataaagttaattcagagaaggtaaaactttctcttcggaatttcccacataatgattatgaggatgtttttgaagagccttcagaaagtggcagtgatcccagcatgtggacagccagaggccccttcagaagagacaggtggagcagtgaggatgaggaggctgcagggccatcacaggctctctcccctctactttctgttcaacatcatggatatagtggcccaaatgagagaacaacgttctggcatggttcaaacgaaggagcagtatcacttttgttacgatattgtgcttgaagttcttcggaaacttctgactttggattaagaaagacttctgttgcctctcacttgaaattaccaagtgggtttgcacctcctcataaagaacatgtttgcactgtgctgaagggctttgctatgcatacaatctgctttcttggtttatcagtttattttctttctaaaagctccctgaagggcaatatcatttggcttggggtgatcagtgtttacttattgatcttgctagacaatatcaaaataacttcccacattttccagtgaaacagatgttacataaaacgattgcagcttggctatttggttgaagggattacagagcccaataaaggatttaaaatatattcattaagattttatttggaaaggtggctggagagagctgaggatttccaggactttgtaagttcttattctgggagaacataaggccaataatcatgacctcttccaggcatttttaagacagatgtctattcatgttctttagctagagcctgtactttttgctggcatttgaataacccagtttaaaaagagtccagttagggtggactaactttggacacaaattggcttccatttcctacattttcatactgctgccttcctacagctgctagaccaagacctgttggtctgggaagcatttcatggatagggagagctcctctcggtgaacagtccaaaactaaaatagatgtttatatagaaagcccaagaggagatttttgccatgcctgagttctttcctatcccaccctaacacttaacatattacttagtctgctttgttaaaagcaagtattacctttaacttgcctcttactctttgccctttagctaactaataaagtttgatataggcattattatataattctgagtcattcatggtatatctcatgtttgatgtatttttcaaactaagatctatgatagttttttttccagagttccattaaatcatttatttcctttactttctcacctctgttgaaacatttagaaactggatttgggaacccaattttggaaaaccagattcatagtcatgaaaatggaaacttccatattctgtttttgaaaagatgtggccattattacagtaattttattataggactttgcctcgtacaattaatagtgatattttggacaaggagttctggtgacaagctatacctaattataagctataaaacaatagatatgagtgtttgtacagtttaactcaatggagatcagaatattctatgtattgagaaaatgtttaatatcaatctataaatcttgaatttctaagaggcttattttgttcttttggctgaatgagtatatttgaattggttgaataattaataattctcattgtaaaaataattatatgccaaaaatatatttgatgttaaatcaaatagatgattctgtttacattgttcatatgaataataatctgtgttaatttcattttgataattggcctttaatatttgtatctctaattttattttctctctgttactgtaaaataatagctataatgtataacaattttcttcagaagaattctatgctattattaaaataaaatatttactgtgt

SEQ ID NO: 6809 - protein, 92 aa, Homo sapiens; identical to SEQ ID NO: 6793

SEQ ID NO: 6810 - DNA, 2477 bp, Homo sapiens
ctgtggctctgtggtaggggaatgccaccaactccctgaggagcagccgtgtggtatgattggtgaacaaaaattgtttgctggcccccaggatactaactagacctttggcctgactcacaggacactaaggctccttttctgaagaagccttttaccagtctcatttaggggatgggaacaacatgtcttcacctagggactttagagcagagcctgtaaacgattatgagggaaatgactctgaagcagaagacttgaatttcagggagactttgccttcatcaagtcaggaaaacacacctagatcaaaggtttttgaaaataaagttaattcagagaaggtaaaactttctcttcggaatttcccacataatgattatgaggatgtttttgaagagccttcagaaagtggcagtgatcccagcatgtggacagccagaggccccttcagaagagacaggtggagcagtgaggatgaggaggctgcagggccatcacaggctctctcccctctactttctgatacgcgcaaaattgtttctgaaggagaactagatcagttggctcagattcggccattaatattcaattttcatgagcagacagccatcaaggattgtttgaaaatccttgaggaaaaaacagcagcgtatgatatcatgcaggaatttatggctttagaacttaagaatctgcctggtgagttcaactctgggaatcaaccaagcaacagagaaaaaaacagataccgagatattcttccatttcaacatcatggatatagtggcccaaatgagagaacaacgttctggcatggttcaaacgaaggagcagtatcacttttgttacgatattgtgcttgaagttcttcggaaacttctgactttggattaagaaagacttctgttgcctctcacttgaaattaccaagtgggtttgcacctcctcataaagaacatgtttgcactgtgctgaagggctttgctatgcatacaatctgctttcttggtttatcagtttattttctttctaaaagctccctgaagggcaatatcatttggcttggggtgatcagtgtttacttattgatcttgctagacaatatcaaaataacttcccacattttccagtgaaacagatgttacataaaacgattgcagcttggctatttggttgaagggattacagagcccaataaaggatttaaaatatattcattaagattttatttggaaaggtggctggagagagctgaggatttccaggactttgtaagttcttattctgggagaacataaggccaataatcatgacctcttccaggcatttttaagacagatgtctattcatgttctttagctagagcctgtactttttgctggcatttgaataacccagtttaaaaagagtccagttagggtggactaactttggacacaaattggcttccatttcctacattttcatactgctgccttcctacagctgctagaccaagacctgttggtctgggaagcatttcatggatagggagagctcctctcggtgaacagtccaaaactaaaatagatgtttatatagaaagcccaagaggagatttttgccatgcctgagttctttcctatcccaccctaacacttaacatattacttagtctgctttgttaaaagcaagtattacctttaacttgcctcttactctttgccctttagctaactaataaagtttgatataggcattattatataattctgagtcattcatggtatatctcatgtttgatgtatttttcaaactaagatctatgatagttttttttccagagttccattaaatcatttatttcctttactttctcacctctgttgaaacatttagaaactggatttgggaacccaattttggaaaaccagattcatagtcatgaaaatggaaacttccatattctgtttttgaaaagatgtggccattattacagtaattttattataggactttgcctcgtacaattaatagtgatattttggacaaggagttctggtgacaagctatacctaattataagctataaaacaatagatatgagtgtttgtacagtttaactcaatggagatcagaatattctatgtattgagaaaatgtttaatatcaatctataaatcttgaatttctaagaggcttattttgttcttttggctgaatgagtatatttgaattggttgaataattaataattctcattgtaaaaataattatatgccaaaaatatatttgatgttaaatcaaatagatgattctgtttacattgttcatatgaataataatctgtgttaatttcattttgataattggcctttaatatttgtatctctaattttattttctctctgttactgtaaaataatagctataatgtataacaattttcttcagaagaattctatgctattattaaaataaaatatttactgtgt

SEQ ID NO: 6811 - protein, 226 aa, Homo sapiens; identical to SEQ ID NO: 725

SEQ ID NO: 6812 - DNA, 2136 bp, Homo sapiens
ccagctgcactgtgacgcgtgttggggcgcctatgcgagacgggaccgggacaggaaccctgtggctctgtggtaggggaatgccaccaactccctgaggagcagccgtgtggtatgattgtaaacgattatgagggaaatgactctgaagcagaagacttgaatttcagggagactttgccttcatcaagtcaggaaaacacacctagatcaaaggtttttgaaaataaagttaattcagagaaggtaaaactttctcttcggaatttcccacataatgattatgaggatgtttttgaagagccttcagaaagtggcagtgatcccagcatgtggacagccagaggccccttcagaagagacaggtggagcagtgaggatgaggaggctgcagggccatcacaggctctctcccctctactttctgttcaacatcatggatatagtggcccaaatgagagaacaacgttctggcatggttcaaacgaaggagcagtatcacttttgttacgatattgtgcttgaagttcttcggaaacttctgactttggattaagaaagacttctgttgcctctcacttgaaattaccaagtgggtttgcacctcctcataaagaacatgtttgcactgtgctgaagggctttgctatgcatacaatctgctttcttggtttatcagtttattttctttctaaaagctccctgaagggcaatatcatttggcttggggtgatcagtgtttacttattgatcttgctagacaatatcaaaataacttcccacattttccagtgaaacagatgttacataaaacgattgcagcttggctatttggttgaagggattacagagcccaataaaggatttaaaatatattcattaagattttatttggaaaggtggctggagagagctgaggatttccaggactttgtaagttcttattctgggagaacataaggccaataatcatgacctcttccaggcatttttaagacagatgtctattcatgttctttagctagagcctgtactttttgctggcatttgaataacccagtttaaaaagagtccagttagggtggactaactttggacacaaattggcttccatttcctacattttcatactgctgccttcctacagctgctagaccaagacctgttggtctgggaagcatttcatggatagggagagctcctctcggtgaacagtccaaaactaaaatagatgtttatatagaaagcccaagaggagatttttgccatgcctgagttctttcctatcccaccctaacacttaacatattacttagtctgctttgttaaaagcaagtattacctttaacttgcctcttactctttgccctttagctaactaataaagtttgatataggcattattatataattctgagtcattcatggtatatctcatgtttgatgtatttttcaaactaagatctatgatagttttttttccagagttccattaaatcatttatttcctttactttctcacctctgttgaaacatttagaaactggatttgggaacccaattttggaaaaccagattcatagtcatgaaaatggaaacttccatattctgtttttgaaaagatgtggccattattacagtaattttattataggactttgcctcgtacaattaatagtgatattttggacaaggagttctggtgacaagctatacctaattataagctataaaacaatagatatgagtgtttgtacagtttaactcaatggagatcagaatattctatgtattgagaaaatgtttaatatcaatctataaatcttgaatttctaagaggcttattttgttcttttggctgaatgagtatatttgaattggttgaataattaataattctcattgtaaaaataattatatgccaaaaatatatttgatgttaaatcaaatagatgattctgtttacattgttcatatgaataataatctgtgttaatttcattttgataattggcctttaatatttgtatctctaattttattttctctctgttactgtaaaataatagctataatgtataacaattttcttcagaagaattctatgctattattaaaataaaatatttactgtgt

SEQ ID NO: 6813 - protein, 136 aa, Homo sapiens; identical to SEQ ID NO: 737

SEQ ID NO: 6814 - DNA, 2504 bp, Homo sapiens
ccagctgcactgtgacgcgtgttggggcgcctatgcgagacgggaccgggacaggaaccctgtggctctgtggtaggggaatgccaccaactccctgaggagcagccgtgtggtatgattgtaaacgattatgagggaaatgactctgaagcagaagacttgaatttcagggagactttgccttcatcaagtcaggaaaacacacctagatcaaaggtttttgaaaataaagttaattcagagaaggtaaaactttctcttcggaatttcccacataatgattatgaggatgtttttgaagagccttcagaaagtggcagtgatcccagcatgtggacagccagaggccccttcagaagagacaggtggagcagtgaggatgaggaggctgcagggccatcacaggctctctcccctctactttctgatacgcgcaaaattgtttctgaaggagaactagatcagttggctcagattcggccattaatattcaattttcatgagcagacagccatcaaggattgtttgaaaatccttgaggaaaaaacagcagcgtatgatatcatgcaggaatttatgacgggaactagtcactctgtaaaacagttgcagttcaccaagtggccagaccatggcactcctgcctcagcagatagcttcataaaatatattcgttatgcaaggaagagccaccttacaggacccatggttgttcactgcagtgccggcataggccggacaggggtgttcctatgtgtggatgtcgtgttctgtgccatcgtaaagaactgttcattcaacatcatggatatagtggcccaaatgagagaacaacgttctggcatggttcaaacgaaggagcagtatcacttttgttacgatattgtgcttgaagttcttcggaaacttctgactttggattaagaaagacttctgttgcctctcacttgaaattaccaagtgggtttgcacctcctcataaagaacatgtttgcactgtgctgaagggctttgctatgcatacaatctgctttcttggtttatcagtttattttctttctaaaagctccctgaagggcaatatcatttggcttggggtgatcagtgtttacttattgatcttgctagacaatatcaaaataacttcccacattttccagtgaaacagatgttacataaaacgattgcagcttggctatttggttgaagggattacagagcccaataaaggatttaaaatatattcattaagattttatttggaaaggtggctggagagagctgaggatttccaggactttgtaagttcttattctgggagaacataaggccaataatcatgacctcttccaggcatttttaagacagatgtctattcatgttctttagctagagcctgtactttttgctggcatttgaataacccagtttaaaaagagtccagttagggtggactaactttggacacaaattggcttccatttcctacattttcatactgctgccttcctacagctgctagaccaagacctgttggtctgggaagcatttcatggatagggagagctcctctcggtgaacagtccaaaactaaaatagatgtttatatagaaagcccaagaggagatttttgccatgcctgagttctttcctatcccaccctaacacttaacatattacttagtctgctttgttaaaagcaagtattacctttaacttgcctcttactctttgccctttagctaactaataaagtttgatataggcattattatataattctgagtcattcatggtatatctcatgtttgatgtatttttcaaactaagatctatgatagttttttttccagagttccattaaatcatttatttcctttactttctcacctctgttgaaacatttagaaactggatttgggaacccaattttggaaaaccagattcatagtcatgaaaatggaaacttccatattctgtttttgaaaagatgtggccattattacagtaattttattataggactttgcctcgtacaattaatagtgatattttggacaaggagttctggtgacaagctatacctaattataagctataaaacaatagatatgagtgtttgtacagtttaactcaatggagatcagaatattctatgtattgagaaaatgtttaatatcaatctataaatcttgaatttctaagaggcttattttgttcttttggctgaatgagtatatttgaattggttgaataattaataattctcattgtaaaaataattatatgccaaaaatatatttgatgttaaatcaaatagatgattctgtttacattgttcatatgaataataatctgtgttaatttcattttgataattggcctttaatatttgtatctctaattttattttctctctgttactgtaaaataatagctataatgtataacaattttcttcagaagaattctatgctattattaaaataaaatatttactgtgt

SEQ ID NO: 6815 - protein, 269 aa, Homo sapiens; identical to SEQ ID NO: 731

SEQ ID NO: 6816 - DNA, 2930 bp, Homo sapiens
ccagctgcactgtgacgcgtgttggggcgcctatgcgagacgggaccgggacaggaaccctgtggctctgtggtaggggaatgccaccaactccctgaggagcagccgtgtggtatgattgtaaacgattatgagggaaatgactctgaagcagaagacttgaatttcagggagactttgccttcatcaagtcaggaaaacacacctagatcaaaggtttttgaaaataaagttaattcagagaaggtaaaactttctcttcggaatttcccacataatgattatgaggatgtttttgaagagccttcagaaagtggcagtgatcccagcatgtggacagccagaggccccttcagaagagacaggtggagcagtgaggatgaggaggctgcagggccatcacaggctctctcccctctactttctgatacgcgcaaaattgtttctgaaggagaactagatcagttggctcagattcggccattaatattcaattttcatgagcagacagccatcaaggattgtttgaaaatccttgaggaaaaaacagcagcgtatgatatcatgcaggaatttatggctttagaacttaagaatctgcctggtgagttcaactctgggaatcaaccaagcaacagagaaaaaaacagataccgagatattcttccatatgattcaacacgcgttcctcttggaaaaagcaaggactacatcaatgctagttatattagaatagtcaattgtggagaagagtatttttatatcgctactcaaggaccactgctgagcaccatagatgacttttggcaaatggtgttggaaaataattcaaatgttattgccatgataaccagagagatagaaggtggaattatcaaatgctaccattactggcccatttctctgaagaagccattggaattgaaacacttccgtgtattcctggagaactaccagatacttcaatatttcatcattcgaatgtttcaagttgtggagaagtccacgggaactagtcactctgtaaaacagttgcagttcaccaagtggccagaccatggcactcctgcctcagcagatagcttcataaaatatattcgttatgcaaggaagagccaccttacaggacccatggttgttcactgcagtgccggcataggccggacaggggtgttcctatgtgtggatgtcgtgttctgtgccatcgtaaagaactgttcattcaacatcatggatatagtggcccaaatgagagaacaacgttctggcatggttcaaacgaaggagcagtatcacttttgttacgatattgtgcttgaagttcttcggaaacttctgactttggattaagaaagacttctgttgcctctcacttgaaattaccaagtgggtttgcacctcctcataaagaacatgtttgcactgtgctgaagggctttgctatgcatacaatctgctttcttggtttatcagtttattttctttctaaaagctccctgaagggcaatatcatttggcttggggtgatcagtgtttacttattgatcttgctagacaatatcaaaataacttcccacattttccagtgaaacagatgttacataaaacgattgcagcttggctatttggttgaagggattacagagcccaataaaggatttaaaatatattcattaagattttatttggaaaggtggctggagagagctgaggatttccaggactttgtaagttcttattctgggagaacataaggccaataatcatgacctcttccaggcatttttaagacagatgtctattcatgttctttagctagagcctgtactttttgctggcatttgaataacccagtttaaaaagagtccagttagggtggactaactttggacacaaattggcttccatttcctacattttcatactgctgccttcctacagctgctagaccaagacctgttggtctgggaagcatttcatggatagggagagctcctctcggtgaacagtccaaaactaaaatagatgtttatatagaaagcccaagaggagatttttgccatgcctgagttctttcctatcccaccctaacacttaacatattacttagtctgctttgttaaaagcaagtattacctttaacttgcctcttactctttgccctttagctaactaataaagtttgatataggcattattatataattctgagtcattcatggtatatctcatgtttgatgtatttttcaaactaagatctatgatagttttttttccagagttccattaaatcatttatttcctttactttctcacctctgttgaaacatttagaaactggatttgggaacccaattttggaaaaccagattcatagtcatgaaaatggaaacttccatattctgtttttgaaaagatgtggccattattacagtaattttattataggactttgcctcgtacaattaatagtgatattttggacaaggagttctggtgacaagctatacctaattataagctataaaacaatagatatgagtgtttgtacagtttaactcaatggagatcagaatattctatgtattgagaaaatgtttaatatcaatctataaatcttgaatttctaagaggcttattttgttcttttggctgaatgagtatatttgaattggttgaataattaataattctcattgtaaaaataattatatgccaaaaatatatttgatgttaaatcaaatagatgattctgtttacattgttcatatgaataataatctgtgttaatttcattttgataattggcctttaatatttgtatctctaattttattttctctctgttactgtaaaataatagctataatgtataacaattttcttcagaagaattctatgctattattaaaataaaatatttactgtgt

SEQ ID NO: 6817 - protein, 411 aa, Homo sapiens; identical to SEQ ID NO: 729

SEQ ID NO: 6818 - DNA, 2379 bp, Homo sapiens
ccagctgcactgtgacgcgtgttggggcgcctatgcgagacgggaccgggacaggaaccctgtggctctgtggtaggggaatgccaccaactccctgaggagcagccgtgtggtatgattgtaaacgattatgagggaaatgactctgaagcagaagacttgaatttcagggagactttgccttcatcaagtcaggaaaacacacctagatcaaaggtttttgaaaataaagttaattcagagaaggtaaaactttctcttcggaatttcccacataatgattatgaggatgtttttgaagagccttcagaaagtggcagtgatcccagcatgtggacagccagaggccccttcagaagagacaggtggagcagtgaggatgaggaggctgcagggccatcacaggctctctcccctctactttctgatacgcgcaaaattgtttctgaaggagaactagatcagttggctcagattcggccattaatattcaattttcatgagcagacagccatcaaggattgtttgaaaatccttgaggaaaaaacagcagcgtatgatatcatgcaggaatttatggctttagaacttaagaatctgcctggtgagttcaactctgggaatcaaccaagcaacagagaaaaaaacagataccgagatattcttccatttcaacatcatggatatagtggcccaaatgagagaacaacgttctggcatggttcaaacgaaggagcagtatcacttttgttacgatattgtgcttgaagttcttcggaaacttctgactttggattaagaaagacttctgttgcctctcacttgaaattaccaagtgggtttgcacctcctcataaagaacatgtttgcactgtgctgaagggctttgctatgcatacaatctgctttcttggtttatcagtttattttctttctaaaagctccctgaagggcaatatcatttggcttggggtgatcagtgtttacttattgatcttgctagacaatatcaaaataacttcccacattttccagtgaaacagatgttacataaaacgattgcagcttggctatttggttgaagggattacagagcccaataaaggatttaaaatatattcattaagattttatttggaaaggtggctggagagagctgaggatttccaggactttgtaagttcttattctgggagaacataaggccaataatcatgacctcttccaggcatttttaagacagatgtctattcatgttctttagctagagcctgtactttttgctggcatttgaataacccagtttaaaaagagtccagttagggtggactaactttggacacaaattggcttccatttcctacattttcatactgctgccttcctacagctgctagaccaagacctgttggtctgggaagcatttcatggatagggagagctcctctcggtgaacagtccaaaactaaaatagatgtttatatagaaagcccaagaggagatttttgccatgcctgagttctttcctatcccaccctaacacttaacatattacttagtctgctttgttaaaagcaagtattacctttaacttgcctcttactctttgccctttagctaactaataaagtttgatataggcattattatataattctgagtcattcatggtatatctcatgtttgatgtatttttcaaactaagatctatgatagttttttttccagagttccattaaatcatttatttcctttactttctcacctctgttgaaacatttagaaactggatttgggaacccaattttggaaaaccagattcatagtcatgaaaatggaaacttccatattctgtttttgaaaagatgtggccattattacagtaattttattataggactttgcctcgtacaattaatagtgatattttggacaaggagttctggtgacaagctatacctaattataagctataaaacaatagatatgagtgtttgtacagtttaactcaatggagatcagaatattctatgtattgagaaaatgtttaatatcaatctataaatcttgaatttctaagaggcttattttgttcttttggctgaatgagtatatttgaattggttgaataattaataattctcattgtaaaaataattatatgccaaaaatatatttgatgttaaatcaaatagatgattctgtttacattgttcatatgaataataatctgtgttaatttcattttgataattggcctttaatatttgtatctctaattttattttctctctgttactgtaaaataatagctataatgtataacaattttcttcagaagaattctatgctattattaaaataaaatatttactgtgt

SEQ ID NO: 6819 - protein, 217 aa, Homo sapiens; identical to SEQ ID NO: 735

SEQ ID NO: 6820 - DNA, 2477 bp, Homo sapiens
gacccaactggcgaggctgctggggttgcagcgggacagttggggcggccccgcaggcccaggtgaacaaaaattgtttgctggcccccaggatactaactagacctttggcctgactcacaggacactaaggctccttttctgaagaagccttttaccagtctcatttaggggatgggaacaacatgtcttcacctagggactttagagcagagcctgtaaacgattatgagggaaatgactctgaagcagaagacttgaatttcagggagactttgccttcatcaagtcaggaaaacacacctagatcaaaggtttttgaaaataaagttaattcagagaaggtaaaactttctcttcggaatttcccacataatgattatgaggatgtttttgaagagccttcagaaagtggcagtgatcccagcatgtggacagccagaggccccttcagaagagacaggtggagcagtgaggatgaggaggctgcagggccatcacaggctctctcccctctactttctgatacgcgcaaaattgtttctgaaggagaactagatcagttggctcagattcggccattaatattcaattttcatgagcagacagccatcaaggattgtttgaaaatccttgaggaaaaaacagcagcgtatgatatcatgcaggaatttatggctttagaacttaagaatctgcctggtgagttcaactctgggaatcaaccaagcaacagagaaaaaaacagataccgagatattcttccatttcaacatcatggatatagtggcccaaatgagagaacaacgttctggcatggttcaaacgaaggagcagtatcacttttgttacgatattgtgcttgaagttcttcggaaacttctgactttggattaagaaagacttctgttgcctctcacttgaaattaccaagtgggtttgcacctcctcataaagaacatgtttgcactgtgctgaagggctttgctatgcatacaatctgctttcttggtttatcagtttattttctttctaaaagctccctgaagggcaatatcatttggcttggggtgatcagtgtttacttattgatcttgctagacaatatcaaaataacttcccacattttccagtgaaacagatgttacataaaacgattgcagcttggctatttggttgaagggattacagagcccaataaaggatttaaaatatattcattaagattttatttggaaaggtggctggagagagctgaggatttccaggactttgtaagttcttattctgggagaacataaggccaataatcatgacctcttccaggcatttttaagacagatgtctattcatgttctttagctagagcctgtactttttgctggcatttgaataacccagtttaaaaagagtccagttagggtggactaactttggacacaaattggcttccatttcctacattttcatactgctgccttcctacagctgctagaccaagacctgttggtctgggaagcatttcatggatagggagagctcctctcggtgaacagtccaaaactaaaatagatgtttatatagaaagcccaagaggagatttttgccatgcctgagttctttcctatcccaccctaacacttaacatattacttagtctgctttgttaaaagcaagtattacctttaacttgcctcttactctttgccctttagctaactaataaagtttgatataggcattattatataattctgagtcattcatggtatatctcatgtttgatgtatttttcaaactaagatctatgatagttttttttccagagttccattaaatcatttatttcctttactttctcacctctgttgaaacatttagaaactggatttgggaacccaattttggaaaaccagattcatagtcatgaaaatggaaacttccatattctgtttttgaaaagatgtggccattattacagtaattttattataggactttgcctcgtacaattaatagtgatattttggacaaggagttctggtgacaagctatacctaattataagctataaaacaatagatatgagtgtttgtacagtttaactcaatggagatcagaatattctatgtattgagaaaatgtttaatatcaatctataaatcttgaatttctaagaggcttattttgttcttttggctgaatgagtatatttgaattggttgaataattaataattctcattgtaaaaataattatatgccaaaaatatatttgatgttaaatcaaatagatgattctgtttacattgttcatatgaataataatctgtgttaatttcattttgataattggcctttaatatttgtatctctaattttattttctctctgttactgtaaaataatagctataatgtataacaattttcttcagaagaattctatgctattattaaaataaaatatttactgtgt

SEQ ID NO: 6821 - protein, 226 aa, Homo sapiens; identical to SEQ ID NO: 725

SEQ ID NO: 6822 - DNA, 2386 bp, Homo sapiens
gacccaactggcgaggctgctggggttgcagcgggacagttggggcggccccgcaggcccaggtgaacaaaaattgtttgctggcccccaggatactaactagacctttggcctgactcacaggacactaaggctccttttctgaagaagccttttaccagtctcatttaggggatgggaacaacatgtcttcacctagggactttagagcagagcctgtaaacgattatgagggaaatgactctgaagcagaagacttgaatttcagggagactttgccttcatcaagtcaggaaaacacacctagatcaaaggtttttgaaaataaagttaattcagagaaggtaaaactttctcttcggaatttcccacataatgattatgaggatgtttttgaagagccttcagaaagtggcagtgatcccagcatgtggacagccagaggccccttcagaagagacaggtggagcagtgaggatgaggaggctgcagggccatcacaggctctctcccctctactttctgatacgcgcaaaattgtttctgaaggagaactagatcagttggctcagattcggccattaatattcaattttcatgagcagacagccatcaaggattgtttgaaaatccttgaggaaaaaacagcagcgtatgatatcatgcaggaatttatgttcaacatcatggatatagtggcccaaatgagagaacaacgttctggcatggttcaaacgaaggagcagtatcacttttgttacgatattgtgcttgaagttcttcggaaacttctgactttggattaagaaagacttctgttgcctctcacttgaaattaccaagtgggtttgcacctcctcataaagaacatgtttgcactgtgctgaagggctttgctatgcatacaatctgctttcttggtttatcagtttattttctttctaaaagctccctgaagggcaatatcatttggcttggggtgatcagtgtttacttattgatcttgctagacaatatcaaaataacttcccacattttccagtgaaacagatgttacataaaacgattgcagcttggctatttggttgaagggattacagagcccaataaaggatttaaaatatattcattaagattttatttggaaaggtggctggagagagctgaggatttccaggactttgtaagttcttattctgggagaacataaggccaataatcatgacctcttccaggcatttttaagacagatgtctattcatgttctttagctagagcctgtactttttgctggcatttgaataacccagtttaaaaagagtccagttagggtggactaactttggacacaaattggcttccatttcctacattttcatactgctgccttcctacagctgctagaccaagacctgttggtctgggaagcatttcatggatagggagagctcctctcggtgaacagtccaaaactaaaatagatgtttatatagaaagcccaagaggagatttttgccatgcctgagttctttcctatcccaccctaacacttaacatattacttagtctgctttgttaaaagcaagtattacctttaacttgcctcttactctttgccctttagctaactaataaagtttgatataggcattattatataattctgagtcattcatggtatatctcatgtttgatgtatttttcaaactaagatctatgatagttttttttccagagttccattaaatcatttatttcctttactttctcacctctgttgaaacatttagaaactggatttgggaacccaattttggaaaaccagattcatagtcatgaaaatggaaacttccatattctgtttttgaaaagatgtggccattattacagtaattttattataggactttgcctcgtacaattaatagtgatattttggacaaggagttctggtgacaagctatacctaattataagctataaaacaatagatatgagtgtttgtacagtttaactcaatggagatcagaatattctatgtattgagaaaatgtttaatatcaatctataaatcttgaatttctaagaggcttattttgttcttttggctgaatgagtatatttgaattggttgaataattaataattctcattgtaaaaataattatatgccaaaaatatatttgatgttaaatcaaatagatgattctgtttacattgttcatatgaataataatctgtgttaatttcattttgataattggcctttaatatttgtatctctaattttattttctctctgttactgtaaaataatagctataatgtataacaattttcttcagaagaattctatgctattattaaaataaaatatttactgtgt

SEQ ID NO: 6823 - protein, 206 aa, Homo sapiens; identical to SEQ ID NO: 6807

SEQ ID NO: 6824 - DNA, 2602 bp, Homo sapiens
gacccaactggcgaggctgctggggttgcagcgggacagttggggcggccccgcaggcccaggtgaacaaaaattgtttgctggcccccaggatactaactagacctttggcctgactcacaggacactaaggctccttttctgaagaagccttttaccagtctcatttaggggatgggaacaacatgtcttcacctagggactttagagcagagcctgtaaacgattatgagggaaatgactctgaagcagaagacttgaatttcagggagactttgccttcatcaagtcaggaaaacacacctagatcaaaggtttttgaaaataaagttaattcagagaaggtaaaactttctcttcggaatttcccacataatgattatgaggatgtttttgaagagccttcagaaagtggcagtgatcccagcatgtggacagccagaggccccttcagaagagacaggtggagcagtgaggatgaggaggctgcagggccatcacaggctctctcccctctactttctgatacgcgcaaaattgtttctgaaggagaactagatcagttggctcagattcggccattaatattcaattttcatgagcagacagccatcaaggattgtttgaaaatccttgaggaaaaaacagcagcgtatgatatcatgcaggaatttatgacgggaactagtcactctgtaaaacagttgcagttcaccaagtggccagaccatggcactcctgcctcagcagatagcttcataaaatatattcgttatgcaaggaagagccaccttacaggacccatggttgttcactgcagtgccggcataggccggacaggggtgttcctatgtgtggatgtcgtgttctgtgccatcgtaaagaactgttcattcaacatcatggatatagtggcccaaatgagagaacaacgttctggcatggttcaaacgaaggagcagtatcacttttgttacgatattgtgcttgaagttcttcggaaacttctgactttggattaagaaagacttctgttgcctctcacttgaaattaccaagtgggtttgcacctcctcataaagaacatgtttgcactgtgctgaagggctttgctatgcatacaatctgctttcttggtttatcagtttattttctttctaaaagctccctgaagggcaatatcatttggcttggggtgatcagtgtttacttattgatcttgctagacaatatcaaaataacttcccacattttccagtgaaacagatgttacataaaacgattgcagcttggctatttggttgaagggattacagagcccaataaaggatttaaaatatattcattaagattttatttggaaaggtggctggagagagctgaggatttccaggactttgtaagttcttattctgggagaacataaggccaataatcatgacctcttccaggcatttttaagacagatgtctattcatgttctttagctagagcctgtactttttgctggcatttgaataacccagtttaaaaagagtccagttagggtggactaactttggacacaaattggcttccatttcctacattttcatactgctgccttcctacagctgctagaccaagacctgttggtctgggaagcatttcatggatagggagagctcctctcggtgaacagtccaaaactaaaatagatgtttatatagaaagcccaagaggagatttttgccatgcctgagttctttcctatcccaccctaacacttaacatattacttagtctgctttgttaaaagcaagtattacctttaacttgcctcttactctttgccctttagctaactaataaagtttgatataggcattattatataattctgagtcattcatggtatatctcatgtttgatgtatttttcaaactaagatctatgatagttttttttccagagttccattaaatcatttatttcctttactttctcacctctgttgaaacatttagaaactggatttgggaacccaattttggaaaaccagattcatagtcatgaaaatggaaacttccatattctgtttttgaaaagatgtggccattattacagtaattttattataggactttgcctcgtacaattaatagtgatattttggacaaggagttctggtgacaagctatacctaattataagctataaaacaatagatatgagtgtttgtacagtttaactcaatggagatcagaatattctatgtattgagaaaatgtttaatatcaatctataaatcttgaatttctaagaggcttattttgttcttttggctgaatgagtatatttgaattggttgaataattaataattctcattgtaaaaataattatatgccaaaaatatatttgatgttaaatcaaatagatgattctgtttacattgttcatatgaataataatctgtgttaatttcattttgataattggcctttaatatttgtatctctaattttattttctctctgttactgtaaaataatagctataatgtataacaattttcttcagaagaattctatgctattattaaaataaaatatttactgtgt

SEQ ID NO: 6825 - protein, 278 aa, Homo sapiens [sequence omitted]

SEQ ID NO: 6826 - DNA, 1994 bp, Homo sapiens
aggctaggcgtggacccaactggcgaggctgctggggttgcagcgggacagttggggcggccccgcaggcccaggtttttgaaaataaagttaattcagagaaggtaaaactttctcttcggaatttcccacataatgattatgaggatgtttttgaagagccttcagaaagtggcagtgatcccagcatgtggacagccagaggccccttcagaagagacaggtggagcagtgaggatgaggaggctgcagggccatcacaggctctctcccctctactttctgttcaacatcatggatatagtggcccaaatgagagaacaacgttctggcatggttcaaacgaaggagcagtatcacttttgttacgatattgtgcttgaagttcttcggaaacttctgactttggattaagaaagacttctgttgcctctcacttgaaattaccaagtgggtttgcacctcctcataaagaacatgtttgcactgtgctgaagggctttgctatgcatacaatctgctttcttggtttatcagtttattttctttctaaaagctccctgaagggcaatatcatttggcttggggtgatcagtgtttacttattgatcttgctagacaatatcaaaataacttcccacattttccagtgaaacagatgttacataaaacgattgcagcttggctatttggttgaagggattacagagcccaataaaggatttaaaatatattcattaagattttatttggaaaggtggctggagagagctgaggatttccaggactttgtaagttcttattctgggagaacataaggccaataatcatgacctcttccaggcatttttaagacagatgtctattcatgttctttagctagagcctgtactttttgctggcatttgaataacccagtttaaaaagagtccagttagggtggactaactttggacacaaattggcttccatttcctacattttcatactgctgccttcctacagctgctagaccaagacctgttggtctgggaagcatttcatggatagggagagctcctctcggtgaacagtccaaaactaaaatagatgtttatatagaaagcccaagaggagatttttgccatgcctgagttctttcctatcccaccctaacacttaacatattacttagtctgctttgttaaaagcaagtattacctttaacttgcctcttactctttgccctttagctaactaataaagtttgatataggcattattatataattctgagtcattcatggtatatctcatgtttgatgtatttttcaaactaagatctatgatagttttttttccagagttccattaaatcatttatttcctttactttctcacctctgttgaaacatttagaaactggatttgggaacccaattttggaaaaccagattcatagtcatgaaaatggaaacttccatattctgtttttgaaaagatgtggccattattacagtaattttattataggactttgcctcgtacaattaatagtgatattttggacaaggagttctggtgacaagctatacctaattataagctataaaacaatagatatgagtgtttgtacagtttaactcaatggagatcagaatattctatgtattgagaaaatgtttaatatcaatctataaatcttgaatttctaagaggcttattttgttcttttggctgaatgagtatatttgaattggttgaataattaataattctcattgtaaaaataattatatgccaaaaatatatttgatgttaaatcaaatagatgattctgtttacattgttcatatgaataataatctgtgttaatttcattttgataattggcctttaatatttgtatctctaattttattttctctctgttactgtaaaataatagctataatgtataacaattttcttcagaagaattctatgctattattaaaataaaatatttactgtgt

SEQ ID NO: 6827 - protein, 92 aa, Homo sapiens; identical to SEQ ID NO: 6793

SEQ ID NO: 6828 - DNA, 572 bp, Homo sapiens
gtggacccaactggcgaggctgctggggttgcagcgggacagttggggcggccccgcaggcccaggtttttgaaaataaagttaattcagagaaggtaaaactttctcttcggaatttcccacataatgattatgaggatgtttttgaagagccttcagaaagtggcagtgatcccagcatgtggacagccagaggccccttcagaagagacaggtggagcagtgaggatgaggaggctgcagggccatcacaggctctctcccctctactttctgatacgcgcaaaattgtttctgaaggagaactagatcagttggctcagattcggccattaatattcaattttcatgagcagacagccatcaaggattgtttgaaaatccttgaggaaaaaacagcagcgtatgatatcatgcaggaatttatggctttagaacttaagaatctgcctggtgagttcaactctgggaatcaaccaagcaacagagaaaaaaacagataccgagatattcttccatatgattcaacacgcgttcctcttggaaaaagcaaggactacatcaatgctagt

SEQ ID NO: 6829 - protein, 130 aa, Homo sapiens
MWTARGPFRRDRWSSEDEEAAGPSQALSPLLSDTRKIVSEGELDQLAQIRPLIFNFHEQTAIKDCLKILEEKTAAYDIMQEFMALELKNLPGEFNSGNQPSNREKNRYRDILPYDSTRVPLGKSKDYINA

SEQ ID NO: 6830 - DNA, 507 bp, Homo sapiens
atggccccaaagagtagtgatgctggcaatttggatatgccaaagggaagctatacgcgcaaaattgtttctgaaggagaactagatcagttggctcagattcggccattaatattcaattttcatgagcagacagccatcaaggattgtttgaaaatccttgaggaaaaaacagcagcgtatgatatcatgcaggaatttatggctttagaacttaagaatctgcctggtgagttcaactctgggaatcaaccaagcaacagagaaaaaaacagataccgagatattcttccatttatagaagaactagctgaccagggacatgctgacactgctactgctcaaaagaccctagagctgcagcctaaggcacctgtggaaggggaacttaccgacatgaatgaccaaagtgcttgtgaggaaaaggataaaggcaacctaggggaagcaatgatggtagaaaacttgacattaaagaaactttggagctatttcacaacaatataa

SEQ ID NO: 6831 - protein, 168 aa, Homo sapiens
MAPKSSDAGNLDMPKGSYTRKIVSEGELDQLAQIRPLIFNFHEQTAIKDCLKILEEKTAAYDIMQEFMALELKNLPGEFNSGNQPSNREKNRYRDILPFIEELADQGHADTATAQKTLELQPKAPVEGELTDMNDQSACEEKDKGNLGEAMMVENLTLKKLWSYFTTI

SEQ ID NO: 6832 - DNA, 440 bp, Homo sapiens
cttttaccagtctcatttaggggatgggaacaacatgtcttcacctagggactttagagcagagcctggtttttgaaaataaagttaattcagagaaggtaaaactttctcttcggaatttcccacataatgattatgaggatgtttttgaagagccttcagaaagtggcagtgatcccagcatgtggacagccagaggccccttcagaagagacaggtggagcagtgaggatgaggaggctgcagggccatcacaggctctctcccctctactttctggtatgacatcatcctatttgtagtagcaagttgaggctctattttagagatatgcacaaagatatttctaatacaaatgaaagaaagagctagggaaaacttcaaaaatgggaaaatatggttttctaggattttcttttaaaaataaaaaaatgcaatta

SEQ ID NO: 6833 - protein, 92 aa, Homo sapiens
MGTTCLHLGTLEQSLVFENKVNSEKVKLSLRNFPHNDYEDVFEEPSESGSDPSMWTARGPFRRDRWSSEDEEAAGPSQALSPLLSGMTSSYL

SEQ ID NO: 6834 - DNA, 1883 bp, Homo sapiens
ggagtgagactgctcagagaggcaggattcctgctgactccagggggacacctggcacctcagcttcctttcccacttctccaggctgcatggaggggtgccgggcagggtcctcctggaagggaacctcctgcagcctcaagcaccaggtcatgacatgacatctatccctttcccaggtgaccgactcctgcaggtggatggagtgattctgtgcggcctcacccacaagcaggctgtgcagtgcctgaagggtcctgggcaggttgcaagactggtcttagagagaagagtccccaggagtacacagcagtgtccttctgctaatgacagcatgggagatgaacgcacggctgtttccttggtaacagccttgcctggcaggccttcgagctgtgtctcggtgacagatggtcctaagtttgaagtcaaactaaaaaagaatgccaatggtttgggattcagtttcgtgcagatggagaaagagagctgcagccatctcaaaagtgatcttgtgaggattaagaggctctttccggggcagccagctgaggagaatggggccattgcagctggtgacattatcctggccgtgaatggaaggtccacggaaggcctcatcttccaggaggtgctgcatttactgagaggggccccacaggaagtcacgctcctcctttgccgaccccctccaggtgcgctgcctgagatggagcaggaatggcagacacctgaactctcagctgacaaagaattcaccagggcaacatgtactgactcatgtaccagccccatcctggatcaagaggacagctggagggacagtgcctccccagatgcaggggaaggcctgggtctcaggccagagtcttcccaaaaggccatcagagaggcacaatggggccaaaacagagagagaccttgggccagttccttgacacattctcctgagtcccaccctcatttatgcaaacttcaccaagaaagggatgaatcaacattggcgacctctttggaaaaggatgtgaggcaaaactgctattcagtttgtgatatcatgagacttggaagatattccttctcatctcctctaaccagactttcgacagatattttctgagcaccttctctgcatgtctgcagtgctgtgtaaaatgccctacctttgcatggactattctttctaatcaagaggcgtgtgtggcgaacttggggcagcccctggaagtcttgttctttgaccattacgtctgcggctgcatcaccagataatgagcttcaccacttgtctgcctcctgtgtccttccgcggggagtaaatgtcacttcagcttgccgcatctctaaataggcaaattttcagtgctcagaaaaggacctgatctttgcacaaagtgctttgatggttgcctgcttgagtcactcccaatcccttcctgaagccctttctttataattcttctgttgaaatagccatcatattcacagtactaatcacagcatctcacatttactaaaaacttaccccataccaggaacccagagttgggggggctgtgtcagaattatgtaatttacgtgtcccaataatcctagatgcttcttgaccatctagttttgtcaaatgagaaaactgaggttccaaagaagtcaataaacttgtccaaagtctgaccgactctgcttgccatgtgacgagtctgtcttagaactgggtcattgccctgcttgcaatgctgtgccctctggcaagcccccccacccccctggtctcctgagctcggtaaggtgctccagctgcctctaccatagcacttcctacatggactgtaacatttctttactgctccaacttctcattaaattgggggctcctcaaagcc

SEQ ID NO: 6835 - protein, 320 aa, Homo sapiens
MTSIPFPGDRLLQVDGVILCGLTHKQAVQCLKGPGQVARLVLERRVPRSTQQCPSANDSMGDERTAVSLVTALPGRPSSCVSVTDGPKFEVKLKKNANGLGFSFVQMEKESCSHLKSDLVRIKRLFPGQPAEENGAIAAGDIILAVNGRSTEGLIFQEVLHLLRGAPQEVTLLLCRPPPGALPEMEQEWQTPELSADKEFTRATCTDSCTSPILDQEDSWRDSASPDAGEGLGLRPESSQKAIREAQWGQNRERPWASSLTHSPESHPHLCKLHQERDESTLATSLEKDVRQNCYSVCDIMRLGRYSFSSPLTRLSTDIF

SEQ ID NO: 6836 - DNA, 1881 bp, Homo sapiens
gcttatgaacacctaatcttattgctcagtggagaatacaatctaaacaaacaggtgaatacagaagacagtgccagtcggagggtggcattaacaccagtgtgccatatggtggtatctatgtgaaatccattgttcctggaagaccagctgccaaggaagggcagatcctacagggtgaccgactcctgcaggtggatggagtgattctgtgcggcctcacccacaagcaggctgtgcagtgcctgaagggtcctgggcaggttgcaagactggtcttagagagaagagtccccaggagtacacagcagtgtccttctgctaatgacagcatgggagatgaacgcacggctgtttccttggtaacagccttgcctggcaggccttcgagctgtgtctcggtgacagatggtcctaagtttgaagtcaaactaaaaaagaatgccaatggtttgggattcagtttcgtgcagatggagaaagagagctgcagccatctcaaaagtgatcttgtgaggattaagaggctctttccggggcagccagctgaggagaatggggccattgcagctggtgacattatcctggccgtgaatggaaggtccacggaaggcctcatcttccaggaggtgctgcatttactgagaggggccccacaggaagtcacgctcctcctttgccgaccccctccaggtgcgctgcctgagatggagcaggaatggcagacacctgaactctcagctgacaaagaattcaccagggcaacatgtactgactcatgtaccagccccatcctggatcaagaggacagctggagggacagtgcctccccagatgcaggggaaggcctgggtctcaggccagagtcttcccaaaaggccatcagagaggcacaatggggccaaaacagagagagaccttgggccagttccttgacacattctcctgagtcccaccctcatttatgcaaacttcaccaagaaagggatgaatcaacattggcgacctctttggaaaaggatgtgaggcaaaactgctattcagtttgtgatatcatgagacttggaagatattccttctcatctcctctaaccagactttcgacagatattttctgagcaccttctctgcatgtctgcagtgctgtgtaaaatgccctacctttgcatggactattctttctaatcaagaggcgtgtgtggcgaacttggggcagcccctggaagtcttgttctttgaccattacgtctgcggctgcatcaccagataatgagcttcaccacttgtctgcctcctgtgtccttccgcggggagtaaatgtcacttcagcttgccgcatctctaaataggcaaattttcagtgctcagaaaaggacctgatctttgcacaaagtgctttgatggttgcctgcttgagtcactcccaatcccttcctgaagccctttctttataattcttctgttgaaatagccatcatattcacagtactaatcacagcatctcacatttactaaaaacttaccccataccaggaacccagagttgggggggctgtgtcagaattatgtaatttacgtgtcccaataatcctagatgcttcttgaccatctagttttgtcaaatgagaaaactgaggttccaaagaagtcaataaacttgtccaaagtctgaccgactctgcttgccatgtgacgagtctgtcttagaactgggtcattgccctgcttgcaatgctgtgccctctggcaagcccccccacccccctggtctcctgagctcggtaaggtgctccagctgcctctaccatagcacttcctacatggactgtaacatttctttactgctccaacttctcattaaattgggggctcctcaaagcc

SEQ ID NO: 6837 - protein, 261 aa, Homo sapiens
MGDERTAVSLVTALPGRPSSCVSVTDGPKFEVKLKKNANGLGFSFVQMEKESCSHLKSDLVRIKRLFPGQPAEENGAIAAGDIILAVNGRSTEGLIFQEVLHLLRGAPQEVTLLLCRPPPGALPEMEQEWQTPELSADKEFTRATCTDSCTSPILDQEDSWRDSASPDAGEGLGLRPESSQKAIREAQWGQNRERPWASSLTHSPESHPHLCKLHQERDESTLATSLEKDVRQNCYSVCDIMRLGRYSFSSPLTRLSTDIF

SEQ ID NO: 6838 - DNA, 1970 bp, Homo sapiens
gagacaaacagaggtactggggaacctcaggatgagcagggcatgcactaggggactccaaactcatgaggaggcagtgtgggcagagttggctgatgtgtcctgactctgaggtcaagctggactgcagagagagagaagcacattggggcttcagggacacaagctaaagggtggcattaacaccagtgtgccatatggtggtatctatgtgaaatccattgttcctggaagaccagctgccaaggaagggcagatcctacagggtgaccgactcctgcaggtggatggagtgattctgtgcggcctcacccacaagcaggctgtgcagtgcctgaagggtcctgggcaggttgcaagactggtcttagagagaagagtccccaggagtacacagcagtgtccttctgctaatgacagcatgggagatgaacgcacggctgtttccttggtaacagccttgcctggcaggccttcgagctgtgtctcggtgacagatggtcctaagtttgaagtcaaactaaaaaagaatgccaatggtttgggattcagtttcgtgcagatggagaaagagagctgcagccatctcaaaagtgatcttgtgaggattaagaggctctttccggggcagccagctgaggagaatggggccattgcagctggtgacattatcctggccgtgaatggaaggtccacggaaggcctcatcttccaggaggtgctgcatttactgagaggggccccacaggaagtcacgctcctcctttgccgaccccctccaggtgcgctgcctgagatggagcaggaatggcagacacctgaactctcagctgacaaagaattcaccagggcaacatgtactgactcatgtaccagccccatcctggatcaagaggacagctggagggacagtgcctccccagatgcaggggaaggcctgggtctcaggccagagtcttcccaaaaggccatcagagaggcacaatggggccaaaacagagagagaccttgggccagttccttgacacattctcctgagtcccaccctcatttatgcaaacttcaccaagaaagggatgaatcaacattggcgacctctttggaaaaggatgtgaggcaaaactgctattcagtttgtgatatcatgagacttggaagatattccttctcatctcctctaaccagactttcgacagatattttctgagcaccttctctgcatgtctgcagtgctgtgtaaaatgccctacctttgcatggactattctttctaatcaagaggcgtgtgtggcgaacttggggcagcccctggaagtcttgttctttgaccattacgtctgcggctgcatcaccagataatgagcttcaccacttgtctgcctcctgtgtccttccgcggggagtaaatgtcacttcagcttgccgcatctctaaataggcaaattttcagtgctcagaaaaggacctgatctttgcacaaagtgctttgatggttgcctgcttgagtcactcccaatcccttcctgaagccctttctttataattcttctgttgaaatagccatcatattcacagtactaatcacagcatctcacatttactaaaaacttaccccataccaggaacccagagttgggggggctgtgtcagaattatgtaatttacgtgtcccaataatcctagatgcttcttgaccatctagttttgtcaaatgagaaaactgaggttccaaagaagtcaataaacttgtccaaagtctgaccgactctgcttgccatgtgacgagtctgtcttagaactgggtcattgccctgcttgcaatgctgtgccctctggcaagcccccccacccccctggtctcctgagctcggtaaggtgctccagctgcctctaccatagcacttcctacatggactgtaacatttctttactgctccaacttctcattaaattgggggctcctcaaagcc

SEQ ID NO: 6839 - protein, 261 aa, Homo sapiens; identical to SEQ ID NO: 6837

SEQ ID NO: 6840 - DNA, 1839 bp, Homo sapiens
gcaggggacagagctgggattcagattggcctccagagcagaaaccttcaccccaggccttcctctgggtgctggttcttcttgtcctccatcacctccagaaatcagtgctggtgaaatctactttgtggaactggttaaagaagatgggacacttggattcagcgtaactgtaagagtttttaggagagcttgaaaagcagttaacaagatgtccgtctagaacctggtggccattccacccagatggcaacctctgacagtgtgcttagtttgcacaaatgtaaggggtaaataaaaaagccaatgggggcctgcactgggggatgagttcagagacaaacagaggtactggggaacctcaggatgagcagggcatgcactaggggactccaaactcatgaggaggcagtgtgggcagagttggctgatgtgtcctgactctgaggtcaagctggactgcagagagagagaagcacattggggcttcagggacacaagctaaagggtggcattaacaccagtgtgccatatggtggtatctatgtgaaatccattgttcctggaagaccagctgccaaggaagggcagatcctacagggtgaccgactcctgcaggtggatggagtgattctgtgcggcctcacccacaagcaggctgtgcagtgcctgaagggtcctgggcaggttgcaagactggtcttagagagaagagtccccaggagtacacagcagtgtccttctgctaatgacagcatgggagatgaacgcacggctgtttccttggtaacagccttgcctggcaggccttcgagctgtgtctcggtgacagatggtcctaagtttgaagtcaaactaaaaaagaatgccaatggtttgggattcagtttcgtgcagatggagaaagagagctgcagccatctcaaaagtgatcttgtgaggattaagaggctctttccggggcagccagctgaggagaatggggccattgcagctggtgacattatcctggccgtgaatggaaggtccacggaaggcctcatcttccaggaggtgctgcatttactgagaggggccccacaggaagtcacgctcctcctttgccgaccccctccaggtgcgctgcctgagatggagcaggaatggcagacacctgaactctcagctgacaaagaattcaccagggcaacatgtactgactcatgtaccagccccatcctggatcaagaggacagctggagggacagtgcctccccagatgcaggggaaggcctgggtctcaggccagagtcttcccaaaaggccatcagagaggcacaatggggccaaaacagagagagaccttgggccagttccttgacacattctcctgagtcccaccctcatttatgcaaacttcaccaagaaagggatgaatcaacattggcgacctctttggaaaaggatgtgaggcaaaactgctattcagtttgtgatatcatgagacttggaagagatactgtaaatccaacctgccaaaactaaatgcagttgtcaggagcagagacctggggctcccagctgtgtcatcagggctaatggagacatcagtatggggcctgatgttggagaactggagacatgaagggacacaaaccccaaactttgttgtgagtttaaccgtaagtaaataggacaattataataccttcatatttcaagcctgaaatgcccaatctgcttctatgaatttcctcctgaaaggcagagatgaatttggtggcccaagtctttaaaggacagctgtccagaaaagttgggcacagtgtcttttctcagtaaacattctgtagcaagcag

SEQ ID NO: 6841 - protein, 255 aa, Homo sapiens
MGDERTAVSLVTALPGRPSSCVSVTDGPKFEVKLKKNANGLGFSFVQMEKESCSHLKSDLVRIKRLFPGQPAEENGAIAAGDIILAVNGRSTEGLIFQEVLHLLRGAPQEVTLLLCRPPPGALPEMEQEWQTPELSADKEFTRATCTDSCTSPILDQEDSWRDSASPDAGEGLGLRPESSQKAIREAQWGQNRERPWASSLTHSPESHPHLCKLHQERDESTLATSLEKDVRQNCYSVCDIMRLGRDTVNPTCQN

SEQ ID NO: 6842 - DNA, 596 bp, Homo sapiens
aactcttaaggatttcaccagacctgttggctgctgctgtgatctctgcccaagaggagcctctgaccaacatccaaagggcttctggacccactggactcctctggagcgtcagcctcgagtttgaccagcagcaggggtcggtgtgtccctctgaatctgagatctatgaggcaggagctgaggacaggatggcaggagcgcccatggctgctgctgtacagcctgctgaggtgactgttgaagttggtgaggacctccacatgcaccacgttcgtgaccgggagatgcctgaagctttggagtttaacctttctgccaatccagaggcaagcacaatattccagaggaactctcaaacagatgctttggagtttaacccttctgccaatccagaggcaaacacaatattccagaggaactctcaaacagatgttgtagaaataagaagaagcaactgtacaaaccatgtaagcactgagaagccttttaggaaaatcgggatggatgtgaggcatctttctgtgaagaaaagcatcccagaagattctgattttcaccccaactcaatcattccaaactttgctgctgattga

SEQ ID NO: 6843 - protein, 134 aa, Homo sapiens
MAGAPMAAAVQPAEVTVEVGEDLHMHHVRDREMPEALEFNLSANPEASTIFQRNSQTDALEFNPSANPEANTIFQRNSQTDVVEIRRSNCTNHVSTEKPFRKIGMDVRHLSVKKSIPEDSDFHPNSIIPNFAAD

SEQ ID NO: 6844 - DNA, 445 bp, Homo sapiens
ggctggtgcccggggccgcgctgtgaggtgggcaggcgaggagcgggaagaccatctctgcaagtgcagcatagcctcggcctaggacagcgggagtgcgtggccaaagctgtgagcagaggcacaggtggtggcagacagtagaggcgccccatggggaacatactgacctgtcgtgtgcaccctagcgtcagcctcgagtttgaccagcagcaggggtcggtgtgtccctctgaatctgagatctatgaggcaggagctgaggacaggatggcaggagcgcccatggctgctgctgtacagcctgctgaggtgactgttgaagttggtgaggacctccacatgcaccacgttcgtgaccgggagatgcctgaagctttggagtttaacctttctgccaatccagaggcaagcacaatattccagaggaactctcaaacagatg

SEQ ID NO: 6845 - protein, 96 aa, Homo sapiens
MGNILTCRVHPSVSLEFDQQQGSVCPSESEIYEAGAEDRMAGAPMAAAVQPAEVTVEVGEDLHMHHVRDREMPEALEFNLSANPEASTIFQRNSQT

SEQ ID NO: 6846 - DNA, 1801 bp, Homo sapiens
gaatcgggagggacgcggacccggtggaacgcactgcgcagacggcgccggcgccagcactcggccgttgacgagtctttcttccagctgtcccctgcaagtcgtccaggcggcggtccctttttttctgcctttttgtttacctccggcgagtcggcgcgagggtgaatttccgtttccggcggtgtccaagcggacctaaggagtcgcagttgtgaacaggttagagttacttgttattggtaaatagccactatggagactaaggaccagaagaaacacagaaagaaaaacagtggacccaaagctgcaaagaaaaagaagtggcatctgcaggatctccagctaggagacgaagaaaatgcccagaagagaaatgccaatgcttttgcagttcagtctgctgtgtggatgtctcgatcctttcacaggactctggatttgaagacacaaaagcatcatattccagtggttgatggaactccactagagccgccaccaatagcggtagtggtgacggggcctccaaagttggaaagagcactttgatataatgcctcattcggaacttcacctggcagaagttcaccgagatcagaggccctgtgacgatcgtgtcaggtaaaaagcgcagactcaccattattgaatgtgggtgtgacattaacatgatgattgatctggctaaagtagcagatctggtactgatgcttatagatgccagctttgggtttgaaatggaaatgtttgagtttctaaacatctgtcaagcacatggctttcctaaaattctgggagttctcacccacctcgactccttcaagcataacaagcaactgaagaagacaaagaagtgattaaaacacaggttctggacagaagtttaccaggttgccaaactgttctacctttctggaatggtgcatggagaatatcaaaaccaagaaatccacaatctgggccattttattacagttatgaagtttaggcctctcatggcaaacttttcacccttatatcctggcagacagttaaaaggatggaagatttgacaaacccggaggatatccaaacaaacatcaaatgtgacctgcaggtgtcactttatggttatttaagaggagcacacttgaaaaataaaagccaaattcacatgccaggggtagaacattttgccatgagtgacatcagtttcctcccagacccttgtgttcttcctgaataacaaaagaagtgctgtttaaataagaaggagcagctggtttatgcgcctgtttctggagttgagggtgtgctgtatgacaaagacgctgtctgtgttgaccttggtggcagccacggttttcaggcatcagacaaggtggggctcacccatgagctggtccagagtctcatctccacctactccaccattgatgccaagatggcttcaagtcgagtgatgctgctttccaattccaaaccacttgggtcagaggctatagataatcaaggcaaccttgcatcccatgggcccttcttctatggccacatgtctctgtggctctttccttcccccttctcttccactgttaaggactcatgtgcttacttagtcctgaatggagacaccgtcatcatccacatgagcccactgtccgaatccgtgagtggtgtcattgagcaaacacaaagtcgggctcatccaaggatgagattttgccagagaaaggacgagcagcaagtcagggagcttaaggtggtggaaaggaaatccctcacagcaactggcaccataatcaagacaatgtttgcagaataa

SEQ ID NO: 6847 - protein, 125 aa, Homo sapiens
MASSRVMLLSNSKPLGSEAIDNQGNLASHGPFFYGHMSLWLFPSPFSSTVKDSCAYLVLNGDTVIIHMSPLSESVSGVIEQTQSRAHPRMRFCQRKDEQQVRELKVVERKSLTATGTIIKTMFAE

SEQ ID NO: 6848 - DNA, 962 bp, Homo sapiens
gaatcgggagggacgcggacccggtggaacgcactgcgcagacggcgccggcgccagcactcggccgttgacgagtctttcttccagctgtcccctgcaagtcgtccaggcggcggtccctttttttctgcctttttgtttacctccggcgagtcggcgcgagggtgaatttccgtttccggcggtgtccaagcggacctaaggagtcgcagttgtgaacaggttagagttacttgttattggtaaatagccactatggagactaaggaccagaagaaacacagaaagaaaaacagtggacccaaagctgcaaagaaaaagaagtggcatctgcaggatctccagctaggagacgaagaaaatgcccagaagagaaatgccaatgcttttgcagttcagtctgctgtgtggatgtctcgatcctttcacaggactctggatttgaagacacaaaagcatcatattccagtggttgatggaactccactagagccgccaccaatagcggtagtggtgacggggcctccaaagttggaaagagcactttgatataatgcctcattcggaacttcacctggcagaagttcaccgagatcagaggccctgtgacgatcgtgtcaggtaaaaagcgcagactcaccattattgaatgtgggtgtgacattaacatgatgattgatctggctaaagtagcagatctggtaagtgagcaggggcagcctggggtgctgatggagacttacagcattgtgataggttatttaccccgtgatgaagggaagagagttttgtgattattaaaaggatcatggtcattatcagggatatagtagatgtgattgaattgatgatgataataataatagtaataaatgttgtcatattaataatacaaatggaatgtgcacaatgaaatgtgttccaaaatctaaaagcagatcacaggacggagaaaaccttta

SEQ ID NO: 6849 - protein, 97 aa, Homo sapiens
METKDQKKHRKKNSGPKAAKKKKWHLQDLQLGDEENAQKRNANAFAVQSAVWMSRSFHRTLDLKTQKHHIPVVDGTPLEPPPIAVVVTGPPKLERAL

SEQ ID NO: 6850 - DNA, 2183 bp, Homo sapiens
ttcatttatttctttatgaagacatgatgtatttgttcactgaacaagggtagaaactgcttaaccatccccaatttcatttctctctgttatgctataaattagatgagttacctctgctaaggttacattctatggttaagttactttttactcgtctcaagtgtcaacatcaccagtacctaacctagacatcgactggactaacgaagtggtttcctaacttaaactaaaacttaaatttcaataaaaaatttaaaacgtttttatgaacttccaataggatcgcagtattacttttagtacctgttgactctaaaacttctaaattacagctcatctacatacatttgaaaaatagcaatatctgtatgtgtgagatatgactggttctagatgatgcctggaggccccatggacttacagagacccttccagtgatttctgaggtacctgggaatctgtggccaataaattggtagtcactgaatctgtgagtttttttggaatatcgggctgcataaaatctgacagcttgattgagaaaaagcggggcagggtgccatttcattcagttaaggtcctgtgctatggtctgattgacagaggaaatccaaactagtatcttccgtgccatgcaataagagctacattgcaaggctgcagagggtgctactggagcacagaagtgagtcaaaggcttcccacagacacacacacgagcggaaacagaaagtctttatatatcaccatatgtcaagactatattttactgccgaacttgtactgtttctctcccttttcttcttggtgggaaaagcacaatttggggtcaacagattcggctcaggtctaagtcgcctgccgggaccacgtcgccaggaaacgacgtctccccgacaccttccctcccagtccgggctctctgcagggattcatcccgtcactctcccaacgaccctcgggcacacctcaggcagatgcgaaatatgccgctcctggggagcaaagatgacccggaggaccgggggagtaccttcccacgcgcacgactcgcgatcttcccagtgccccagagccacggacccaaccgccgcctaccccagcccgcggcacctaacctgttcacaactgcgactccttaggtccgcttggacaccgccggaaacggaaattcaccctcgcgccgactcgccggaggtaaacaaaaaggcagaaaaaaagggaccgccgcctggacgacttgcaggggacagctggaagaaagactcgtcaacggccgagtgctggcgccggcgccgtctgcgcagtgcgttccaccgggtccgcgtccctcccgattcagccccaccccgccctcggaatccgctgcctcagctcctgctgtggcactccccagcagcttgcacctcgctcgcggagtccttgctgaaggccagggcagctgtgcggcctggcgcgggttacttgatgccgtgcaaaagccaggagacacatttggttctggccgccccggagtcaccgtgcccggggcgaatggactatggctggattgggagaccacttcctcctctgtaaagatgacagacgagggagatctcacgttctgggggtgccctatagccctctttttaaggccctctttttccgggaccaacagactctgagggcagggacaaactgacccagcctaaactgcctcgccttccctgctcccgggaaaggggttttccctgagggaaggtagcatcttgccattttcttcctgcacagctttgccttcccagggatccacccattgccacctgaggaaatgccttggagcccatctaatccccagcccagctacttgggacgcctacagagactacattgtcagaggatgcatcttcctctagtcttggagggtttcttttcaatatgatcccaccggtgcatgcaaggctcaattctacatcaaaaaactaggcccactcctgtcgccgagacccccaggcttcaggtcctgtcacagtgaccttgttatcacccccagcagcccccagagtccacagatgtggggatctcaagaagcaggcgttcctggaactgtttccccttcctgtgcttctggtattgaaaaccattcatcacctgcctgaattcttcagtggtcttcaaagaaaagtaaataaaatgttaag

SEQ ID NO: 6851 - protein, 274 aa, Homo sapiens [sequence omitted]

SEQ ID NO: 6852 - DNA, 999 bp, Homo sapiens
atggccatcatcacggggggcttcgccaccttctcctcctgcttccccgacctctgcgagggcgagcctgctgccctgctacccatgagcctctcccagtcctgcctgctcgtgcccagcgtgggcctgaccctcatcctgcctcacctctacctgggctcgcaggaagacgtcctgaacaaggatctgatgacgcagaatggaataagctacgtcctctatgccagcaactcctgccccaagcctgacttcatctaccagagccacttcttgcaggtccccatcaacgacaactactgtgaaaagctgctgccctggctggacaagtccatcgagttcatcgataaagccaagctgtccagctgccaagtcatcgtccaccatctggccggcatctcctgctgtgccactatcgccatcgcctacatcatgaagaccatgggcatgtcctccgaagacgcctacaggtttgtgaaggaccagcgcccgtccatctcgcccaacttcaacttcctgggccagctgctggagtaccagagcagcccgaagctgctggccgccgtgcagggcgacgcgggcaccccctcaggaatgcaggagcctccccccagccctgcggccggggccccactgccatggctgccaccacctacctcagagaccgctgccaccaggagtgcggctgccagggagggcggcccgagcgcgggcaggaagcccccggcgccccccacggccaccagcacgctgcagcagggcctgcgcagcctgcgcctctcctcggaccacctgcaggacaccagccgcctcaagccctccttctctctggacatcaactggtcagacgagctggccccggattcgcacttcaagtgctgcagctgccagatggagttcgaggagggcatggtggaggggcgcgcgcgcagcgaggagctggccgccctgggcaagcaggggagcttctcgggcagcgtggaggtcatcgagatgtcctga

SEQ ID NO: 6853 - protein, 332 aa, Homo sapiens
MAIITGGFATFSSCFPDLCEGEPAALLPMSLSQSCLLVPSVGLTLILPHLYLGSQEDVLNKDLMTQNGISYVLYASNSCPKPDFIYQSHFLQVPINDNYCEKLLPWLDKSIEFIDKAKLSSCQVIVHHLAGISCCATIAIAYIMKTMGMSSEDAYRFVKDQRPSISPNFNFLGQLLEYQSSPKLLAAVQGDAGTPSGMQEPPPSPAAGAPLPWLPPPTSETAATRSAAAREGGPSAGRKPPAPPTATSTLQQGLRSLRLSSDHLQDTSRLKPSFSLDINWSDELAPDSHFKCCSCQMEFEEGMVEGRARSEELAALGKQGSFSGSVEVIEMS

SEQ ID NO: 6854 - DNA, 1446 bp, Homo sapiens
gggtcatgacgcagcgagtttcagtcgtgacttttctgggggcatcgcggcgtcccctttttttgcctttaaagtaaaacgtcgccccgacgcaccccccgcgtatttcggggggcggaggcggcgggccacggcgcgaagaggggcggtgctgacgccggccggtcacgtgggcgtgttgtgggggggaggggcgccgccgcgcggtcggttccgggcggttgggagcgcacgagctagcgagcgagaggcagccgcgcccgccgccgcccctgctctgtatgccgctctctcccggcgcggccgccgccgatcacagcagcaggagccgccgccgccgcggttgatgtggttgggccggggctgaggaggccgccaagatgccgcagtcaaagtcccggaagatcgcgatcctgggctaccggtctgtggggaaatcctcattgacgattcaatttgttgaaggccaatttgtggactcctacgatccaaccatagaaaacacttttacaaagttgatcacagtaaatggacaagaatatcatctttaacttgtagacacagccgggcaagatgaatattctatctttcctcagacatactccatagatattaatggctatattcttgtgtattctgttacatcaatcaaaagttttgaagtgattaaagttatccatggcaaattgttggatatggtggggaaagtacaaatacctattatgttggttggaaataagaaagacctgcatatggaaagggtgatcagttatgaagaagggaaagctttggcagaatcttggaatgcagcttttttggaatcttctgctaaagaaaatcagactgctgttgatgtttttcgaaggatgattttggaggcagaaaaaatggacggggcagcttcacaagattccagcgtagttagtgacgttgtacttcaagacttactggcatatgtgtcctcaaaacattcctacctcagagatcttcctccgagacagcctcagagggtgaacagtatagactttgtagaattggagcaccttcaacctgatgtgttagtccacgcagtactaagagttgttgatttcctatactgacagaggcagtatacagttatagaggacagaagcagaaaaaagttatgttaacagtggaacaggcccaagatcaacattatgcgcttgtattatggggtcctggagcagcctggtaccctcaacttcaaaggaaaaaaggttatatttgggaatttaaatatctttttgttcagcgcaattacacactagaaaacctagaattgcatacaacgccttggtcatcctgtgagtgcttgtttgatgatgatataagggcaattacatttaaagcaaaatttcaaaaaagtgcaccctcctttgtgaagatatcagacttagcaacccacctagaggataagtgttcagg

SEQ ID NO: 6855 - protein, 134 aa, Homo sapiens
MVGKVQIPIMLVGNKKDLHMERVISYEEGKALAESWNAAFLESSAKENQTAVDVFRRMILEAEKMDGAASQDSSVVSDVVLQDLLAYVSSKHSYLRDLPPRQPQRVNSIDFVELEHLQPDVLVHAVLRVVDFLY

SEQ ID NO: 6856 - DNA, 905 bp, Homo sapiens
gaggtttgcagctattttatttgcaagtatacatttaacacaatgaaataaacactgatatattgaagcctagttaatagtagtgtaacaatatgcatcattttgatgattacattattttaaacaacaaactacactgaaaaattaatgccaataaaattcttggtcataatattaagaaatacaatatataaattgaaaatatgattgcttaaaatttgaaaatggaagtgaactcatttggacagactcagagttaacataatctgaagggaggggagctctgacccaaatgatatctttcaggttaacagaagaaaaaagaagcatagtttatctccaaggagaacgggcagtttgcttcttcagctagaatatattcccagtgtcctcgggctttgcagcagaatcacatcaccgagcatgaagacttgccttgtgaagctgccccgtccattttttctgcctccaaaatcatccttcgaaaaacatcaacagcagtctgattttctttagcagaagattccaaaaaagctgcattccaagattctgccaaagctttcccttcttcataactgatcaccctttccatatgcaggtctttcttatttccaaccaacataataggtatttgtactttccccaccatatccaacaatttgccatggataactttaatcacttcaaaacttttgattgatgtaacagaatacacaagaatatagccattaatatctatggagtatgtctgaggaaagatagaatattcatcccacagaccggtagcccaggatcgcgatcttccgggactttgactgcggcatcttggcggcctcctcagccccggcccaaccacatcaaccgcggcggcggcggctcctgctgctgtgatcggcggcggccgc

SEQ ID NO: 6857 - protein, 35 aa, Homo sapiens
MQVFLISNQHNRYLYFPHHIQQFAMDNFNHFKTFD

SEQ ID NO: 6858 - DNA, 626 bp, Homo sapiens
agacagtaaaagaaaagggatgtaacaggtgaaacaagactgaccatgttttaataagctggctaatagattcgggtgtacatgtgcaggtctgttacctgggaatactgcgtgatactgaactttggggtacaagtgatcctgtcacccaggttaacagaagaaaaaagaagcatagtttatctccaaggagaacgggcagtttgcttcttcagctagaatatattcccagtgtcctcgggctttgcagcagaatcacatcaccgagcatgaagacttgccttgtgaagctgccccgtccattttttctgcctccaaaatcatccttcgaaaaacatcaacagcagtctgattttctttagcagaagattccaaaaaagctgcattccaagattctgccaaagctttcccttcttcataactgatcaccctttccatatgcaggagtccacaaattggccttcaacaaattgaatcgtcaatgaggatttccccacagaccggtagcccaggatcgcgatcttccgggactttgactgcggcatcttggcggcctcctcagccccggcccaaccacatcaaccgcggcggcggcggctcctgctgctgtgatcggcggcggccgc

SEQ ID NO: 6859 - protein, 45 aa, Homo sapiens
MCRSVTWEYCVILNFGVQVILSPRLTEEKRSIVYLQGERAVCFFS

SEQ ID NO: 6860 - DNA, 745 bp, Homo sapiens
ctgtcgctcgggtccggctgcgggccacaggccgcggatcgcgctctgccagcgccccacgcccgcaagcgcggcccctccgccacctcgcggcccggcctgacctgttaatcacgtccccacggctctcctagcggggacaccgccgtctgcaggctccgtccccacagtgcccagaccccgggaagtttgtcagtcagcaccctgatgccagccgattctcaaaaagccaggaggatccaagcagatgatttgccagacggtactgcagcaatggagatgaacagataattcacacagaaagaaggacgcaggatgctcgagactcttgcagtaatttgggcaaagatttccacagtgcaaaatagaaaaaacgtaactggcaaatagctgtacaaattacagtccattttcatcatggaatgtcagtttggcaacaatggcatcgaggcccaaaagcagctctgcagtaggggggttcctccttggtgactggatgggcacagcgaagcacaaattcctgaagatcccagctccaggaaacatcagcatggttcattgcgttgtccacctgaattcttcacccctccctgtggctgtgtccattgccctgtagtgttgcagttcccctcaggaaaaagatatcatttacttctctgacccttgatttggagcttggctatgtgacgtgctttggccaatgggatattggatgacataacataaggagagacacagatatgca

SEQ ID NO: 6861 - protein, 58 aa, Homo sapiens
MASRPKSSSAVGGFLLGDWMGTAKHKFLKIPAPGNISMVHCVVHLNSSPLPVAVSIAL

SEQ ID NO: 6862 - DNA, 1453 bp, Homo sapiens
actgcgcggctccccgcgccgcagctgggcaccagcagcaccacggaccgcccctgtgctcgcccgacggcgccccgcggcgctttaagagacggcctggcagcccagccccagccgcccagaccggcgagaccagcctgcgggagcagccccatggcggagcagctggccctggtgattgggggcaccatcggggggctgctgctgctgctgttgatcggggcaagctgctgtctgtggagaaggttctgtgccaccctcacctatgaggagctgcctgggacaccagccatggccaccacagctgcctccagtgggcagcgggacaggccctgccagccgcatgctaggacccaactgagcaggccaccagctgtgccattcgtggtgcccccaacccttcaaggccgagattgggtgcccctgcacagtggagagtgggccgatgccccatgggacccctgcccggcatcagagctgctgcctcacacctccagcggcggccttggagatgcatgtatggtgggggccatcaacccagagctgtacaagttcccggaggacaaaagtgagaccgacttccccgacggctgcctggggcggctgtggttctcggtggaatatgagcaggaggctgagcggctgctggtgggcttgatcaaggcacagcacctgcaagccccctcggagacctgcagccccctggtgaagctctacctgctgcccgatgagcggcgcttcctccaatccaagaccaaacgcaaaacctccaacccgcagtttgacgagcacttcatctttcaggtgtccagcaagaccatcacccagagggtgctgaagttctccgtctaccacgtggacaggcagaggaagcaccagctcctgggccaggtgctcttccccttgaagaatgagaccctagtgggggactgccggcgtgtcatctggagagacctggaggccgagagcctggagcccccctcggagtttggcgacctccagttctgcctcagctacaacgactacctgagccgcctgacggtggttgtgctgcgtgccaagggcctccggctccaggaggacagaggcattgtcagtgtgtttgtcaaagtgtctctgatgaaccacaacaagtttgtcaagtgcaagaacctgggccagacttgggggaggaatcaagaggaagcttaaacttaaaatgaaatcgaaagtttagactcctacatgggattggacattttaaatgctgaacagagcctatttttatagctagaagttacaggacacatttttggttaactgagaatgatccaaaaatcatgtgaattttgtgatccagaaagtcacagaacatgccctagattttatcccaggggcagggaggagtgacctgcagagtaagtttgaattggtaaatagaaaacaagaataaaatagtttgctgtttacattc

SEQ ID NO: 6863 - protein, 345 aa, Homo sapiens
MAEQLALVIGGTIGGLLLLLLIGASCCLWRRFCATLTYEELPGTPAMATTAASSGQRDRPCQPHARTQLSRPPAVPFVVPPTLQGRDWVPLHSGEWADAPWDPCPASELLPHTSSGGLGDACMVGAINPELYKFPEDKSETDFPDGCLGRLWFSVEYEQEAERLLVGLIKAQHLQAPSETCSPLVKLYLLPDERRFLQSKTKRKTSNPQFDEHFIFQVSSKTITQRVLKFSVYHVDRQRKHQLLGQVLFPLKNETLVGDCRRVIWRDLEAESLEPPSEFGDLQFCLSYNDYLSRLTVVVLRAKGLRLQEDRGIVSVFVKVSLMNHNKFVKCKNLGQTWGRNQEEA

SEQ ID NO: 6864 - DNA, 1886 bp, Homo sapiens
actgcgcggctccccgcgccgcagctgggcaccagcagcaccacggaccgcccctgtgctcgcccgacggcgccccgcggcgctttaagagacggcctggcagcccagccccagccgcccagaccggcgagaccagcctgcgggagcagccccatggcggagcagctggccctggtgattgggggcaccatcggggggctgctgctgctgctgttgatcggggcaagctgctgtctgtggagaaggttctgtgccaccctcacctatgaggagctgcctgggacaccagccatggccaccacagctgcctccagtgggcagcgggacaggccctgccagccgcatgctaggacccaactgagcaggccaccagctgtgccattcgtggtgcccccaacccttcaaggccgagattgggtgcccctgcacagtggagagtgggccgatgccccatgggacccctgcccggcatcagagctgctgcctcacacctccagcggcggccttggagatgcatgtatggtgggggccatcaacccagagctgtacaagttcccggaggacaaaagtgagaccgacttccccgacggctgcctggggcggctgtggttctcggtggaatatgagcaggaggctgagcggctgctggtgggcttgatcaaggcacagcacctgcaagccccctcggagacctgcagccccctggtgaagctctacctgctgcccgatgagcggcgcttcctccaatccaagaccaaacgcaaaacctccaacccgcagtttgacgagcacttcatctttcaggtgtccagcaagaccatcacccagagggtgctgaagttctccgtctaccacgtggacaggcagaggaagcaccagctcctgggccaggtgctcttccccttgaagaatgagaccctagtgggggactgccggcgtgtcatctggagagacctggaggccgagagcctggagcccccctcggagtttggcgacctccagttctgcctcagctacaacgactacctgagccgcctgacggtggttgtgctgcgtgccaagggcctccggctccaggaggacagaggcattgtcagtgtgtttgtcaaagtgtctctgatgaaccacaacaagtttgtcaagtgcaagaagacttcagctgtgctgggctccatcaaccctgtgtacaatgagaccttcagcttcaaggccgatgccaccgagctggataccgctagcctcagcctgactgtggtgcagaacatggaaggggacaagcaggctactacagtggaactgtttctgtttcatctgacatccggatagatgccagccacccccacattccaagattccagttctttgatgaaagtctctattccacccatcaagtctgtgtctgataacaccaatatctgggtcattagtggctccgttttgttgtgtctgttttcccctccttcctgttttgtggtgtgtttgatcacttattgttgaatgctaaccattataataaattttagtggctccaggaaacatgatctgaaaacaatgtctgtctcaagggagggtttaccatgtcatctgatagacagagtgggaagattttaccttaatccaatggtaccgaactgactagagtctatgttgcagtttttggaaggcttcatctccatctctggtttgcccgtctatctagagtgtggtcctccaaggattccaactgagtgtctgatgtgattattaggcttcttttccttggtgggtcctgaactccaacttttatctcattaatatgacactgccaaaacctgctgcttttcatagcctttctgcatagcttaactcagcagatgcctcaaggggaaagtgttccttttctgtgt

SEQ ID NO: 6865 - protein, 390 aa, Homo sapiens; identical to SEQ ID NO: 753

SEQ ID NO: 6866 - DNA, 3367 bp, Homo sapiens
agcaagcccaaggagctggtgaagcgctggcatgcgctctgccgcaccacggagccctgacccttcgcccagcaccgcggttccgctttgggagccgaccatcctcgcagttgcatgtgacagccacagccacacgcatggacgtttcatccaacagctccccgagctgccagccagcccgagccaggaggacgtgagtgctgatatgcaggagagaagaggggacaaagaagccctggcccggtcagcggctctggccatacagccttccgacacactccctcctccttatctgcggggctgcctgggctcggaatcccggctcctggtcctcacagccctgatttggaccagaatctcagatgctcagaagaaagatcctgtttagtgatgacccagctctacctgctgaatggacctgcagggtaaacttgggtgcctccatctgggaaagctgatgatgtgttcatgcagtcgatgaccctcactgctttttcagccagggtttctctgccttctgcctggcagagaaaacacactgctatggggaaaatcacagggagggcgctgtgaccagcgcactcaggcaccaagtgtcggcatggctcactgtgctgggtgaaggcctccccgagcattaggtcctccacggggctgtgtcaaatgccctcccacattgtgtcaagtctgcccatggcccaccctccccacagtccaaaaccacacagccctggttctccagctgttctgctgctgtttctgtgctctccctgattaagagcattcagttcctgggctctccctttgagcaggaaatggtgaaagcatgtggctatggtatagcccacagggctgagattgctgtgttgcagtattgatgtaaaatttgttaagaaggaagtacccacagatcactgccatcaactccccagaagttgcactcaagctagtgagcagcccttgtgcttgtcacagttactgtaacaggtagtgtgtatttgcacctggcatcgtgcagcctgcacgtcaacacgttgttttgtgtaactagaacagcacatggaaccactatctctttctcttttttccttctttttcttttttttttttttattttaattttttgagacggagtttccctcttgtcacccaggctggagtgcaatggcgtgatctcggctcactgcaccctccacctcccaggttcaagcgattctcctgcctcagcctcccaaagtgctgggattacaggcatgagtcaccgcacccagcccgaccagtatctttttcttatgcagtgaaacaactttagcaaaagaggcaatgaatgttatactgagtttctacctctttaactccacctccaatttctgtcaatctacaaacacaagtgtcgcctcgcagtgtttcgtatgaacagaatatcttgtgtttgctttttgtcacttatttcacttgcacattttttgtttgtttgtttgtttgtttgtttgttttttgagatggagtcttgctctgtcgcccaggctggagtgcggtggcgcgatctaggcttactgcaagctccgcctcccgggtttacttacaccactgtcctgcctcagcctccggagtagctgggactacagacacctgccaccacgccctgctaattttttgtattttcaagtagagacggggtttcactgtgttagccaggatggtctcgatctcctgacctcatgatctacccgcctcggcctcccaaagtgctgggattacaggcgtgagccaccacgcccggcccacttgcacattttcaaagtagtccgcaaagctgtagtttctaatagcttcatagctcacatgtaataggggttctctgtgtgtttatagagcaggctactacagtggaactgtttctgtttcatctgacatccggatagatgccagccacccccacattccaaggtgagatttctgactagcagtgacttttctagggccgcttggaaaagttgataagtatccttttctgcaggacagagtagactggtatctctgactcatccctgaaaaatctaaatggcaagagactagctggctctctgctctgatggggaggaggttgttgtttgggctgttctctacagacatagtcagggcaaaaagcatacgcatgcttcccatggaccagagaaacctggcctgggttgtctcaaatcctgtccacaaggcaactccagaagaaagaagccctttacatttccataaaacactttagaatcagctagtcaatttccacaaaataaagtgctagaatttgattggatttaattgattatgtagaacaatttgggggccatttgacatcattaaaatattcaatcttcctattcattaacatggtatatctcttcactttaagtcttttgtatgtttctcagaactatttttgtggttttcagtaaagtgttcttgcacatccttcaatagatttattcttagacgttttatatttgtttatggctagtatatacagattctgttgctacaaaactatgttgaccttgttatccagtgagaggctttgtgacattcatttaaattgtaataatttgcagattatttttgtataatcatgtcctctgtgaatgacagttttatttcttcctttcttaatctttatgccttatttagctcttgccaaactgcagtggctgagcaattggacaagataaagaaataaaagtgatccagatcataaagaaagaagtaaaactatatctgcacatgacataatcttgtctatggaaaatcctaaggaatccacacacaaaaaaactactagagctaataagtttggcaaggttgcaagatataaaattggtatacaaattgcagtggctaggacctccagcagaatgctgactataagtagtgatagtgggtattcttgtctcatcctcaatctcaggggtggtgggtgtggcatgtggagagttgtcaatattcaccatgaagtttgatggttgttataggatttttaatgtactcattaacatatattctcaagctgttaaaaagatttttttaattacaaataaggttaaatttctctcaaatacttactctgcaccttttgaaataattttatttttctcctttattctttggatgtgatgacttatactaattgactgttgaatgtcaaaccaaacttaacattcttgtaatagaaaccagcagggtgtgtacacttttgtgtgtgtgcgcaggtttatacacataaacacaacaatacttggacttatttatttaaaatttagatttattagagggagcatggccataaaataaaataaaataaaatttagatttaagtcga

SEQ ID NO: 6867 - protein, 118 aa, Homo sapiens [sequence omitted]

SEQ ID NO: 6868 - DNA, 4862 bp, Homo sapiens; identical to SEQ ID NO: 750

SEQ ID NO: 6869 - protein, 421 aa, Homo sapiens; identical to SEQ ID NO: 751

SEQ ID NO: 6870 - DNA, 3537 bp, Homo sapiens
gttctaataatcaccataataataggcgctgggtgtacagaggggacccaggcgacgctggcctccatccgataaccaccgtaacaggggctgggccgcgccgctcctccgctctaagtgctctttacatgcttcttaagttaccggcaggccagccgcccttacgagagcccctcacggacattaacccaattgagaagactgaacccagcttacgaacgttaagttgtcccaaatcgcagggctggcgagtgaggagcctgaattggaacccaggagcttctggaacccgctccagaattgcgctctcgaccggtttgtccgctgagagcgaacgggtgcgcgagcgccgcatccctgcccaaggccatcaggcaggcagcgctggggccggggacccgcgcggagactccaccccgggatccgggaaggctcccccgagccggggtcggagctgcggctggaggggcctcggcttgaggaggatctgggagggcgggggctcagtcctggccaccaggtgtgaggggtcgggtgcggagccctgtgtcagacgcggcggtgaaggctgtagccctgctctccgggatgggggtggtactctcaccccaccctgccccaagccgcagggagcccctggcgcccctggcgcccgggacccgccctggctggagccctgcggtttccgggagctcacggtcggctctgcgcccctccaccgccgggcctgggcctgggccagggacgggctggggcgggactgcggcctcggggcgctgggtccctgcccctgccgtgcactgcgcggctccccgcgccgcagctgggcaccagcagcaccacggaccgcccctgtgctcgcccgacggcgccccgcggcgctttaagagacggcctggcagcccagccccagccgcccagaccggcgagaccagcctgcgggagcagccccatggcgggccaccagctgtgccattcgtggtgcccccaacccttcaaggccgagattgggtgcccctgcacagtggagagtgggccgatgccccatgggacccctgcccggcatcagagctgctgcctcacacctccagcggcggccttggagatgcatgtatggtgggggccatcaacccagagctgtacaagttcccggaggacaaaagtgagaccgacttccccgacggctgcctggggcggctgtggttctcggtggaatatgagcaggaggctgagcggctgctggtgggcttgatcaaggcacagcacctgcaagccccctcggagacctgcagccccctggtgaagctctacctgctgcccgatgagcggcgcttcctccaatccaagaccaaacgcaaaacctccaacccgcagtttgacgagcacttcatctttcaggtgtccagcaagaccatcacccagagggtgctgaagttctccgtctaccacgtggacaggcagaggaagcaccagctcctgggccaggtgctcttccccttgaagaatgagaccctagtgggggactgccggcgtgtcatctggagagacctggaggccgagagcctggagcccccctcggagtttggcgacctccagttctgcctcagctacaacgactacctgagccgcctgacggtggttgtgctgcgtgccaagggcctccggctccaggaggacagaggcattgtcagtgtgtttgtcaaagtgtctctgatgaaccacaacaagtttgtcaagtgcaagaagacttcagctgtgctgggctccatcaaccctgtgtacaatgagaccttcagcttcaaggccgatgccaccgagctggataccgctagcctcagcctgactgtggtgcagaacatggaaggggacaagagccagcagctgggccgagtggtggtgggcccctacatgtacacccgcggcagagagctggagcactgggacgagatgctcagcaagcccaaggagctggtgaagcgctggcatgcgctctgccgcaccacggagccctgacccttcgcccagcaccgcggttccgctttgggagccgaccatcctcgcagttgcatgtgacagccacagccacacgcatggacgtttcatccaacagctccccgagctgccagccagcccgagccaggaggacgtgagtgctgatatgcaggagagaagaggggacaaagaagccctggcccggtcagcggctctggccatacagccttccgacacactccctcctccttatctgcggggctgcctgggctcggaatcccggctcctggtcctcacagccctgatttggaccagaatctcagatgctcagaagaaagatcctgtttagtgatgacccagctctacctgctgaatggacctgcagggtaaacttgggtgcctccatctgggaaagctgatgatgtgttcatgcagtcgatgaccctcactgctttttcagccagggtttctctgccttctgcctggcagagaaaacacactgctatggggaaaatcacagggagggcgctgtgaccagcgcactcaggcaccaagtgtcggcatggctcactgtgctgggtgaaggcctccccgagcattaggtcctccacggggctgtgtcaaatgccctcccacattgtgtcaagtctgcccatggcccaccctccccacagtccaaaaccacacagccctggttctccagctgttctgctgctgtttctgtgctctccctgattaagagcattcagttcctgggctctccctttgagcaggaaatggtgaaagcatgtggctatggtatagcccacagggctgagattgctgtgttgcagtattgatgtaaaatttgttaagaaggaagtacccacagatcactgccatcaactccccagaagttgcactcaagctagtgagcagcccttgtgcttgtcacagttactgtaacaggtagtgtgtatttgcacctggcatcgtgcagcctgcacgtcaacacgttgttttgtgtaactagaacagcacatggaaccactatctctttctcttttttccttctttttcttttttttttttttattttaattttttgagacggagtttccctcttgtcacccaggctggagtgcaatggcgtgatctcggctcactgcaccctccacctcccaggttcaagcgattctcctgcctcagcctcccaagtagctgggattactggcgcccgccaccatgcctggctaattttttttatttttagtagagacggaattttaccatgttggctaggctggtctcaaattcctggcctcaggtgatccacctgcctcagcctcccaaagtgctgggattacaggcatgagtcaccgcacccagcccgaccagtatctttttcttatgcagtgaaacaactttagcaaaagaggcaatgaatgttatactgagtttctacctctttaactccacctccaatttctgtcaatctacaaacacaagtgtcgcctcgcagtgtttcgtatgaacagaatatcttgtgtttgctttttgtcactt

SEQ ID NO: 6871 - protein, 474 aa, Homo sapiens
MGVVLSPHPAPSRREPLAPLAPGTRPGWSPAVSGSSRSALRPSTAGPGPGPGTGWGGTAASGRWVPAPAVHCAAPRAAAGHQQHHGPPLCSPDGAPRRFKRRPGSPAPAAQTGETSLREQPHGGPPAVPFVVPPTLQGRDWVPLHSGEWADAPWDPCPASELLPHTSSGGLGDACMVGAINPELYKFPEDKSETDFPDGCLGRLWFSVEYEQEAERLLVGLIKAQHLQAPSETCSPLVKLYLLPDERRFLQSKTKRKTSNPQFDEHFIFQVSSKTITQRVLKFSVYHVDRQRKHQLLGQVLFPLKNETLVGDCRRVIWRDLEAESLEPPSEFGDLQFCLSYNDYLSRLTVVVLRAKGLRLQEDRGIVSVFVKVSLMNHNKFVKCKKTSAVLGSINPVYNETFSFKADATELDTASLSLTVVQNMEGDKSQQLGRVVVGPYMYTRGRELEHWDEMLSKPKELVKRWHALCRTTEP

SEQ ID NO: 6872 - DNA, 836 bp, Homo sapiens
gctttaagagacggcctggcagcccagccccagccgcccagaccggcgagaccagcctgcgggagcagccccatggcgggccaccagctgtgccattcgtggtgcccccaacccttcaaggccgagattgggtgcccctgcacagtggagagtgggccgatgccccatgggacccctgcccggcatcagagctgctgcctcacacctccagcggcggccttggagatgcatgtatggtgggggccatcaacccagagctgtacaagttcccggaggacaaaagtgagaccgacttccccgacggctgcctggggcggctgtggttctcggtggaatatgagcaggaggctgagcggctgctggtgggcttgatcaaggcacagcacctgcaagccccctcggagacctgcagccccctggtgaagctctacctgctgcccgatgagcggcgcttcctccaatccaagaccaaacgcaaaacctccaacccgcagtttgacgagcacttcatctttcaggtgtccagcaagaccatcacccagagggtgctgaagttctccgtctaccacgtggacaggcagaggaagcaccagctcctgggccaggtgctcttccccttgaagaatgagaccctagtgggggactgccggcgtgtcatctggagagacctggaggccgagagcctggagcccccctcggagtttggcgacctccagttctgcctcagctacaacgactacctgagccgcctgacggtggttgtgctgcgtgccaagggcctccggctccaggaggacagaggcattgggaagagcccccgactcaatgggcactga

SEQ ID NO: 6873 - protein, 200 aa, Homo sapiens
MVGAINPELYKFPEDKSETDFPDGCLGRLWFSVEYEQEAERLLVGLIKAQHLQAPSETCSPLVKLYLLPDERRFLQSKTKRKTSNPQFDEHFIFQVSSKTITQRVLKFSVYHVDRQRKHQLLGQVLFPLKNETLVGDCRRVIWRDLEAESLEPPSEFGDLQFCLSYNDYLSRLTVVVLRAKGLRLQEDRGIGKSPRLNGH

SEQ ID NO: 6874 - DNA, 1122 bp, Homo sapiens
actgcgcggctccccgcgccgcagctgggcaccagcagcaccacggaccgcccctgtgctcgcccgacggcgccccgcggcgctttaagagacggcctggcagcccagccccagccgcccagaccggcgagaccagcctgcgggagcagccccatggcggagcagctggccctggtgattgggggcaccatcggggggctgctgctgctgctgttgatcggggcaagctgctgtctgtggagaaggttctgtgccaccctcacctatgaggagctgcctgggacaccagccatggccaccacagctgcctccagtgggcagcgggacaggccctgccagccgcatgctaggacccaactgagcaggccaccagctgtgccattcgtggtgcccccaacccttcaaggccgagattgggtgcccctgcacagtggagagtgggccgatgccccatgggacccctgcccggcatcagagctgctgcctcacacctccagcggcggccttggagatgcatgtatggtgggggccatcaacccagagctgtacaagttcccggaggacaaaagtgagaccgacttccccgacggctgcctggggcggctgtggttctcggtggaatatgagcaggaggctgagcggctgctggtgggcttgatcaaggcacagcacctgcaagccccctcggagacctgcagccccctggtgaagctctacctgctgcccgatgagcggcgcttcctccaatccaagaccaaacgcaaaacctccaacccgcagtttgacgagcacttcatctttcaggtgtccagcaagaccatcacccagagggtgctgaagttctccgtctaccacgtggacaggcagaggaagcaccagctcctgggccaggtgctcttccccttgaagaatgagaccctagtgggggactgccggcgtgtcatctggagagacctggaggccgagagcctggagcccccctcggagtttggcgacctccagttctgcctcagctacaacgactacctgagccgcctgacggtggttgtgctgcgtgccaagggcctccggctccaggaggacagaggcattgggaagagcccccgactcaatgggcactga

SEQ ID NO: 6875 - protein, 322 aa, Homo sapiens
MAEQLALVIGGTIGGLLLLLLIGASCCLWRRFCATLTYEELPGTPAMATTAASSGQRDRPCQPHARTQLSRPPAVPFVVPPTLQGRDWVPLHSGEWADAPWDPCPASELLPHTSSGGLGDACMVGAINPELYKFPEDKSETDFPDGCLGRLWFSVEYEQEAERLLVGLIKAQHLQAPSETCSPLVKLYLLPDERRFLQSKTKRKTSNPQFDEHFIFQVSSKTITQRVLKFSVYHVDRQRKHQLLGQVLFPLKNETLVGDCRRVIWRDLEAESLEPPSEFGDLQFCLSYNDYLSRLTVVVLRAKGLRLQEDRGIGKSPRLNGH

SEQ ID NO: 6876 - DNA, 1966 bp, Homo sapiens
ggaatgctgcctgctgctttgcccagagttggccctgagtgttcctatcaggccccgttcactctggggtggattaaaccacctcctggagggtgctgtatccccactgtgcaatgggggtttgtgctgtgtgcattcctgcctggtccttgagagttgctgacaggtggaacctgaggcagcaggacagcctggcattggccacgggacatcggccacaaccatagcaacttcggcatcaaatggggcaggagagagaacattaaggcagccatgagctccagccgccccgagccgggtccctgggcacccctgagcccccgccttcagcccctgtcccagagctcttccagcctgctgggtgaaggccgggaacagaggccagagctccgcaagactgccagcagcaccgtgtggcaggcccagctgggcgaggccagcaccagaccccaggccccggaggaagaggggaacccgcctgagagcatgaagccagcacgggcctctggccccaaggcgcgacccagtgctggaggccactggtggagcagcactgtgggcaatgtgtccaccatgggcggcagtgacctgtgtcgcctgcgggcccctagtgctgctgctatgcagaggagccattcagacctggtccgtagcacccagatgcggggacacagtggtgctcggaaggccagtctcagctgctcagcccttggcagcagccctgtccacagggctcagctgcagccaggtggtacttctggccagggtggccaggcccctgcaggcctggaaagggacctggctcctgaggatgagacttctaactcagcctggatgctgggggcgagtcagttgtcagtgccaccactagacctgggggacacaactgcccacagcagcagtgcccaggctgagcccaaagctgctgaacagctggctaccaccacctgccatgctctgcccccagctgctctactctgtggcatgagggaggtgagggctggtggctgctgccatgccctacctgccacagggatcctggcctttcccaaactagtggcgtcagtgagcgagtctgggctgcaggctcagcatggggtgaagatccactgtaggttgtctggggggctccctgggcattcccattgctgtgcccacctttggggtcccgctgggttagtcccagagcctggctctaggaccaaagatgtgtggaccatgacctcagccaatgacttggcccctgcagaggcatccccgctgtcagcccaggatgctggtgtgcaggcggccccagtggcggcctgcaaggctgtggccaccagtccgtccctggaagcgcctgcagccctgcatgtgttcccagaggtaactctggggtccagcctggaggaggtgccgtcccctgtgcgggatgtgcgatgggatgctgagggcatgacatgggaggtgtacggagctgcggtggacctggaggtgctcggtgtggccatccagaagcacctggagatgcagtttgagcagctgcagcgggcgcccgccagcgaggacagcctgtctgtggagggccggagggggccactgcgggctgtcatgcagtccctgcggcgccccagctgctgcggctgctccggcgcggcccccgagtgaggagctgtggcccttggagctggcctgggcccactgacttagtcctagacctgggccagggacggtgggggctccgtgccccctggacccaccggcagctgggcacatctctcacctgaatattggctgcctccagaccacaggactgcagcctggggcttccggccctacacagctgggctgttttcttaagggcttgatttccaagggccacatctctgcaccttccgggctctgaactttgagacagggctttagcactgtgcagaggggagatcctgagttttctgtaaaaaatgaccttttgttcactcca

SEQ ID NO: 6877 - protein, 37 aa, Homo sapiens
MGVCAVCIPAWSLRVADRWNLRQQDSLALATGHRPQP

SEQ ID NO: 6878 - DNA, 7719 bp, Homo sapiens
gtgggggacaatgaggatgcaggtacactgggcaagaggggattaaatgtcaggcaggataggtctgattgatggtactgggtgggcatcttatctcactgctgcaccgtccccaggggtacagaaaggtctgaatgaatcccatgttccctagccctacagctgggcacgcagtaggggctcaggagatgctgtggaatcaatgaccagatgctgaatgagtccctcatggaaaaagctgatgcatggggcctctccttgcccctggagctagaggtaggagtcagggaaccccagagacatgccagctcagcaaggctaggccaaggaggatgggggtggttgtggaagcccagggtgattctcagtgtcctctggtcattgctccctcgtcctgtgaactttctctgagctcccactctgtaccaaggagaccctgtccacagtgagttggatactgccagtcccaggaggaagtagcccagtattggcctgtccagctgtgcccgttaagaggccatagtgcttccgtgctggttgaccaagagctgttatcccacagccccaccccctagggctgcagtttcacccccaaagccccagcagatttggctctctcccttcccctcccacacaaaccagccagtaaagagttgagagctgatagagtggcggcctccaggaccccaccctagggcagattctaactgcttgagactgatgatgagataatttgcagtgtcatccttgtgtctaatgtgagatgaccttgatttgaagtgtctggtgtcttgtcactcactgccttgcatatggttctgaccagtcaggcaggctgggactgaaggtggctccctggtgaacctagcactgtgggagttcatagtagaatcggcttaggtgctgccacccaactcaactccactccctccctttctctcttctgcaggcagccatgagctccagccgccccgagccgggtccctgggcacccctgagcccccgccttcagcccctgtcccagagctcttccagcctgctgggtgaaggccgggaacagaggccagagctccgcaagactgccagcagcaccgtgtggcaggcccagctgggcgaggccagcaccagaccccaggccccggaggaagaggggaacccgcctgagagcatgaagccagcacgggcctctggccccaaggcgcgacccagtgctggaggccactggtggagcagcactgtgggcaatgtgtccaccatgggcggcagtgacctgtgtcgcctgcgggcccctagtgctgctgctatgcagaggagccattcagacctggtccgtagcacccagatgcggggacacagtggtgctcggaaggccagtctcagctgctcagcccttggcagcagccctgtccacagggctcagctgcagccaggtggtacttctggccagggtggccaggcccctgcaggcctggaaagggacctggctcctgaggatgagacttctaactcagcctggatgctgggggcgagtcagttgtcagtgccaccactagacctgggggacacaactgcccacagcagcagtgcccaggctgagcccaaagctgctgaacagctggctaccaccacctgccatgctctgcccccagctgctctactctgtggcatgagggaggtgagggctggtggctgctgccatgccctacctgccacagggatcctggcctttcccaaactagtggcgtcagtgagcgagtctgggctgcaggctcagcatggggtgaagatccactgtaggttgtctggggggctccctgggcattcccattgctgtgcccacctttggggtcccgctgggttagtcccagagcctggctctaggaccaaagatgtgtggaccatgacctcagccaatgacttggcccctgcagaggcatccccgctgtcagcccaggatgctggtgtgcaggcggccccagtggcggcctgcaaggctgtggccaccagtccgtccctggaagcgcctgcagccctgcatgtgttcccagaggtaactctggggtccagcctggaggaggtgccgtcccctgtgcgggatgtgcgatgggatgctgagggcatgacatgggaggtgtacggagctgcggtggacctggaggtgctcggtgtggccatccagaagcacctggagatgcagtttgagcagctgcagcgggcgcccgccagcgaggacagcctgtctgtggagggccggagggggccactgcgggctgtcatgcagtccctgcggcgccccagctgctgcggctgctccggcgcggcccccgagtgaggagctgtggcccttggagctggcctgggcccactgacttagtcctagacctgggccagggacggtgggggctccgtgccccctggacccaccggcagctgggcacatctctcacctgaatattggctgcctccagaccacaggactgcagcctggggcttccggccctacacagctgggctgttttcttaagggcttgatttccaagggccacatctctgcaccttccgggctctgaactttgagacagggctttagcactgtgcagaggggagatcctgagttttctgtaaaaaatgaccttttgttcactccaccctcagaactctgccatgttgcctcgtcagactcttggtggctttatttgaaatcagtgctgagaaatagtgaattctcgacatgaaatgtgaggccccagtgacagggactgcccaggtctttagggaaggggactgatgttatcagaggcctcctgtgtgccacatactgtgcttgtcctgtcttcacctcttcatcctggcaagccttcatttggcaaggctgtagccgatgtgccccacgctggacagcttgaagaggtgggactgagatccaaagccagggccagctgagccgtgggtgttgccctgtagcatgtgcccggtccagtcagtgcagtcatgtatgaggagaatttactgagctcatactctgtgctgggttctgtggattctgtggtgaatgagacagaggctgcccctgccctggctgagctcatggtgtgggttggggatggcaggggaggatgctgaccattacggagggctgccaggcttccagggtcattgtgtcagaggctggcctgaggaaggggagaatgggtggccacctgccctaatctcagttacaaagcctaaaattgcactattttcacctcattctgtcggctgaaggatttctccccagctggtgcagtttgtggaaggagggagggcaggaatggagggggacagggcaggagtttgccctggccctggggtaggggctgtgaggctgtgggggctcgcttgcccacatgacctgacctaggctaggcagtgggggccaggggccttggagagacagaaacatgggctttggcacagtctgacttcattgcccaaagatttctcgaggcctgtgaagaatgggagtgggcttgtgttcttgtcctgggtctttgtcttgaagatcctaagatcccgtgacacagccccccaatccacccgtgtgagggaccagagggctagtgtggggtcatggcccacgacctggcctgtttctggagcctcttctgcacctaggagcccaggacccccacagtggtggcttacttttccccatcctcaaggacctggtactcattgaggtggaaatgactcatgcaacagttggtgaatttgtaaagcaggagtggcatttcaacaggccacaaggacaaagtgacaaaggcgtgcgtcaggtcagatgcctcctgaagcccaacgatggaccattctcacccgtaaacatgcctttcccatatgcataggtgcaccccttgggattctggggctgtcagtccctttgtgtatggtgccagggcaggcagctcacgttctggggagtgacacatgggtatatgccatcttcatgcctggctccccatggagtctccaggaaccccagcctgttagggccacatgagagagaacaaatggctgtgggtgcatggggagggacctttcacacagggccatagctaagtagggtcttgaggatgcaggggttagacaggtgggtggagagagggcaggacctgcctggcagatggaacagcctggtcagatacttggatgtgcctgtcctgcctgggccataatgagtttctgcagtggcggctcatttggagcgtttgttgggttgggaggtgaccaggggtccccattgtgaagatcctgatgtaaatgaggaaaggaactttaagggaactgtggaaggggttctgaggtgggaccagatttcagtttagaaatatccatttggcttccagtggagatgtgccaggtgacaccaaggaggggcctgtttaggggcaatggagtgggcagctgggggctgggttcatacacgtgcacacacacgcatacacaggcacacatgtgtgcaatggatttggggaggaggcatttcaggatgctgaggtttccagtttgagcaagaggagggtgaggccactacctgggtcaaggtgaatggcatgttcagcaggtgcagaaagggccacctgccacagggtttggctgggaccagtgaaacctacttcatgaagagactttcttctgtgtcacgtgcagattcttatgcattcacgctggctgggtgccactctgtgctacctccatgctgccctggcttgccaggatggcaggccgggctgggctcagccaagctcccactcacctcatcgtcactgagatgagtatttgcagagcggtgctgaaatccaacacctgtgtcttggctggggccccagatgattctcctggctaaaccacgatccttgtctccctagcccagttgcacagctgctgctgacaggtctacctgaagtgactgcagcctcatttctgattggaactggagacccctcccaaccccctttgctgtgccctctcctggaacagccctgatgcctgcagtggtttagggccccagagcatggccagcggtttagtttacagatctcctccccttggactctagatttctggccagactttctgggtccctttcaggccctgctctgggaggtgttggagttcactgttgatgtgtttgtttggctttgaattcaaaacagatacaaatttggaggtgagagctttgccagaccccagcagggatggggcatcggtcctgactggtcttgtttattttgtcctggtaaattctgttctttggagcataaaccctggagtcctagagccccttgcctcagcaggaatcccccctctgtctgctccaggggctccctgcttctgcccacctgctctccttccatggcattcaggacccccgacagctgaagcctctcttcatatagcttgtcccctctgggcctgcctgtcttgtgtccaggacacaagacacgcatcccttgtctggccccaggctgccatcactgtcacaagaaactcatagagtagagctggtctgaggtcacagtgctggtggtggtggaaaagcagggatggcctgttccactgtgatcttacctcctgtgtcacctggattgggtctctgtccccttagacatgctagatcctaactttacaagggctgaaggggtcttctacacgcaggtcccaacactttgggctggggttggccaccgtagcttagtgggctaaagctggagtttgaatctggatatataggatccacacctatagccatgtgatcttgggcaagttacaagccttgatcatcttcctcatctgtaagatggggatgacaatggtgcctccttcacatgcttggtgtggagattaaatagaataacccaagtagtgcctggcactgagttagtgctcagcacacaggctggtagtgttgggcacccctctcatagccacattcaggggccacctcttaccctgccagcttggctgtgatcacagcccacatcccacttccttaaaagtcccttgttcagagcctctttccaggttcctcgccccacagctttgcaccctgcctgggacttggccctctggctggggcttctgaaaatgtagttcccagagtgcattgaggagggctaccctagccctcaccactcatcttgggctgggttccccagaagcttctgctgagatgaggatgctggagttattagggaggggagagcaagttaagggaggggcagaaggcaaggcagggtgtgatttcagtccaagtcagaccctaaaggggagccctggatgcagtcccacctcagagtaaggactacccaggggtgaagatgtagcctccaggcacttctgctctctggcaggcaggctaggaagctctaggagccccagggtaggtttctgctggagtcgtagggcctattttgggggaagttgtgcacagaaaccaccagagggagtcacaggcatctgggggtgcacccattgacatttgcatccatgtcatgccaagcttgtagcccacaaatgcccaacccttttctccatgcattgctctgtctcagttttgttcacgccaagcagccttggttagttaaatgcagagcttggcatttgcccatgttaaattccttctcctttttcattctggcctggcctggttttgccatctgaagctatgacaagtcctttatcagttttcatccaacttgtcaggcagggcagggctggtatgaagcccaggacatatcactgggacatcccataggtctgtgagattcccaggtccctccaaatccacacggtcatcatgggcaaattagtttaagtctgatctgttaagatccagatctctcacaccaacagcacacacccctttttcccatggccatggaaggagggtagcatagcctgactcgagtcctcgttctcagcagaactggttctgtggtggccacttccctttctcaacttttacctacttctgtttaataggttgttctgcaagtctgagagcaacagcaagcttagaagtgtggactcagcctggtacagtggctcatgcctgtaatcccagcactttgggaggctgaggtgggctgactgcttgagctcaggagttcgaaaccagcttgggcagcatggagaaatcccatctctacaaaaaatacaaaaattagctgggcatggtggtgtgcatctgtagcctcagctactcagggggttgaggtgggaagatggcttgagcccaggaggtggaggttgcagtgagccgagatagtgccactgtgctccagcctggatgacggagccagaccctgtttcaaaaaaagaaaaagacaagaaagaagtatggactctaccttcttgcccttgtggagattgggaactgcctgcccttggcctctttcctgtccatcttgtattatgaaaggctgtttctggcacacccgggctcctctgtgtggtttctgggaagtgactgagggtcaggggaatggagcccctctgcagccggccgctggtaccttccctattgaacccttctttaggtttgctcactctttttgatgggtgtctttccaaagctggctggggacctccctgattgagagacatggggccagttctgttgctgtggctacacgggaataataaagcagaagaacacctgaggaaagctgatgtttacta

SEQ ID NO: 6879 - protein, 458 aa, Homo sapiens; identical to SEQ ID NO: 757

SEQ ID NO: 6880 - DNA, 1800 bp, Homo sapiens
gggcacaggagtgcggccgggggcggggccgagtgggccccggtacgaaccctccgggaagccgggcgcgctgcctgcccttggcccggggcgcagagcgtcacactggatctggggagcatcctacccccactgtggacctcagtctcctcacctgagacatgggcggccccatccgcaccctgtaagccgcaagccaaggaggcgtcatccctcaagtgtatcacttagttcaagagtcctggaatcttttcacatccactatgaacacctctcacctcctggccttgctgctcccaaaatctccacaaggtgaaaacagaagcaaacccctgggcaccccatacaacttctctgaacattgccaggattccgtggacgtgatggtcttcatcgtcacttcctacagcattgagactgtcgtgggggtcctgggtaacctctgcctgatgtgtgtgactgtgaggcagaaggagaaagccaacgtgaccaacctgcttatcgccaacctggccttctctgacttcctcatgtgcctcctctgccagccgctgaccgccgtctacaccatcatggactactggatctttggagagaccctctgcaagatgtcggccttcatccagtgcatgtcggtgacggtctccatcctctcgctcgtcctcgtggccctggagaggcatcagctcatcatcaacccaacaggctggaagcccagcatctcacaggcctacctggggattgtgctcatctgggtcattgcctgtgtcctctccctgcccttcctggccaacagcatcctggagaatgtcttccacaagaaccactccaaggctctggagttcctggcggataaggtggtctgtaccgagtcctggccactggctcaccaccgcaccatctacaccaccttcctgctcctcttccagtactgcctcccactgggcttcatcctggtctgttatgcacgcatctaccggcgcctgcagaggcaggggcgcgtgtttcacaagggcacctacagcttgcgagctgggcacatgaagcaggtcaatgtggtgctggtggtgatggtggtggcctttgctgtgctctggctgcctctgcatgtgttcaacagcctggaagactggcaccatgaggccatccccatctgccacgggaacctcatcttcttagtgtgccacttgcttgccatggcctccacctgcgtcaacccattcatctatggctttctcaacaccaacttcaagaaggagatcaaggccctggtgctgacttgccagcagagcgcccccctggaggagtcggagcatctgcccctgtccacagtacatacggaagtctccaaagggtccctgaggctaagtggcaggtccaatcccatttaaccaggtctaggtcttctccctgccatgtcccttgccaggctcttccacttagctaagtgggcacactgcaagctggggtggcaccccagcattcctggctttctggggtccagataggctggcaagagctgtttttgcatccatttgcatcgtgaagactggcattttgatacttcagctgtttgttcctgggagaattctgagcacagattccagaggtcacagtaagccttgcagcttgagctgaaagatgccagagccggagatgtctgctggcagcaggcagggttcattctggtgacacagcaacagatgcctggcctgggaacccagggatttcacctccaccagtgagaccacggggccactgtggggtgagggaaggagcgcttggagtcagagctctaga

SEQ ID NO: 6881 - protein, 375 aa, Homo sapiens; identical to SEQ ID NO: 759

SEQ ID NO: 6882 - DNA, 1956 bp, Homo sapiens
gggcacaggagtgcggccgggggcggggccgagtgggccccggtacgaaccctccgggaagccgggcgcgctgcctgcccttggcccggggcgcagagcgtcacactggatctggggagcatcctacccccactgtggacctcagtctcctcacctgagacatgggcggccccatccgcaccctgtaagccgcaagccaaggagattcctggcccccatcctggattcacttaactacatctcctggtggaagggccctgggatctgcactttcaacatgcttctagaatgattctgatgtttactgaaggttgagaactgcaaccctgtgggattaataatgactagagaatctgagaggcgtcatccctcaagtgtatcacttagttcaagagtcctggaatcttttcacatccactatgaacacctctcacctcctggccttgctgctcccaaaatctccacaaggtgaaaacagaagcaaacccctgggcaccccatacaacttctctgaacattgccaggattccgtggacgtgatggtcttcatcgtcacttcctacagcattgagactgtcgtgggggtcctgggtaacctctgcctgatgtgtgtgactgtgaggcagaaggagaaagccaacgtgaccaacctgcttatcgccaacctggccttctctgacttcctcatgtgcctcctctgccagccgctgaccgccgtctacaccatcatggactactggatctttggagagaccctctgcaagatgtcggccttcatccagtgcatgtcggtgacggtctccatcctctcgctcgtcctcgtggccctggagaggcatcagctcatcatcaacccaacaggctggaagcccagcatctcacaggcctacctggggattgtgctcatctgggtcattgcctgtgtcctctccctgcccttcctggccaacagcatcctggagaatgtcttccacaagaaccactccaaggctctggagttcctggcggataaggtggtctgtaccgagtcctggccactggctcaccaccgcaccatctacaccaccttcctgctcctcttccagtactgcctcccactgggcttcatcctggtctgttatgcacgcatctaccggcgcctgcagaggcaggggcgcgtgtttcacaagggcacctacagcttgcgagctgggcacatgaagcaggtcaatgtggtgctggtggtgatggtggtggcctttgctgtgctctggctgcctctgcatgtgttcaacagcctggaagactggcaccatgaggccatccccatctgccacgggaacctcatcttcttagtgtgccacttgcttgccatggcctccacctgcgtcaacccattcatctatggctttctcaacaccaacttcaagaaggagatcaaggccctggtgctgacttgccagcagagcgcccccctggaggagtcggagcatctgcccctgtccacagtacatacggaagtctccaaagggtccctgaggctaagtggcaggtccaatcccatttaaccaggtctaggtcttctccctgccatgtcccttgccaggctcttccacttagctaagtgggcacactgcaagctggggtggcaccccagcattcctggctttctggggtccagataggctggcaagagctgtttttgcatccatttgcatcgtgaagactggcattttgatacttcagctgtttgttcctgggagaattctgagcacagattccagaggtcacagtaagccttgcagcttgagctgaaagatgccagagccggagatgtctgctggcagcaggcagggttcattctggtgacacagcaacagatgcctggcctgggaacccagggatttcacctccaccagtgagaccacggggccactgtggggtgagggaaggagcgcttggagtcagagctctaga

SEQ ID NO: 6883 - protein, 43 aa, Homo sapiens
MTRESERRHPSSVSLSSRVLESFHIHYEHLSPPGLAAPKISTR

SEQ ID NO: 6884 - DNA, 1598 bp, Homo sapiens
aggcgtcatccctcaagtgtatcacttagttcaagagtcctggaatcttttcacatccactatgaacacctctcacctcctggccttgctgctcccaaaatctccacaaggtgaaaacagaagcaaacccctgggcaccccatacaacttctctgaacattgccaggattccgtggacgtgatggtcttcatcgtcacttcctacagcattgagactgtcgtgggggtcctgggtaacctctgcctgatgtgtgtgactgtgaggcagaaggagaaagccaacgtgaccaacctgcttatcgccaacctggccttctctgacttcctcatgtgcctcctctgccagccgctgaccgccgtctacaccatcatggactactggatctttggagagaccctctgcaagatgtcggccttcatccagtgcatgtcggtgacggtctccatcctctcgctcgtcctcgtggccctggagaggcatcagctcatcatcaacccaacaggctggaagcccagcatctcacaggcctacctggggattgtgctcatctgggtcattgcctgtgtcctctccctgcccttcctggccaacagcatcctggagaatgtcttccacaagaaccactccaaggctctggagttcctggcggataaggtggtctgtaccgagtcctggccactggctcaccaccgcaccatctacaccaccttcctgctcctcttccagtactgcctcccactgggcttcatcctggtctgttatgcacgcatctaccggcgcctgcagaggcaggggcgcgtgtttcacaagggcacctacagcttgcgagctgggcacatgaagcaggtcaatgtggtgctggtggtgatggtggtggcctttgctgtgctctggctgcctctgcatgtgttcaacagcctggaagactggcaccatgaggccatccccatctgccacgggaacctcatcttcttagtgtgccacttgcttgccatggcctccacctgcgtcaacccattcatctatggctttctcaacaccaacttcaagaaggagatcaaggccctggtgctgacttgccagcagagcgcccccctggaggagtcggagcatctgcccctgtccacagtacatacggaagtctccaaagggtccctgaggctaagtggcaggtccaatcccatttaaccaggtctaggtcttctccctgccatgtcccttgccaggctcttccacttagctaagtgggcacactgcaagctggggtggcaccccagcattcctggctttctggggtccagataggctggcaagagctgtttttgcatccatttgcatcgtgaagactggcattttgatacttcagctgtttgttcctgggagaattctgagcacagattccagaggtcacagtaagccttgcagcttgagctgaaagatgccagagccggagatgtctgctggcagcaggcagggttcattctggtgacacagcaacagatgcctggcctgggaacccagggatttcacctccaccagtgagaccacggggccactgtggggtgagggaaggagcgcttggagtcagagctctaga

SEQ ID NO: 6885 - protein, 375 aa, Homo sapiens; identical to SEQ ID NO: 759

SEQ ID NO: 6886 - DNA, 3414 bp, Homo sapiens
gaggtcgcgtcccccctcgtgaccagcaaactcctaaaagcggcccttgccccagagcccctgtagcctccaaccggcagtcaggaggcagcgccgtctcagcgccgcttagtggcgccaggcgtgcctggaaatccgctttcgcagcgccccctcgtagccgcctccggccgcagaaaggcgttccctggacagagaagcgggcgcgcgggggcgggcgcgcggggccttgccggagaacctgactctccgcagcagcagtggaagccggagtgacgcgttgtgttgaacaccagttttctggagcgctgtgtgttcttaacagctgagcagtctgtttctccaatcaggtttcaaagccacttcaactgcactggcccctgtgggtcactgctgcaccgccctgacccatgtgggtccctgaggagcgacctgccggggccacctggctggatgaaaaagacacaccttggacttaagccgtgagaaaaaaaaaacttcatcagtaagaagaatgaataaacagactaggttgaatccatacaatggaatgttagcagacaataaaaagaaaatgaactactgatgccccctactgcacagcagaagctctgaatcgtgttcctgaatgaaagaagtcagagatgaaaagatgggccaggagtccagtttctggaaggccaagaatcgaagtagtaagctgcagccgttttccagacaagcaggatgtggggatgcagaagaattcaggactggaggggcaaactccgatgtgactgaggccccactgccaaatagcagcatgctcagatagcacccaggaatttggggaaaaaaactggtgctcacagctgcccagttaaggcacaactctcccgcctgctgcagggcttgtgaggtgtatcagaaccttgaagagatactctgggaagaaaggccttcccagactgcctctccgcagcgctgtaagaatcagatttcttctatgggggacttccaggtctcttcagcattttctcagtcatcactgtatccctgccactcagtgaaccacagcaacaactcccagcttccagccgagaagcttgaccctgaagctggcctcgattctctacagaagtgaggccacagagcacaggtgaagggccacttacctggtatcatctctggtctcagctctggagaactagctcctctgccactgccacatcctgtccaccaagacctccttgctgaaccccacccccacccggtgcctcaggaccctaacttgtttgctgacctccatgtcctctcaccagatccagccctggggagctgaacttcctctggcccactgccagctctggatcagtccacaccccagccagccacagcccagccctgcctctctctgtctctctctcatggctgggttggccttggccaatgctctctctagagatcaagacacaggcacctctcttggtctgttctggctgctgtgacaaaatgccttaagctgggtggcttataaaccacagaaatttatttctcactgttctggaggctgggaagtcctacagactggggtactggcctgcttgtttcctcgtgagggctctcttcctgggttgcagatggacatctccctgatgtatcttcacatggcagagagagagagagagagagagacagaaagacagagaaagagagagagagagagagagagcatgctctttggtctcttctggtaagggcctaatcccgtcatgaagaatccccataacttcaactaaatctaatcacttctcaaaggctccatctccacataccatcccattgtgggttagggtttcaacataggaattctggaggcacacaaacgtgcagttcaaaacatgtggagacaagggggcaaggactagagagccctaccatcctcgttcaaacccttgaatcaagcctgaagtcaaagaacttcctttggagagccccattccatgagccgataatttccccattttgccatcacccacttgagtttgggattttcccccagttactgagtgcctgactgacatgatgccccccacagatgggcctccctgcccccaatctcacctcctctgttagtttcctggggttgccacaacaaagcgttacaggcagagcggctaaaacgacagaaacttatggtctcacagttctggaggctgcaagttcaaggtcaaggtgtcagcagggttggttccttcggaaggctgtgcaggagcctgttgggtgcctgtccctcagcttctagtggattacttccatcttcagcatgccttggcttgtagaaggactaccctgaactctgccttcatggtcacaacacatcctccctgtgtgtgtttctgtgtccaaatttccccttcttataaggacaccagtcttatacggacaatgctcaatgtatgaacctttgccaagggattggattagggacccactatattccagtatgacctcatcttaactaattatacctgcaatgacactgcttccaaagaaggccacatgatgaggtaccgttggttaggaattcaatatatgagtttggggggacacagttcagcccacaccacctcctctgaccctgaattggatgctgtttctgctctgcttatgatcctcttgtcctcactggcctcttggtccagcacccactgaggcaccagctctgagagagctcactggcttcacacaggtgcgacctgatggcgcctcacctcacaccccaaacatccttctcatctctgcaggacctgctctgtttatgtccaggtatgttcagtgttcctgtgtgtccccagagtgtggggaggtaatgctccatgtacgaacctttgccaagggaatatggaaaccgatggatgagttcttacctcttttttcgtccagacaaactgtcctaagatggttttaagagataccgagtaatcagctgccagctcagtagcgcatcttcagattgactctccctccttccctgtctccttccccatattcttcatcttgttccctgggatctttctccctaataaaggaaaagctcatagacctctgccccagcttctgctttctggggaatgcaggccaatccagccacactactctccctccatgtaacctgaccatgccatccccctgcttaaaagctttcagtgcttctccattgcccataaagctcatactttctagctatgagcttcaaggccacttggaggtcatctggccaactgtccttcctgctacaacagtctaagtcataggctttggaagacaactgattgggtttcatctttggctcttattgaaaatgtggaaaaaattatttcacctctataagcttcagtttcttcatctatctgatctcaggattgagggaag

SEQ ID NO: 6887 - protein, 61 aa, Homo sapiens
MKEVRDEKMGQESSFWKAKNRSSKLQPFSRQAGCGDAEEFRTGGANSDVTEAPLPNSSMLR

SEQ ID NO: 6888 - DNA, 3083 bp, Homo sapiens
gaggtcgcgtcccccctcgtgaccagcaaactcctaaaagcggcccttgccccagagcccctgtagcctccaaccggcagtcaggaggcagcgccgtctcagcgccgcttagtggcgccaggcgtgcctggaaatccgctttcgcagcgccccctcgtagccgcctccggccgcagaaaggcgttccctggacagagaagcgggcgcgcgggggcgggcgcgcggggccttgccggagaacctgactctccgcagcagcagtggaagccggagtgacgcgttgtgttgaacaccagttttctggagcgctgtgtgttcttaacagctgagcagtctgtttctccaatcaggtttcaaagccacttcaactgcactggcccctgtgggtcactgctgcaccgccctgacccatgtgggtccctgaggagcgacctgccggggccacctggctggatgaaaaagacacaccttggacttaagccgtgagaaaaaaaaaacttcatcagtaagaagaatgaataaacagactaggttgaatccatacaatggaatgttagcagacaataaaaagaaaatgaactactgatgccccctactgcacagcagaagctctgaatcgtgttcctgaatgaaagaagtcagagatgaaaagatgggccaggagtccagtttctggaaggccaagaatcgaagtagtaagctgcagccgttttccagacaagcaggatgtggggatgcagaagaattcaggactggaggggcaaactccgatgtgactgaggccccactgccaaatagcagcatgctcagatagcacccaggaatttggggaaaaaaactggtgctcacagctgcccagttaaggcacaactctcccgcctgctgcagggcttgtgaggtgtatcagaaccttgaagagatactctgggaagaaaggccttcccagactgcctctccgcagcgctgtaagaatcagatttcttctatgggggacttccaggtctcttcagcattttctcagtcatcactgtatccctgccactcagtgaaccacagcaacaactcccagcttccagccgagaagcttgaccctgaagctggcctcgattctctacagaagtgaggccacagagcacaggtgaagggccacttacctggtatcatctctggtctcagctctggagaactagctcctctgccactgccacatcctgtccaccaagacctccttgctgaaccccacccccacccggtgcctcaggaccctaacttgtttgctgacctccatgtcctctcaccagatccagccctggggagctgaacttcctctggcccactgccagctctggatcagtccacaccccagccagccacagcccagccctgcctctctctgtctctctctcatggctgggttggccttggccaatgctctctctagagatcaagacacaggcacctctcttggtctgttctggctgctgtgacaaaatgccttaagctgggtggcttataaaccacagaaatttatttctcactgttctggaggctgggaagtcctacagactggggtactggcctgcttgtttcctcgtgagggctctcttcctgggttgcagatggacatctccctgatgtatcttcacatggcagagagagagagagagagagagacagaaagacagagaaagagagagagagagagagagagcatgctctttggtctcttctggtaagggcctaatcccgtcatgaagaatccccataacttcaactaaatctaatcacttctcaaaggctccatctccacataccatcccattgtgggttagggtttcaacataggaattctggaggcacacaaacgtgcagttcaaaacatgtggagacaagggggcaaggactagagagccctaccatcctcgttcaaacccttgaatcaagcctgaagtcaaagaacttcctttggagagccccattccatgagccgataatttccccattttgccatcacccacttgagtttgggattttcccccagttactgagtgcctgactgacatgatgccccccacagatgggcctccctgcccccaatctcacctcctctgttagtttcctggggttgccacaacaaagcgttacaggcagagcggctaaaacgacagaaacttatggtctcacagttctggaggctgcaagttcaaggtcaaggtgtcagcagggttggttccttcggaaggctgtgcaggagcctgttgggtgcctgtccctcagcttctagtggattacttccatcttcagcatgccttggcttgtagaaggactaccctgaactctgccttcatggtcacaacacatcctccctgtgtgtgtttctgtgtccaaatttccccttcttataaggacaccagtcttatacggacaatgctcaatgtatgaacctttgccaagggattggattagggacccactatattccagtatgacctcatcttaactaattatacctgcaatgacactgcttccaaagaaggccacatgatgaggtaccgttggttaggaattcaatatatgagtttggggggacacagttcagcccacaccacctcctctgaccctgaattggatgctgtttctgctctgcttatgatcctcttgtcctcactggcctcttggtccagcacccactgaggcaccagctctgagagagctcactggcttcacacaggtgcgacctgatggcgcctcacctcacaccccaaacatccttctcatctctgcaggacctgctctgtttatgtccaggtatgttcagtgttcctgtgtgtccccagagtgtggggaggtaatgctccatgtacgaacctttgccaagggaatatggaaaccgatggatgagttcttacctcttttttcgtccagacaaactgtcctaagatggttttaagagataccgagtaatcagctgccagctcagtagcgcatcttcagattgactctccctccttccctgtctccttccccatattcttcatcttgttccctgggatctttctccctaataaaggaaaagctcatag

SEQ ID NO: 6889 - protein, 61 aa, Homo sapiens; identical to SEQ ID NO: 6887

SEQ ID NO: 6890 - DNA, 881 bp, Homo sapiens
gaggtcgcgtcccccctcgtgaccagcaaactcctaaaagcggcccttgccccagagcccctgtagcctccaaccggcagtcaggaggcagcgccgtctcagcgccgcttagtggcgccaggcgtgcctggaaatccgctttcgcagcgccccctcgtagccgcctccggccgcagaaaggcgttccctggacagagaagcgggcgcgcgggggcgggcgcgcggggccttgccggagaacctgactctccgcagcagcagtggaagccggagtgacgcgttgtgttgaacaccagttttctggagcgctgtgtgttcttaacagctgagcagtctgtttctccaatcaggtttcaaagccacttcaactgcactggcccctgtgggtcactgctgcaccgccctgacccatgtgggtccctgaggagcgacctgccggggccacctggctggatgaaaaagacacaccttggacttaagccgtgagaaaaaaaaaacttcatcagtaagaagaatgaataaacagactaggttgaatccatacaatggaatgttagcagacaataaaaagaaaatgaactactgatgccccctactgcacagcagaagctctgaatcgtgttcctgaatgaaagaagtcagagatgaaaagatgggccaggagtccagtttctggaaggccaagaatcgaagtagtaagctgcagccgttttccagacaagcaggatgtggggatgcagaagaattcaggactggaggggcaaactccgtaagcaggggctgtcacgattcccatctccctctataaacctctctcttttcatgtcatactgttccatgttatatgtaactgttttaaagctacatactggacaaaaagt

SEQ ID NO: 6891 - protein, 59 aa, Homo sapiens
MKEVRDEKMGQESSFWKAKNRSSKLQPFSRQAGCGDAEEFRTGGANSVSRGCHDSHLPL

SEQ ID NO: 6892 - DNA, 1434 bp, Homo sapiens
tgtggtcactcaggtcccatagactctagaggtcaaagggcctccgagcatttgagaatcagagagggcaagtaacttggctgatatcacatagcacgaaggtggcagagccaggattccacctgctggcctcccagatgtctttcctgttggaccctgcttgctggccactcctggtgggggtcactccaccattagtgtgttcatcaaactgacagttgtggtccagatcccttgcctctggtgtgcccagcaccttagctggcacctccctcagcaaacccagccttcgccatcctcccaagcatacttcccagggctgttttgtccattacggtcccagaatataaggcctttgggttttttcagggcctgtgaaaaggtttgaaacatgaaaaacacactggcagttccaaaattctcaaataaaactgtagaaatgccttaggaattaaatatgtaataagatgtgaacacttcattacacacctacaattagtcacatgcctacgatatgtgaataatgtcaggtcagctagtgaactgttatacagtaattgcgcatcacttatatagatatacacaaagtgcacttactgacttggatgtgtgtgttcattgtttgaagtggcgtggatggaggctccaaaagataaaagaatgtaggggaggtgactcttcaaatggccctcacccaccccttaccctcagctcacccaccatgaagcttccccttccaaggaggacacacctcctttcctagaacattcttcagtgccacaagctgctcagtcagccctgattctggagtctccagtgagcgaggcctatactttgcaaaaccatgaaaccaaggtggctattggcggttccagcagcagcagtagctatggcagtggcagattttaattaggaaacaaagcttagcaggagaggagagccagagaaatgacagggaatctacaggttacgacagatttgtgaactcagccaagcacagtggtggcagggcctagctgctacaaagaagacatgttttagacaaatactcatgtgtatgggcaaaaaactcgaggactgtatttgtgactaactgtataacaggttattttagtttctgttctgtgggaagtgtaaagcattccagctaagggttttaatataggttttttttttgcacccatgctgttgattgctaaatgtaatagtctgatcatgacgctgaataaatgtcttttgttttaatgtgctgtgtaaagttagtttactctgaagctatcttggtaaatttccccaacagtgtgaagttagaattccttcagggtgatgccaagttctatttggaatttatatacaacctgcttgggtggagaagccattgtcttcagaaacctttggtgtagttgaactgatagttactgttgtgacctgaag

SEQ ID NO: 6893 - protein, 79 aa, Homo sapiens
MSGQLVNCYTVIAHHLYRYTQSALTDLDVCVHCLKWRGWRLQKIKECRGGDSSNGPHPPLTLSSPTMKLPLPRRTHLLS

SEQ ID NO: 6894 - DNA, 1153 bp, Homo sapiens
atccaggtagcctcaccctgagtggcagcctggctgggtgagttctaaaaatgcccaagacctccaagactaggtgagatctgaagtaatgaaatgcctccattcactaaaggcctgaaattgtcctgactgcctcagtcccacggaccaagaagagcctttcaagctgtgatcccaatacttgtggctgctgtgagaataaggaaagcagcctaggcctcaagtggaaggatcagatgtttgtccttcatacctcagagagccttcatccaagtaagatgggtggtgaggagctgtggatgacagcatgaaggatgaggactgatgcagcagccataattagattataggtttccatgggatgtgccatgactgcttacaaatggggcccagccatggaattgagttatcaactaagctgattcctgaggcacagatcatcctgtcctccacaacatgattaaagactacatgatgctcaggaagacctctgcagctgtgtgcttggaagagtgtgtttttcctgctaaagcataagaaaaaagagaccagcaattattatcttaggccttgcagcatcctttctggtcccacaagtttgagaaggcagtggcgtggatggaggctccaaaagataaaagaatgtaggggaggtgactcttcaaatggccctcacccaccccttaccctcagctcacccaccatgaagcttccccttccaaggaggacacacctcctttcctagaacattcttcagtgccacaagctgctcagtcagccctgattctggagtctccagtgagcgaggccaggggtggccccagtgggatgagccacactccccacagcactcagcctggatgtggcactggctgcacatagcaagaggcagctattggacacctgctcgccacatgttctgtcttatcctcccagcaacaccgagtgagggagggagtgttaacccaccattcaccaggtttaccagagaccaagcccaggatctctccactgcacacttttaaaagggtcctttcagcttcccattaaagaagtttgttcctttgttcctcctctcctgttcttcctaagacatcatcactgaaatttaagcttataaatttaaaatgaagtaaatctataagggaaaagc

SEQ ID NO: 6895 - protein, 54 aa, Homo sapiens
MWHWLHIARGSYWTPARHMFCLILPATPSEGGSVNPPFTRFTRDQAQDLSTAHF

SEQ ID NO: 6896 - DNA, 949 bp, Homo sapiens
aatacctcggtaagccctaggcctgagtgtgaggttgcaggcacttccatggccccatgcaggtgtctaagttccctcgtggtatttggccaaggggggccctgtgtgatgccctagcgcggtgactacccgtgttcctggcccatgggcatcttccacggaattctgggcttagcctggggattcatgcgggcacatctctgtgatctgctctggagcaggatgtacatcaggtctctcagacctgagtccctggtgcctggcgctcagccttgactgaagtgcttggcccaccctgctgggccagccagctcctgctcagggccacagccctgtaaccacggcttcctccccaggactcaggaattctcccactccggaatgccttgctgctggggtaaccaggtcttcacttgtgaaacaggagtcggccacctcagccctgcgcctggcctggtggaacatgggtcaccgccccaacctggggcagccgccccatcccaacgcagttgctgccgctctccatgcctccctgtgcccagctaaccgggggacttgtcccctgggaaaacctgggtacccaggctgcctttggtttcagcccctactcctcttcccgggctgcctgtgctccccggacggcccctttccccgggctgtgttcacatcggctgggaagggtcccttgcagacagatcttggacgaggtcgcgtcccccctcgtgaccagcaaactcctaaaagcggcccttgccccagagcccctgtagcctccaaccggcagtcaggaggcagcgccgtctcagcgccgcttagtggcgccaggcgtgcctggaaatccgctttcgcagcgccccctcgtagccgcctccggccgcagaaaggcgttccctggacagagaagcgggcgcgcgggggcgggcgcgcggggccttgccggagaacctga

SEQ ID NO: 6897 - protein, 161 aa, Homo sapiens
MGHRPNLGQPPHPNAVAAALHASLCPANRGTCPLGKPGYPGCLWFQPLLLFPGCLCSPDGPFPRAVFTSAGKGPLQTDLGRGRVPPRDQQTPKSGPCPRAPVASNRQSGGSAVSAPLSGARRAWKSAFAAPPRSRLRPQKGVPWTEKRARGGGRAGPCRRT

SEQ ID NO: 6898 - DNA, 1419 bp, Homo sapiens
gatatcccctgaagttagttccacacccgaaacccaagccctctggccacttctgcccaggaaatgagagagggcatgcgattcccttggccatgtggccccagctgacatgagactggtcagggatgaaggtgagcaggaaggccctgcctgtgaaattcctggctgagctgattgctgccattgctctagtaggaagtcttgttcctggagcagtgagtattttgtgtctagaatctgatgtggcaaaccaaacatactgcagtttggagcacttggcatcataaaggaagagttctgggcagtgggtgagaaggaattaagggagtggacaccctaagccaccaaagcttccctcctaatgcttccctggctgaagcacaggctccttcccacatctccctccctctaaaagccccagaacccaaccacacagatccgtccatcactcagagatggacaggaaaggtgaggcaggattgttgatggctgctgtcttgcccagggagcagggacgcgtgatgggaccctgataagaaacatcgtttcaaggagcgagattgacttaaatcttatcaaatgtcacttcaagaagatgtacggcaagaccctcagcagcatgatcatggaagacaccagcggcgactacaagaacgccctgctgagcctggtgggcagcgacccctgaggcacagaagaacaagagcaaagaccatgaagccagagtctccaggactcctcactcaacctcggccatggacgcaggtcatttcccagtgtgagcacaatgccaaccttagtgtttctccagccagacagatgcctcagcatgaagggcttggggacttgtggatcattccttcctccctgcaggagcttcccaagctggtcacagagtctcctgggcacaggttatacagaccccagccccattcccatctactgaaacagggtctccacaagaggggccagggaatatgggtttttaacaagcgtcttacaaaacacttctctatcatgcagccggagagctggctgggagcccttttgttttagaacacacatccttcagcagctgagaaacgaacacgaatccatcccaaccgagatgccattaacattcatctaaaaatgttaggctctaaatggacgaaaaattctctcgccatcttaataacaaaataaactacaaattcctgacccaaggacactgtgttataagaggcgtgggctcccctggtggctgaccaggtcagctgccctggccttgcacccctctgcatgcagcacagaagggtgtgaccatgccctcagcaccactcttgtccccactgaacggcaactgagactgggtacctggagattctgaagtgcctttgctgtggttttcaaaataataaagatttgtattcaactcaa

SEQ ID NO: 6899 - protein, 158 aa, Homo sapiens
MSLQEDVRQDPQQHDHGRHQRRLQERPAEPGGQRPLRHRRTRAKTMKPESPGLLTQPRPWTQVISQCEHNANLSVSPARQMPQHEGLGDLWIIPSSLQELPKLVTESPGHRLYRPQPHSHLLKQGLHKRGQGIWVFNKRLTKHFSIMQPESWLGALLF

SEQ ID NO: 6900 - DNA, 1971 bp, Homo sapiens
ccacccctggatctggcctgaacccaccaagaatgaagtctgccagcagggaatagtgaagccatgcagtgctccgtcatgctgggccttcctattcacttcaccttgaagcctcgcatcagtctcacttcccagatgagtcagggaggttgagtaatgaagccatactgcaccatcaaggcaggaagtgaacacatgcctacctcactcaaagcccatgctccttctgcagccctaagtgaaaatgccaaccttccccacccagatgccaagtctctgagcagtacccatgggagcaagcatgggcccagtctctggaccagacgcccccaggtgccttagtcctgtggggccaaactccacttgtcacatgggaattcaaaatgcagggttcctgctgataagtgtgagagagagggcactctgaggccagcagccaccatcccatggtgcttctgtggagctgagaggctggatttttggtggaggtgtctctgggttgagagcccagggcctgtcctgagtctgagctgcccttggatgggcttgagctggtgtcttcagacgagccccacagtctggtgcatttcacatcttacccttttgcctgcctgcttgggcctttggagctgtgcccagtgccccgggctaccttccctgtcccacgccacctgacacaaagcctctcacattgggaaaggcacggaacaaagaaatatgccaagccttgcacaacactgactcttaagacctaaggcaagacataaagttgtaggcagtgccacctaccagctccagacattaacacagctttcttgtttgccagtgaaatgcacccaaaacctccacagctactttgcagagagactctactatgccatgaagggagcagggacgcgtgatgggaccctgataagaaacatcgtttcaaggagcgagattgacttaaatcttatcaaatgtcacttcaagaagatgtacggcaagaccctcagcagcatgatcatggagtggaactgtctctgattcattttccacatcaatcctgcatgtagttggaagacaccagcggcgactacaagaacgccctgctgagcctggtgggcagcgacccctgaggcacagaagaacaagagcaaagaccatgaagccagagtctccaggactcctcactcaacctcggccatggacgcaggttgggtgtgaggggggtcccagcctttcagtcttctatttccctatttccagtgctttccagccgggtttctgacccagagggtggaaccggcctggactcctcttcccaacttcctccaggtcatttcccagtgtgagcacaatgccaaccttagtgtttctccagccagacagatgcctcagcatgaagggcttggggacttgtggatcattccttcctccctgcaggagcttcccaagctggtcacagagtctcctgggcacaggttatacagaccccagccccattcccatctactgaaacagggtctccacaagaggggccagggaatatgggtttttaacaagcgtcttacaaaacacttctctatcatgcagccggagagctggctgggagcccttttgttttagaacacacatccttcagcagctgagaaacgaacacgaatccatcccaaccgagatgccattaacattcatctaaaaatgttaggctctaaatggacgaaaaattctctcgccatcttaataacaaaataaactacaaattcctgacccaaggacactgtgttataagaggcgtgggctcccctggtggctgaccaggtcagctgccctggccttgcacccctctgcatgcagcacagaagggtgtgaccatgccctcagcaccactcttgtccccactgaacggcaactgagactgggtacctggagattctgaagtgcctttgctgtggttttcaaaataataaagatttgtattcaactcaa

SEQ ID NO: 6901 - protein, 48 aa, Homo sapiens
MKGAGTRDGTLIRNIVSRSEIDLNLIKCHFKKMYGKTLSSMIMEWNCL

SEQ ID NO: 6902 - DNA, 1460 bp, Homo sapiens
tcctggtgtgcctcctgcaggtgtcacagcctaggctcttgggagtgccttggtttgggagtcccaacagctccaccccagggagcagcccttgaatagcgccacaagagtcaggggcagcagggatgatgtgagcagctttgtggacccaggactggccctccaagacgcacaggatctgtatgcggcaggcgagaagattcgtgggactgatgagatgaaattcatcaccatcctgtgcacgcgcagtgccactcacctgctgagagtgtttgaagagtatgagaaaattgccaacaagagcattgaggacagcatcaagagtgagacccatggctcactggaggaggccatgctcactgtggtgaaatgcacccaaaacctccacagctactttgcagagagactctactatgccatgaagggagcagggacgcgtgatgggaccctgataagaaacatcgtttcaaggagcgagattgacttaaatcttatcaaatgtcacttcaagaagatgtacggcaagaccctcagcagcatgatcatggaagacaccagcggcgactacaagaacgccctgctgagcctggtgggcagcgacccctgaggcacagaagaacaagagcaaagaccatgaagccagagtctccaggactcctcactcaacctcggccatggacgcaggttgggtgtgaggggggtcccagcctttcagtcttctatttccctatttccagtgctttccagccgggtttctgacccagagggtggaaccggcctggactcctcttcccaacttcctccaggtcatttcccagtgtgagcacaatgccaaccttagtgtttctccagccagacagatgcctcagcatgaagggcttggggacttgtggatcattccttcctccctgcaggagcttcccaagctggtcacagagtctcctgggcacaggttatacagaccccagccccattcccatctactgaaacagggtctccacaagaggggccagggaatatgggtttttaacaagcgtcttacaaaacacttctctatcatgcagccggagagctggctgggagcccttttgttttagaacacacatccttcagcagctgagaaacgaacacgaatccatcccaaccgagatgccattaacattcatctaaaaatgttaggctctaaatggacgaaaaattctctcgccatcttaataacaaaataaactacaaattcctgacccaaggacactgtgttataagaggcgtgggctcccctggtggctgaccaggtcagctgccctggccttgcacccctctgcatgcagcacagaagggtgtgaccatgccctcagcaccactcttgtccccactgaacggcaactgagactgggtacctggagattctgaagtgcctttgctgtggttttcaaaataataaagatttgtattcaactcaa

SEQ ID NO: 6903 - protein, 129 aa, Homo sapiens [sequence omitted]

SEQ ID NO: 6904 - DNA, 2026 bp, Homo sapiens
tcaacaaggtggggattaaaatccaggtctgacaaagcccttgatctctctgctgctctgtagatcagctgatgtagcctggtggctcctcgtagcaacatgtgaccttagaaggaggcacatgtgagacgaagtctttaattcaggcatgcattcattcattgagtgccaagtgacaggtattttatggtgatgccatactcagagcttgcagtctagctagcaataccaatttcattttactgagagcttatgatgtgcccagcactgcactgaatgctgaattgagtcacacacaaccccctaagcaacgggatgaagcaggagcacgtttctctccgtgtaaccggtaaagatactgatgctaagagaagctaaggagctggcccaagaaacccagccagcacgtggcaaggcccacgcagaatccagcccaagcccctggacccagccaccactccgctgcctgcactcagatacgaagccaaggagctgcatgacgccatgaagggcttaggaaccaaggagggtgtcatcattgagatcctggcctctcggaccaagaaccagctgcgggagataatgaaggcgtatgaggaagactatgggtccagcctggaggaggacatccaagcagacacaagtggctacctggagaggatcctggtgtgcctcctgcagggcagcagggatgatgtgagcagctttgtggacccaggactggccctccaagacgcacaggatctgtatgcggcaggcgagaagattcgtgggactgatgagatgaaattcatcaccatcctgtgcacgcgcagtgccactcacctgctgagagtgtttgaagagtatgagaaaattgccaacaagagcattgaggacagcatcaagagtgagacccatggctcactggaggaggccatgctcactgtggtgaaatgcacccaaaacctccacagctactttgcagagagactctactatgccatgaagggagcagggacgcgtgatgggaccctgataagaaacatcgtttcaaggagcgagattgacttaaatcttatcaaatgtcacttcaagaagatgtacggcaagaccctcagcagcatgatcatggaagacaccagcggcgactacaagaacgccctgctgagcctggtgggcagcgacccctgaggcacagaagaacaagagcaaagaccatgaagccagagtctccaggactcctcactcaacctcggccatggacgcaggttgggtgtgaggggggtcccagcctttcagtcttctatttccctatttccagtgctttccagccgggtttctgacccagagggtggaaccggcctggactcctcttcccaacttcctccaggtcatttcccagtgtgagcacaatgccaaccttagtgtttctccagccagacagatgcctcagcatgaagggcttggggacttgtggatcattccttcctccctgcaggagcttcccaagctggtcacagagtctcctgggcacaggttatacagaccccagccccattcccatctactgaaacagggtctccacaagaggggccagggaatatgggtttttaacaagcgtcttacaaaacacttctctatcatgcagccggagagctggctgggagcccttttgttttagaacacacatccttcagcagctgagaaacgaacacgaatccatcccaaccgagatgccattaacattcatctaaaaatgttaggctctaaatggacgaaaaattctctcgccatcttaataacaaaataaactacaaattcctgacccaaggacactgtgttataagaggcgtgggctcccctggtggctgaccaggtcagctgccctggccttgcacccctctgcatgcagcacagaagggtgtgaccatgccctcagcaccactcttgtccccactgaacggcaactgagactgggtacctggagattctgaagtgcctttgctgtggttttcaaaataataaagatttgtattcaactcaa

SEQ ID NO: 6905 - protein, 222 aa, Homo sapiens [sequence omitted]

SEQ ID NO: 6906 - DNA, 1879 bp, Homo sapiens
gacggcaggcaggtgtggcgctgccctgggcgggcttgcacccccacacccaagtgagcggcctgctcactcctcagctgcaggagccagacgtgtggagtcccagcagaggccaacctgtgtctcttcatctccctgggaaaggtgcccccgaggtgaaagagatggcctggtggaaatcctggattgaacaggagggtgtcacagtgaagagcagctcccacttcaacccagaccctgatgcagagaccctctaccaagccatgaaggggatcgggaccaacgagcaggctatcatcgatgtgctcaccaagagaagcaacacgcagcggcagcagatcgccaagtccttcaaggctcagttcggcaaggacctcactgagaccttgaagtctgagctcagtggcaagtttgagaggctcattgtggcccttatgtacccgccatacagatacgaagccaaggagctgcatgacgccatgaagggcttaggaaccaaggagggtgtcatcattgagatcctggcctctcggaccaagaaccagctgcgggagataatgaaggcgtatgaggaagactatgggtccagcctggaggaggacatccaagcagacacaagtggctacctggagaggatcctggtgtgcctcctgcagggcagcagggatgatgtgagcagctttgtggacccaggactggccctccaagacgcacaggatctgtatgcggcaggcgagaagattcgtgggactgatgagatgaaattcatcaccatcctgtgcacgcgcagtgccactcacctgctgagagtgtttgaagagtatgagaaaattgccaacaagagcattgaggacagcatcaagagtgagacccatggctcactggaggaggccatgctcactgtggtgaaatgcacccaaaacctccacagctactttgcagagagactctactatgccatgaagggagcagggacgcgtgatgggaccctgataagaaacatcgtttcaaggagcgagattgacttaaatcttatcaaatgtcacttcaagaagatgtacggcaagaccctcagcagcatgatcatggaagacaccagcggcgactacaagaacgccctgctgagcctggtgggcagcgacccctgaggcacagaagaacaagagcaaagaccatgaagccagagtctccaggactcctcactcaacctcggccatggacgcaggtcatttcccagtgtgagcacaatgccaaccttagtgtttctccagccagacagatgcctcagcatgaagggcttggggacttgtggatcattccttcctccctgcaggagcttcccaagctggtcacagagtctcctgggcacaggttatacagaccccagccccattcccatctactgaaacagggtctccacaagaggggccagggaatatgggtttttaacaagcgtcttacaaaacacttctctatcatgcagccggagagctggctgggagcccttttgttttagaacacacatccttcagcagctgagaaacgaacacgaatccatcccaaccgagatgccattaacattcatctaaaaatgttaggctctaaatggacgaaaaattctctcgccatcttaataacaaaataaactacaaattcctgacccaaggacactgtgttataagaggcgtgggctcccctggtggctgaccaggtcagctgccctggccttgcacccctctgcatgcagcacagaagggtgtgaccatgccctcagcaccactcttgtccccactgaacggcaactgagactgggtacctggagattctgaagtgcctttgctgtggttttcaaaataataaagatttgtattcaactcaa

SEQ ID NO: 6907 - protein, 327 aa, Homo sapiens [sequence omitted]

SEQ ID NO: 6908 - DNA, 2001 bp, Homo sapiens
gacggcaggcaggtgtggcgctgccctgggcgggcttgcacccccacacccaagtgagcggcctgctcactcctcagctgcaggagccagacgtgtggagtcccagcagaggccaacctgtgtctcttcatctccctgggaaaggtgcccccgaggtgaaagagatggcctggtggaaatcctggattgaacaggagggtgtcacagtgaagagcagctcccacttcaacccagaccctgatgcagagaccctctaccaagccatgaaggggatcgggaccaacgagcaggctatcatcgatgtgctcaccaagagaagcaacacgcagcggcagcagatcgccaagtccttcaaggctcagttcggcaaggacctcactgagaccttgaagtctgagctcagtggcaagtttgagaggctcattgtggcccttatgtacccgccatacagatacgaagccaaggagctgcatgacgccatgaagggcttaggaaccaaggagggtgtcatcattgagatcctggcctctcggaccaagaaccagctgcgggagataatgaaggcgtatgaggaagactatgggtccagcctggaggaggacatccaagcagacacaagtggctacctggagaggatcctggtgtgcctcctgcagggcagcagggatgatgtgagcagctttgtggacccaggactggccctccaagacgcacaggatctgtatgcggcaggcgagaagattcgtgggactgatgagatgaaattcatcaccatcctgtgcacgcgcagtgccactcacctgctgagagtgtttgaagagtatgagaaaattgccaacaagagcattgaggacagcatcaagagtgagacccatggctcactggaggaggccatgctcactgtggtgaaatgcacccaaaacctccacagctactttgcagagagactctactatgccatgaagggagcagggacgcgtgatgggaccctgataagaaacatcgtttcaaggagcgagattgacttaaatcttatcaaatgtcacttcaagaagatgtacggcaagaccctcagcagcatgatcatggaagacaccagcggcgactacaagaacgccctgctgagcctggtgggcagcgacccctgaggcacagaagaacaagagcaaagaccatgaagccagagtctccaggactcctcactcaacctcggccatggacgcaggttgggtgtgaggggggtcccagcctttcagtcttctatttccctatttccagtgctttccagccgggtttctgacccagagggtggaaccggcctggactcctcttcccaacttcctccaggtcatttcccagtgtgagcacaatgccaaccttagtgtttctccagccagacagatgcctcagcatgaagggcttggggacttgtggatcattccttcctccctgcaggagcttcccaagctggtcacagagtctcctgggcacaggttatacagaccccagccccattcccatctactgaaacagggtctccacaagaggggccagggaatatgggtttttaacaagcgtcttacaaaacacttctctatcatgcagccggagagctggctgggagcccttttgttttagaacacacatccttcagcagctgagaaacgaacacgaatccatcccaaccgagatgccattaacattcatctaaaaatgttaggctctaaatggacgaaaaattctctcgccatcttaataacaaaataaactacaaattcctgacccaaggacactgtgttataagaggcgtgggctcccctggtggctgaccaggtcagctgccctggccttgcacccctctgcatgcagcacagaagggtgtgaccatgccctcagcaccactcttgtccccactgaacggcaactgagactgggtacctggagattctgaagtgcctttgctgtggttttcaaaataataaagatttgtattcaactcaa

SEQ ID NO: 6909 - protein, 327 aa, Homo sapiens [sequence omitted]

SEQ ID NO: 6910 - DNA, 1905 bp, Homo sapiens
gacggcaggcaggtgtggcgctgccctgggcgggcttgcacccccacacccaagtgagcggcctgctcactcctcagctgcaggagccagacgtgtggagtcccagcagaggccaacctgtgtctcttcatctccctgggaaaggtgcccccgaggtgaaagagatggcctggtggaaatcctggattgaacaggagggtgtcacagtgaagagcagctcccacttcaacccagaccctgatgcagagaccctctaccaagccatgaaggggatcgggaccaacgagcaggctatcatcgatgtgctcaccaagagaagcaacacgcagcggcagcagatcgccaagtccttcaaggctcagttcggcaaggacctcactgagaccttgaagtctgagctcagtggcaagtttgagaggctcattgtggcccttatgtacccgccatacagatacgaagccaaggagctgcatgacgccatgaagggcttaggaaccaaggagggtgtcatcattgagatcctggcctctcggaccaagaaccagctgcgggagataatgaaggcgtatgaggaagactatgggtccagcctggaggaggacatccaagcagacacaagtggctacctggagaggatcctggtgtgcctcctgcagggcagcagggatgatgtgagcagctttgtggacccaggactggccctccaagacgcacaggatctgtatgcggcaggcgagaagattcgtgggactgatgagatgaaattcatcaccatcctgtgcacgcgcagtgccactcacctgctgagagtgaaatgcacccaaaacctccacagctactttgcagagagactctactatgccatgaagggagcagggacgcgtgatgggaccctgataagaaacatcgtttcaaggagcgagattgacttaaatcttatcaaatgtcacttcaagaagatgtacggcaagaccctcagcagcatgatcatggaagacaccagcggcgactacaagaacgccctgctgagcctggtgggcagcgacccctgaggcacagaagaacaagagcaaagaccatgaagccagagtctccaggactcctcactcaacctcggccatggacgcaggttgggtgtgaggggggtcccagcctttcagtcttctatttccctatttccagtgctttccagccgggtttctgacccagagggtggaaccggcctggactcctcttcccaacttcctccaggtcatttcccagtgtgagcacaatgccaaccttagtgtttctccagccagacagatgcctcagcatgaagggcttggggacttgtggatcattccttcctccctgcaggagcttcccaagctggtcacagagtctcctgggcacaggttatacagaccccagccccattcccatctactgaaacagggtctccacaagaggggccagggaatatgggtttttaacaagcgtcttacaaaacacttctctatcatgcagccggagagctggctgggagcccttttgttttagaacacacatccttcagcagctgagaaacgaacacgaatccatcccaaccgagatgccattaacattcatctaaaaatgttaggctctaaatggacgaaaaattctctcgccatcttaataacaaaataaactacaaattcctgacccaaggacactgtgttataagaggcgtgggctcccctggtggctgaccaggtcagctgccctggccttgcacccctctgcatgcagcacagaagggtgtgaccatgccctcagcaccactcttgtccccactgaacggcaactgagactgggtacctggagattctgaagtgcctttgctgtggttttcaaaataataaagatttgtattcaactcaa

SEQ ID NO: 6911 - protein, 295 aa, Homo sapiens
MAWWKSWIEQEGVTVKSSSHFNPDPDAETLYQAMKGIGTNEQAIIDVLTKRSNTQRQQIAKSFKAQFGKDLTETLKSELSGKFERLIVALMYPPYRYEAKELHDAMKGLGTKEGVIIEILASRTKNQLREIMKAYEEDYGSSLEEDIQADTSGYLERILVCLLQGSRDDVSSFVDPGLALQDAQDLYAAGEKIRGTDEMKFITILCTRSATHLLRVKCTQNLHSYFAERLYYAMKGAGTRDGTLIRNIVSRSEIDLNLIKCHFKKMYGKTLSSMIMEDTSGDYKNALLSLVGSDP

SEQ ID NO: 6912 - DNA, 1716 bp, Homo sapiens
gacggcaggcaggtgtggcgctgccctgggcgggcttgcacccccacacccaagtgagcggcctgctcactcctcagctgcaggagccagacgtgtggagtcccagcagaggccaacctgtgtctcttcatctccctgggaaaggtgcccccgaggtgaaagagatggcctggtggaaatcctggattgaacaggagggtgtcacagtgaagagcagctcccacttcaacccagaccctgatgcagagaccctctaccaagccatgaaggggatcgggaccaacgagcaggctatcatcgatgtgctcaccaagagaagcaacacgcagcggcagcagatcgccaagtccttcaaggctcagttcggcaaggacctcactgagaccttgaagtctgagctcagtggcaagtttgagaggctcattgtggcccttatgtacccgccatacagatacgaagccaaggagctgcatgacgccatgaagggcttaggaaccaaggagggtgtcatcattgagatcctggcctctcggaccaagaaccagctgcgggagataatgaaggcgtatgaggaagactatgggtccagcctggaggaggacatccaagcagacacaagtggctacctggagaggatcctggtgtgcctcctgcagggcagcagggatgatgtgagcagctttgtggacccaggactggccctccaagacgcacaggatctgtatgcggcaggcgagaagattcgtgggactgatgagatgaaattcatcaccatcctgtgcacgcgcagtgccactcacctgctgagagtgtttgaagagtatgagaaaattgccaacaagagcattgaggacagcatcaagagtgagacccatggctcactggaggaggccatgctcactgtggtgaaatgcacccaaaacctccacagctactttgcagagagactctactatgccatgaagggagcagggacgcgtgatgggaccctgataagaaacatcgtttcaaggagcgagattgacttaaatcttatcaaatgtcacttcaagaagatgtacggcaagaccctcagcagcatgatcatggaagacaccagcggcgactacaagaacgccctgctgagcctggtgggcagcgacccctgaggcacagaagaacaagagcaaagaccatgaagccagagtctccaggactcctcactcaacctcggccatggacgcagacagatgcctcagcatgaagggcttggggacttgtggatcattccttcctccctgcaggagcttcccaagctggtcacagagtctcctgggcacagccggagagctggctgggagcccttttgttttagaacacacatccttcagcagctgagaaacgaacacgaatccatcccaaccgagatgccattaacattcatctaaaaatgttaggctctaaatggacgaaaaattctctcgccatcttaataacaaaataaactacaaattcctgacccaaggacactgtgttataagaggcgtgggctcccctggtggctgaccaggtcagctgccctggccttgcacccctctgcatgcagcacagaagggtgtgaccatgccctcagcaccactcttgtccccactgaacggcaactgagactgggtacctggagattctgaagtgcctttgctgtggttttcaaaataataaagatttgtattcaactca

SEQ ID NO: 6913 - protein, 327 aa, Homo sapiens [sequence omitted]

SEQ ID NO: 6914 - DNA, 1888 bp, Homo sapiens
gacggcaggcaggtgtggcgctgccctgggcgggcttgcacccccacacccaagtgagcggcctgctcactcctcagctgcaggagccagacgtgtggagtcccagcagaggccaacctgtgtctcttcatctccctgggaaaggtgcccccgaggtgaaagagatggcctggtggaaatcctggattgaacaggagggtgtcacagtgaagagcagctcccacttcaacccagaccctgatgcagagaccctctaccaagccatgaaggggatcgggaccaacgagcaggctatcatcgatgtgctcaccaagagaagcaacacgcagcggcagcagatcgccaagtccttcaaggctcagttcggcaaggacctcactgagaccttgaagtctgagctcagtggcaagtttgagaggctcattgtggcccttatgtacccgccatacagatacgaagccaaggagctgcatgacgccatgaagggcttaggaaccaaggagggtgtcatcattgagatcctggcctctcggaccaagaaccagctgcgggagataatgaaggcgtatgaggaagactatgggtccagcctggaggaggacatccaagcagacacaagtggctacctggagaggatcctggtgtgcctcctgcagggcagcagggatgatgtgagcagctttgtggacccaggactggccctccaagacgcacaggatctgtatgcggcaggcgagaagattcgtgggactgatgagatgaaattcatcaccatcctgtgcacgcgcagtgccactcacctgctgagagtgtttgaagagtatgagaaaattgccaacaagagcattgaggacagcatcaagagtgagacccatggctcactggaggaggccatgctcactgtggtgaaatgcacccaaaacctccacagctactttgcagagagactctactatgccatgaagggagcagggacgcgtgatgggaccctgataagaaacatcgtttcaaggagcgagattgacttaaatcttatcaaatgtcacttcaagaagatgtacggcaagaccctcagcagcatgatcatggaagacaccagcggcgactacaagaacgccctgctgagcctggtgggcagcgacccctgaggcacagaagaacaagagcaaagaccatgaagccagagtctccaggactcctcactcaacctcggccatggacgcaggttgggtgtgaggggggtcccagcctttcagtcttctatttccctatttccagtgctttccagccgggtttctgacccagagggtggaaccggcctggactcctcttcccaacttcctccaggtcatttcccagtgtgagcacaatgccaaccttagtgtttctccagccagacagatgcctcagcatgaagggcttggggacttgtggatcattccttcctccctgcaggagcttcccaagctggtcacagagtctcctgggcacagccggagagctggctgggagcccttttgttttagaacacacatccttcagcagctgagaaacgaacacgaatccatcccaaccgagatgccattaacattcatctaaaaatgttaggctctaaatggacgaaaaattctctcgccatcttaataacaaaataaactacaaattcctgacccaaggacactgtgttataagaggcgtgggctcccctggtggctgaccaggtcagctgccctggccttgcacccctctgcatgcagcacagaagggtgtgaccatgccctcagcaccactcttgtccccactgaacggcaactgagactgggtacctggagattctgaagtgcctttgctgtggttttcaaaataataaagatttgtattcaactca

SEQ ID NO: 6915 - protein, 327 aa, Homo sapiens [sequence omitted]

SEQ ID NO: 6916 - DNA, 1497 bp, Homo sapiens
gacggcaggcaggtgtggcgctgccctgggcgggcttgcacccccacacccaagtgagcggcctgctcactcctcagctgcaggagccagacgtgtggagtcccagcagaggccaacctgtgtctcttcatctccctgggaaaggtgcccccgaggtgaaagagatggcctggtggaaatcctggattgaacaggagggtgtcacagtgaagagcagctcccacttcaacccagaccctgatgcagagaccctctaccaagccatgaaggggatcgggaccaacgagcaggctatcatcgatgtgctcaccaagagaagcaacacgcagcggcagcagatcgccaagtccttcaaggctcagttcggcaaggacctcactgagaccttgaagtctgagctcagtggcaagtttgagaggctcattgtggcccttatgtacccgccatacagatacgaagccaaggagctgcatgacgccatgaagggcttaggaaccaaggagggtgtcatcattgagatcctggcctctcggaccaagaaccagctgcgggagataatgaaggcgtatgaggaagactatgggtccagcctggaggaggacatccaagcagacacaagtggctacctggagaggatcctggtgtgcctcctgcagggcagcagggatgatgtgagcagctttgtggacccaggactggccctccaagacgcacaggatctgtatgcggcaggcgagaagattcgtgggactgatgagatgaaattcatcaccatcctgtgcacgcgcagtgccactcacctgctgagagtgtttgaagagtatgagaaaattgccaacaagagcattgaggacagcatcaagagtgagacccatggctcactggaggaggccatgctcactgtggtgaaatgcacccaaaacctccacagctactttgcagagagactctactatgccatgaagggagcagggacgcgtgatgggaccctgataagaaacatcgtttcaaggagcgagattgacttaaatcttatcaaatgtcacttcaagaagatgtacggcaagaccctcagcagcatgatcatggtaagcaggcattcccaatgctgaggccagcctgaaacccagacattcagggaaacctggaggctgtggccaacactacgtgagcccctcccttcccagtgggcaccatgtgcttgcattcatgaccatgtggtgtgtgcagggaacagcagaggtcagtgtggctggatcccaaggggaatggggggcagaggggagatgcagagaccagggcacagaggctcccctgtgtcccactcagaaagttggtttcacatttaagttatggttgctccttggaaaagacaccaaatccttgcagaagaagccacctctgaatagtcaatgagatgaactagtccggtaggaatcgggcccaccgctcaaatccagatttaagtagtcctggcggccaacttctaaggagata

SEQ ID NO: 6917 - protein, 315 aa, Homo sapiens
MAWWKSWIEQEGVTVKSSSHFNPDPDAETLYQAMKGIGTNEQAIIDVLTKRSNTQRQQIAKSFKAQFGKDLTETLKSELSGKFERLIVALMYPPYRYEAKELHDAMKGLGTKEGVIIEILASRTKNQLREIMKAYEEDYGSSLEEDIQADTSGYLERILVCLLQGSRDDVSSFVDPGLALQDAQDLYAAGEKIRGTDEMKFITILCTRSATHLLRVFEEYEKIANKSIEDSIKSETHGSLEEAMLTVVKCTQNLHSYFAERLYYAMKGAGTRDGTLIRNIVSRSEIDLNLIKCHFKKMYGKTLSSMIMVSRHSQC

SEQ ID NO: 6918 - DNA, 1765 bp, Homo sapiens
tttctgcctttttgtttccctccggcgagtcggcgcgagggtgaatttccgtttccggcggtgtccaagcggacctaaggagtcgcagttgtgaacaggtttggtgccgcgggctggggtaggcggcggttgggtccgtggctctggggcactgggaagatcgcgagtcgtgcgcatgggaaggtcctcccccggtcctccgggtcatctttgctcccgaggagcggcatatttcgcatctgcctgaggttagagttacttgttattggtaaatagccactatggagactaaggaccagaagaaacacagaaagaaaaacggtggacccaaagctgcaaagaaaaagaagtggcatctgcaggatctccagctaggagactaagaaaatgcccagaagagaaatgccaatgcttttgcagttcagtctgctgtgtggatgtctcgatcctttcacaggactctggatttgaagacacaaaagcatcatattccagtggttgatggaactccactagagccgccaccaataccggtagtggtgacggggcctccaaagttggaaagagcactttgatataatgcctcattcggaacttcacctggcagaagttcaccgagatcagaggccctgtgacgatcgtgtcaggtaaaaagcgcagactcaccattattgaatgtgggtgtgacattaacatgatgattgatctggctaaagtagcagatctggttgccaaactgttctacctttctggaatggtgcatggagaatatcaaaaccaagaaatccacaatctgggccattttattacagttatgaagtttaggcctctcatggcaaacttttcacccttatatcctggcagacaggatggaagatttgacaaacccggaggatatccaaacaaacatcaaatgtgaccggcaggtgtcactttatggttatttaagaggagcacacttcaaagataaaagccaaattcacatgccaggtatctactgagcgtttcagtcaacaatacagctcgtgttcgacaatattccttgatgacagcacagccatccagcattatcttacaatgacaataatatcgcactgagaagccttttaggaaaatcgggatggatgtgaggcatctttctgtgaagaaaagcatcccagaagattctgattttcaccccagctcaatcattccaaactttgctgctgattgaaatcacctgggaaacgtttaccaagaaccttgatgcccaaagccatacccaatactaattaaattaaaatgtctcatgtggaagatgaggcagatattaaagcttctcaggcgattttaatgtgcagcaaagtttgagagccactgcttaatttgagtttaggacgagaaactgctcctatttggtgggaccttgggcaagtcagttttaagtgtgaccttggagatacctcatcatatcacacaaagagatgcagatagatctttgagcatacctgatgaacagttacactcatttgcgttcatgccgtggaggaagtggtgaaggaggtggtgggacatgccaaggagactggagagaaagccattgctgaagccataaagaaagcccaggagtcaggggacaaaaagatgaaggaaatcaccgagacagtgaccaacacagtcacaaatgccatcacccatgcagcagaaagtctggacaaacttggacagtgagtgcacctgctaccacggcccttccccagtctcaataaaaagccatgacatgtgt

SEQ ID NO: 6919 - protein, 74 aa, Homo sapiens
MMIDLAKVADLVAKLFYLSGMVHGEYQNQEIHNLGHFITVMKFRPLMANFSPLYPGRQDGRFDKPGGYPNKHQM

SEQ ID NO: 6920 - DNA, 413 bp, Homo sapiens
gcaggagcgcccatggctgctgctgtacagcctgctgaggtgactgttgaagttggtgaggacctccacatgcaccaggttcgtgaccgggagatgcctgaagctttggagtttaacctttctgccaatccagaggcaagcacaatattccagaggaactctcaaacagatgctttggagtttaactcttctgccaatccagaggcaagcacaatattccagaggaactctcaaacagatgttgtagaaataagaagaagcaactgtacaaaccatgtatctactgagcgtttcagtcaacaatacagctcgtgttcgacaatattccttgatgacagcacagccatccagcattatcttacaatgacaataatatctgtgaccttggagatacctcatcatatcacacaaag

SEQ ID NO: 6921 - protein, 132 aa, Homo sapiens
MAAAVQPAEVTVEVGEDLHMHQVRDREMPEALEFNLSANPEASTIFQRNSQTDALEFNSSANPEASTIFQRNSQTDVVEIRRSNCTNHVSTERFSQQYSSCSTIFLDDSTAIQHYLTMTIISVTLEIPHHIT

SEQ ID NO: 6922 - DNA, 564 bp, Homo sapiens
agaggtcaattagctgctttcgggcggccttaggcgacaggagactcctggacccagcacctgcccactgtgcctgtccacctgtggctacagcagctgagaccccagtgggctaagattggacaggggccaccagggacccagcaagtccttcagctctatttttgaaacatgaatccttcactcctcctggctgcctttttcctgggaattgcctcagctgctctaacacgtgaccacagtctagacgcacaatggaccaagtggaaggcaaagcacaagagattatatgacatgaatgaagaaggatggaggagagcagtgtgagagaacatgaagatgactgagcagcacaatcaggaatacagccaagggaaacacagcttcacaatggccatgaacacctttggagacatgaccactgaagaattcaggcaggtgatgaatggttttcaataccagaagcacaggaacgggaaacagttccaggaacgcctgcttcttgagatccccacatctgtggactggagagagaaaggctacgtgactcctgtgaaggatcag

SEQ ID NO: 6923 - protein, 76 aa, Homo sapiens
MKMTEQHNQEYSQGKHSFTMAMNTFGDMTTEEFRQVMNGFQYQKHRNGKQFQERLLLEIPTSVDWREKGYVTPVKD

SEQ ID NO: 6924 - DNA, 2064 bp, Homo sapiens
cagaaatcatgagtggaggatctcaagtccacattttttggggtgctccagttgctccactgaaaatgacagtatcagaagacacagcttctttaatgtctgttgctgacccctggaaaaaaattcagcttttatacagtcaacattctttatatctgaaggatgaaaaacagcacaaaaatcttgaaaactatgaagtcccagattctattggttctccagatctttgtggtcatttcttagcaaactgtatgaatagacatgttcatgtgaaagatgactttgtacgttctgtttctgaaacacagaatatagaatcccagaagattcactcctctagactgagtggcataactagctctaatatgcaaatatgtggatttaaaagcacagttccgcatttaaccgaagaagaaaagtatcaaagcttctcagtgaaaataaaattagagatgaacagcctaaacatcagccagatatatgtggtcagaactttaacacaaatttgtttcagttgggccataaatgtgcagctgtgttggatttggtttgtagtactgaaaaaattaatatagggcctgaagtggtacaaagagagtgtgtgccaacagaatatcatgaaatacaaaaccagcgtttgggattattttcctcgaactcagtagataagtcaaggtctgaagcagcagttaagaaggtctcagaccttaaaatatcaactgataaagaatttctcagtataattacctccagccaggttgctttttttagctcaaaagaaagataaaaggcggagtcctgtaaataaagggaatgtaaacatggagactgaaccaaaggcaagttacggggagataagaatacctgaagagaattcgattcagcttgatggttttacagaagcatatgaaagtggacaaaaccaagcatattcccttgaactttttagtcctgtttgtcctaaaacagaaaatagccgcattcacataaactctgataaaggtcttgaagaacatacaggatctcaagaacttttcagttctgaagatgaactgccaccaaatgagatacgtattgagttgtgtagctcaggaatactgtgttcccaactaaataccttccacaaaagtgctattaaaagaagctgtacctctgaagataaagtggcccagtctgaagctctatctagagtccttcaagtagctaagaaaatgaagttgatttctaatggaggagattctgctgtagaaatggatcggagaaatgtgtctgaatttaagagtattaaaaaaatcattaataaaaaactgtgattctaaaagccagaagtataattgtttagtcatggtgctatctccatgccatgtgaaggaaataaacataaaattcggaccaaattctggctctaaagtgcctttagcaacagttacagtaagtgatcaatcagaaactaagaagaaggtttttctgtggaggactgcagcattttgggcatttacagtgtttcttggagatataattttactcacggatgttgttattcatgaggaccaatggattggtgagacagtactacaatcaacatttagcagtcagttattaaatcttgggagttattcatctattcagcctgaagaattctggagtgcagtggcgtgatcttggctcactgcaacctctgcctcctgggttctagcaattctcctgcttcagcctcccaagtagctgggactacagctctatcttgttcatgaaaaacgaagcccagagaagttatgtacaagttcacagagctcattattgacaaaaccagaatttgaatacaactcttctgattccagatttgctggaaatactgtgaaagaagaattcagtctgattccagtgtagttagtgacgttgtacttcaagacttactggcatatgtgtcctcaaaacattcctacctcagagatcttcctccgagacagcctcagagggtgaacagtatagactttgtagaattggagcaccttcaacctgatgtgttagtccacgcagtactaagagttgttgatttcctat

SEQ ID NO: 6925 - protein, 131 aa, Homo sapiens
MCLNLRVLKKSLIKNCDSKSQKYNCLVMVLSPCHVKEINIKFGPNSGSKVPLATVTVSDQSETKKKVFLWRTAAFWAFTVFLGDIILLTDVVIHEDQWIGETVLQSTFSSQLLNLGSYSSIQPEEFWSAVA

SEQ ID NO: 6926 - DNA, 1780 bp, Homo sapiens
gggtcatgacgcagcgagtttcagtcgtgacttttctgggggcatcgcggcgtcccctttttttgcctttaaagtaaaacgtcgccccgacgcaccccccgcgtatttcggggggcggaggcggcgggccacggcgcgaagaggggcggtgctgacgccggccggtcacgtgggcgtgttgtggggggggaggggcgccgccgcgcggtcggttccgggcggttgggagcgcgcgagctagcgagcgagaggcagccgcgcccgccgccgcccctgctctgtatgccgctctctcccggcgcggccgccgccgatcacagcagcaggagccgccgccgccgcggttgatgtggttgggccggggctgaggaggccgccaagatgccgcagtcaaagtcccggaagatcgcgatcctgggctaccggtctgtggggaaatcctcattgacgattcaatttgttgaaggccaatttgtggactcctacgatccaaccatagaaaacacttttacaaagttgatcacagtaaatggacaagaatatcatctttaacttgtagacacagccgggcaagatgaatattctatctttcctcagacatactccatagatattaatggctatattcttgtgtattctgttacatcaatcaaaagttttgaagtgattaaagttatccatggcaaattgttggatatggtggggaaagtacaaatacctattatgttggttggaaataagaaagacctgcatatggaaagggtgatcagttatgaagaagggaaagctttggcagaatcttggaatgcagcttttttggaatcttctgctaaagaaaatcagactgctgttgatgtttttcgaaggatgattttggaggcagaaaaaatggacgggggcagcttcacaaggcaagtcttcatgctcggtgatgtgattctgctgcaaagcccgaggacactgggaatatattctagctgaagaagcaaactgcccgttctccttgaagataaactatgcttcttttttcttctgttaacctgaaagatatcatttgggtcagagctcccctcccttcagattatgttaactctgagtctgtccaaatgagttcacttccattttcaaattttaagcaatcatattttcaatttatatattgtgtttcttaatattatgaccaagaattttatcggcattaatttttcagtgtagtttgttgtttaaaataatgtaatcatcaaaatgatgcatattgttacactactattaactaggcttcaatatatcagtgtttatttcattgtgttaaatgtatacttgtaaataaaatagctgcaaacctcaaaaaaacaaaaaaaaacaaaaaaaagagtaaaccaatttggttactcattttaccaatttggttttgattttgcaagtggttacaactcatgagaggattcttatttctgatcaatatattgtgtttttggaaaggacttctgggaaataattatgatgaagccctcgagcaattgcaacaaaaccaaaaattgaaaagtgggacctaataatacttttttaaaatttattttttagagacaggatctcactctgttacccaggctggagtgcagtggcctgatcatagctcactgcagcctcaatctcccaggctcaagagattcttctacctcagcctcctgaatagctgggactacaggtgcatgcccccatgcccagctaatttttgtattttttgtagagaccaggttttgtcatgttgcccaagctg

SEQ ID NO: 6927 - protein, 94 aa, Homo sapiens [sequence omitted]

SEQ ID NO: 6928 - DNA, 1448 bp, Homo sapiens
gggtcatgacgcagcgagtttcagtcgtgacttttctgggggcatcgcggcgtcccctttttttgcctttaaagtaaaacgtcgccccgacgcaccccccgcgtatttcggggggcggaggcggcgggccacggcgcgaagaggggcggtgctgacgccggccggtcacgtgggcgtgttgtggggggggaggggcgccgccgcgcggtcggttccgggcggttgggagcgcgcgagctagcgagcgagaggcagccgcgcccgccgccgcccctgctctgtatgccgctctctcccggcgcggccgccgccgatcacagcagcaggagccgccgccgccgcggttgatgtggttgggccggggctgaggaggccgccaagatgccgcagtcaaagtcccggaagatcgcgatcctgggctaccggtctgtggggaaatcctcattgacgattcaatttgttgaaggccaatttgtggactcctacgatccaaccatagaaaacacttttacaaagttgatcacagtaaatggacaagaatatcatctttaacttgtagacacagccgggcaagatgaatattctatctttcctcagacatactccatagatattaatggctatattcttgtgtattctgttacatcaatcaaaagttttgaagtgattaaagttatccatggcaaattgttggatatggtggggaaagtacaaatacctattatgttggttggaaataagaaagacctgcatatggaaagggtgatcagttatgaagaagggaaagctttggcagaatcttggaatgcagcttttttggaatcttctgctaaagaaaatcagactgctgttgatgtttttcgaaggatgattttggaggcagaaaaaatggacgggggcagcttcacaagattccagtgtagttagtgacgttgtacttcaagacttactggcatatgtgtcctcaaaacattcctacctcagagatcttcctccgagacagcctcagagggtgaacagtatagactttgtagaattggagcaccttcaacctgatgtgttagtccacgcagtactaagagttgttgatttcctatactgacagaggcagtatacagttatagaggacagaagcagaaaaaagttatgttaacagtggaacaggcccaagatcaacattatgcgcttgtattatggggtcctggagcagcctggtaccctcaacttcaaaggaaaaaaggttatatttgggaatttaaatatctttttgttcagcgcaattacacactagaaaacctagaattgcatacaacgccttggtcatcctgtgagtgcttgtttgatgatgatataagggcaattacatttaaagcaaaatttcaaaaaagtgcaccctcctttgtgaagatatcagacttagcaacccacctagaggataagtgttcagg

SEQ ID NO: 6929 - protein, 99 aa, Homo sapiens
MLTVEQAQDQHYALVLWGPGAAWYPQLQRKKGYIWEFKYLFVQRNYTLENLELHTTPWSSCECLFDDDIRAITFKAKFQKSAPSFVKISDLATHLEDKC

SEQ ID NO: 6930 - DNA, 890 bp, Homo sapiens
ttttttttgtttttttttgtttttttgaggtttgcagctattttatttacaagtatacatttaacacaatgaaataaacactgatatattgaagcctagttaatagtagtgtaacaatatgcatcattttgatgattacattattttaaacaacaaactacactgaaaaattaatgccgataaaattcttggtcataatattaagaaacacaatatataaattgaaaatatgattgcttaaaatttgaaaatggaagtgaactcatttggacagactcagagttaacataatctgaagggaggggagctctgacccaaatgatatctttcaggttaacagaagaaaaaagaagcatagtttatcttcaaggagaacgggcagtttgcttcttcagctagaatatattcccagtgtcctcgggctttgcagcagaatcacatcaccgagcatgaagacttgccttgtgaagctgcccccgtccattttttctgcctccaaaatcatccttcgaaaaacatcaacagcagtctgattttctttagcagaagattccaaaaaagctgcattccaagattctgccaaagctttcccttcttcataactgatcaccctttccatatgcaggtctttcttatttccaaccaacataataggtatttgtactttccccaccatatccaacaatttgccatggataactttaatcacttcaaaacttttgattgatgtaacagaatacacaagaatatagccattaatatctatggagtatgtctgaggaaagatagaatattcatcccacagaccggtagcccaggatcgcgatcttccgggactttgactgcggcatcttggcggcctcctcagccccggcccaaccacatcaacc

SEQ ID NO: 6931 - protein, 35 aa, Homo sapiens; identical to SEQ ID NO: 6857

SEQ ID NO: 6932 - DNA, 1664 bp, Homo sapiens
aaggttatatttgggaatttaaatatctttttgttcagcgcaattacacactagaaaacctagaattgcatacaacgccttggtcatcctgtgagtgcttgtttgatgatgatataagggcaattacatttaaagcaaaatttcaaaaaagtgcaccctcctttgtgaagatatcagacttagcaacccacctagaggataagtgttcaggagtggttctaattaaagcccagatttcagagctggcatttcctcttacagcagctcagaagatatctctaaatgctcacagttctctgaagagtattttttcttctcttcccaacatcatatatactggctgtgcaaaatgtggattggaactagaaacagatgagaacaggatctacaaacaatgttttagctgcttgccatttactatgaagaaaatatattataggccagcgttaatgactgccgttgatggaagacataatgtttacatccatgtagaatcaaagctgatagagaagattcttctcaacatttctgcagactgcctcaacagagtgatagatggagttttgctcttgttgcctagactggagtgctgtggcgcgatctcagttcaccataacctctgcctcctggattcaagcaagtctcctgcctcagtttcccaagtagctgggattacagttccttcctcagagatcacctatgggatggttgtggcagacctgttccactccttgttggcagtcagcgcagaaccttgtgtattgaagattcagagcctttttgtgttagatgaaaacagctatccattacaacaagatttctccctcctggatttttatcctgacatggtaaagcatggagccaatgcccgtctctgaggccagaggaagaaattgcaggcatttcaaggaagaagtactgaaatgatttgtcttttgaaataaatgaatgacagggcttttgctttggattttttatgaaatatattttacaaagagaattgcactagatatataaattaaaacttttttctaagaaaatcctgtgaggtttaaaaagattgtttttgtcttttggtttcttcctttcttctggagaaatgatctaccagtcaaggcaatatgtagcagatccctgggaattaaaggtttgcccatttgttcactgtatttagtccctgctacattccaggcatcgtactaagtatggggaaccacagagaagacactccttcagaaactgctgcagtgctttcgcttatccctacctaaaaaaccgtcaatgtgaaatcatttccttgattataactataatgataatggattagtttatataaacctatgtttagacaagttcaagacaagcgtgtctttctataaaaagtattgaaagtgaaggaaatgagatcatgtttcaatttattaaagcagggaagagcgttctgtggttagttcgtgtctaggatttgagtgccttactgaatgtatttaccagcaaacatgtagcaatctgttctctcattgtgattgtggaagaagctcatgtaaaatgatagtcattaatgaggaagtatggcgtggtacttattctgtaagttcagagtatgctgagtgttaatagattgtcatattgcctgaaaataaattcatgatgacatgaacaag

SEQ ID NO: 6933 - protein, 152 aa, Homo sapiens
MKKIYYRPALMTAVDGRHNVYIHVESKLIEKILLNISADCLNRVIDGVLLLLPRLECCGAISVHHNLCLLDSSKSPASVSQVAGITVPSSEITYGMVVADLFHSLLAVSAEPCVLKIQSLFVLDENSYPLQQDFSLLDFYPDMVKHGANARL

SEQ ID NO: 6934 - DNA, 1025 bp, Homo sapiens
ttctcaacatttctgcagactgcctcaacagagtgatagttccttcctcagagatcacctatgggatggttgtggcagacctgttccactccttgttggcagtcagcgcagaaccttgtgtattgaagattcagagcctttttgtgttagatgaaaacagctatccattacaacaagatttctccctcctggatttttatcctgacatggtaaagcatggagccaatgcccgtctctgaggccagaggaagaaattgcaggcatttcaaggaagaagtactgaaatgatttgtcttttgaaataaatgaatgacagggcttttgctttggattttttatgaaatatattttacaaagagaattgcactagatatataaattaaaacttttttctaagaaaatcctgtgaggtttaaaaagattgtttttgtcttttggtttcttcctttcttctggagaaatgatctaccagtcaaggcaatatgtagcagatccctgggaattaaaggtttgcccatttgttcactgtatttagtccctgctacattccaggcatcgtactaagtatggggaaccacagagaagacactccttcagaaactgctgcagtgctttcgcttatccctacctaaaaaaccgtcaatgtgaaatcatttccttgattataactataatgataatggattagtttatataaacctatgtttagacaagttcaagacaagcgtgtctttctataaaaagtattgaaagtgaaggaaatgagatcatgtttcaatttattaaagcagggaagagcgttctgtggttagttcgtgtctaggatttgagtgccttactgaatgtatttaccagcaaacatgtagcaatctgttctctcattgtgattgtggaagaagctcatgtaaaatgatagtcattaatgaggaagtatggcgtggtacttattctgtaagttcagagtatgctgagtgttaatagattgtcatattgcctgaaaataaattcatgatgacatgaacaag

SEQ ID NO: 6935 - protein, 57 aa, Homo sapiens [sequence omitted]

SEQ ID NO: 6936 - DNA, 536 bp, Homo sapiens
tatcttcagtgaaagcactatcattgggagtacttcattgaagtcagcttgaacaacggcaaaacattcaagagcaatgtcagcatcaccagcaccacatgtactcgtggaacaaataccacggagcagcacctagcacagaggaaggccccctgccctgggcatctgtgggaaaccagggcccaagtctgcggtgagctggtgcagaaactctgagctgaggagctaacattacacccatctgcaactgagagaacctgccaggctccagcaaaaccaaacaggacattctccccaggagacaccgtcctcatccaggggaaccaggattctcatggaaaatcatttcctactgaagacgaggtcagaggaaaaactcccaggtatcccaaagagaggcagcagatacaagaaacaaggagattcaaagcccagagagtaaagagaatagagtgatctaaaaggaacattgaaataagggtgtataaaatgttcaaaaaaagataaaggaataaaactatatgacaagaacagct

SEQ ID NO: 6937 - protein, 32 aa, Homo sapiens
MYSWNKYHGAAPSTEEGPLPWASVGNQGPSLR

SEQ ID NO: 6938 - DNA, 654 bp, Homo sapiens
gccagcaagtctagcagacatgcaagccctgcctcagcttctctcccaacactcagcttttctcccaatacaggaacttttggaggtcacttctggggcctttgctgagcaggccactccttgcttctcctgcagatgacaaggtttccagcatgattattgctatgactgatggaacaatgatgaaacatccatctttggacactctcaaagaaggagtacttcattgaagtcagcttgaacaacggcaaaacattcaagagcaatgtcagcatcaccagcaccacatgtactcgtggaacaaataccacggagcagcacctagcacagaggaaggccccctgccctgggcatctgtgggaaaccagggcccaagtctgcggtgagctggtgcagaaactctgagctgaggagctaacattacacccatctgcaactgagagaacctgccaggctccagcaaaaccaaacaggacattctccccaggagacaccgtcctcatccaggggaaccaggattctcatggaaaatcatttcctactgaagacgaggtcagaggaaaaactcccaggtatcccaaagagaggcagcagatacaagaaacaaggagattcaaagcccagagagtaaagagaatagagtgatctaaaagg

SEQ ID NO: 6939 - protein, 32 aa, Homo sapiens; identical to SEQ ID NO: 6937

SEQ ID NO: 6940 - DNA, 480 bp, Homo sapiens
tgcaagccctgcctcagcttctctcccaacactcagcttttctcccaatacaggaacttttggaggtcacttctggggcctttgctgagcaggccactccttgcttctcctgcagatgacaaggtttccagcatgattattgctatgactgatggaacaatgatgaaacatccatctttggacactctcaaagaaaatcctaccatgtggttattcatggaaatggctttcagaatctaaagaaacgggatgaagttatttgcagatttatcttcagtgaaagcactatcattgggagtacttcattgaagtcagcttgaacaacggcaaaacattcaagagcaatgtcagcatcaccagcaccacatgtggcaatctggatatcttccgtgacctctctcacccaagctgctgccaggtgccatggatgtggtgtcagcacaggggccagactcgtggaacaaataccacggagcagca

SEQ ID NO: 6941 - protein, 44 aa, Homo sapiens
MSASPAPHVAIWISSVTSLTQAAARCHGCGVSTGARLVEQIPRS

SEQ ID NO: 6942 - DNA, 9708 bp, Homo sapiens
aaacaaccagtgctgtgtagccaaagccaaaccaatgcaaaggcactaatgggaagaggggcttctccattcttctcttctcagtccagaaaggagactaccccaggcctgcatctcctgaaggcccgtggggagcacaatggagcgcaagccgcgggacacagctgccagtctgctccggcgccgctttgtgcgcgcagccgctggcccctctactcccgggtctgccccccgggacacccctctgcctcgcccaagtcatgcagccctacctgcctctccactgtggacctttgggaaccgactcctcacctcgggggctcgggccttgactgtgctgggagccggtaggcgtcctccgcgacccgcccgcgcccctcgcgcccgccggggccccgggctccaaagttgtggggaccggcgcgagttggaaagtttgcccgagggctggtgcaggcttggagctgggggccgtgcgctgccctgggaatgtgacccggccagcgaccaaaaccttgtgtgactgagctgaagagcagtgcatccagattctcctcagaagtgagactttccaaaggaccaatgactctgtttcctgcgccctttcattttttcctactctgtagctatgtctcgatcccgccatgcaaggccttccagattagtcaggaaggaagatgtaaacaaaaaaaagaaaaacagccaactacgaaagacaaccaagggagccaacaaaaatgtggcatcagtcaagactttaagccctggaaaattaaagcaattaattcaagaaagagatgttaagaaaaaaacagaacctaaaccacccgtgccagtcagaagccttctgacaagagctggagcagcacgcatgaatttggataggactgaggttctttttcagaacccagagtccttaacctgcaatgggtttacaatggcgctacgaagcacctctcttagcaggcgactctcccaacccccactggtcgtagccaaatccaaaaaggttccactttctaagggtttagaaaagcaacatgattgtgattataagatactccctgctttgggagtaaagcactcagaaaatgattcggttccaatgcaagacacccaagtccttcctgatatagagactctaattggtgtacaaaatccctctttacttaaaggtaagagccaagagacaactcagttttggtcccaaagagttgaggattccaagatcaatatccctacccacagtggccctgcagctgagatccttcctgggccactggaagggacacgctgtggtgaaggactattctctgaagagacattgaatgataccagtggttccccaaaaatgtttgctcaggacacagtgtgtgctccttttccccaaagagcaacccccaaagttacctctcaaggaaaccccagcattcagttagaagagttgggttcacgagtagaatctcttaagttatctgattcttacctggatcccattaaaagtgaacatgattgctaccccacctccagtcttaataaggttatacctgacttgaaccttagaaactgcttggctcttggtgggtctacgtctcctacctctgtaataaaattcctcttggcaggctcaaaacaagcgacccttggtgctaaaccagatcatcaagaggccttcgaagctactgcaaatcaacaggaagtttctgataccacctctttcctaggacaggcctttggtgctatcccacatcaatgggaacttcctggtgctgacccagttcatggtgaggccctgggtgagaccccagatctaccagagattcctggtgctattccagtccaaggagaggtctttggtactattttagaccaacaagaaactcttggtatgagtgggagtgttgtcccagacttgcctgtcttccttcctgttcctccaaatccaattgctacctttaatgctccttccaaatggcctgagccccaaagcactgtctcatatggacttgcagtccagggtgctatacagattttgcctttgggctcaggacacactcctcaatcatcatcaaactcagagaaaaattcattacctccagtaatggctataagcaatgtagaaaatgagaagcaggttcatataagcttcctgccagctaacactcaggggttcccattagcccctgagagaggactcttccatgcttcactgggtatagcccaactctctcaggctggtcctagcaaatcagacagagggagctcccaggtcagtgtaaccagcacagttcatgttgtcaacaccacagtggtgactatgccagtgccaatggtcagtacctcctcttcttcctataccactttgctaccgactttggaaaagaagaaaagaaagcgatgtggggtctgtgaaccctgccagcagaagaccaactgtggtgaatgcacttactgcaagaacagaaagaacagccatcagatctgtaagaaaagaaaatgtgaggagctgaaaaagaaaccatctgttgttgtgcctctggaggttataaaggaaaacaagaggccccagagggaaaagaagcccaaagttttaaagattttgacaacaaaccagtaaatggccccaagtcagaatccatggactacagtagatgtggtcatggggaagaacaaaaattggaattgaacccacatactgttgaaaatgtaactaaaaatgaagacagcatgacaggcatcgaggtggagaagtggacacaaaacaagaaatcacagttaactgatcacgtgaaaggagattttagtgctaatgtcccagaagctgaaaaatcgaaaaactctgaagttgacaagaaacgaaccaaatctccaaaattgtttgtacaaaccgtaagaaatggcattaaacatgtacactgtttaccagctgaaacaaatgtttcatttaaaaaattcaatattgaagaattcggcaagacattggaaaacaattcttataaattcctaaaagacactgcaaaccataaaaacgctatgagctctgttgctactgatatgagttgtgatcatctcaaggggagaagtaacgttttagtattccagcagcctggctttaactgcagttccattccacattcttcacactccatcataaatcatcatgctagtatacacaatgaaggtgatcaaccaaaaactcctgagaatataccaagtaaagaaccaaaagatggatctcccgttcaaccaagtctcttatcgttaatgaaagataggagattaacattggagcaagtggtagccatagaggccctgactcaactctcagaagccccatcagagaattcctccccatcaaagtcagagaaggatgaggaatcagagcagagaacagccagtttgcttaatagctgcaaagctatcctctacactgtaagaaaagacctccaagacccaaacttacagggagagccaccaaaacttaatcactgtccatctttggaaaaacaaagttcatgcaacacggtggttttcaatgggcaaactactaccctttccaactcacatatcaactcagctactaaccaagcatccacaaagtcacatgaatattcaaaagtcacaaattcattatctctttttataccaaaatcaaattcatccaagattgacaccaataaaagtattgctcaagggataattactcttgacaattgttccaatgatttgcatcagttgccaccaagaaataatgaagtggagtattgcaaccagttactggacagcagcaaaaaattggactcagatgatctatcatgtcaggatgcaacccatacccaaattgaggaagatgttgcaacacagttgacacaacttgcttcgataattaagatcaattatataaaaccagaggacaaaaaagttgaaagtacaccaacaagccttgtcacatgtaatgtacagcaaaaatacaatcaggagaagggcacaatacaacagaaaccaccttcaagtgtacacaataatcatggttcatcattaacaaaacaaaagaacccaacccagaaaaagacaaaatccaccccatcaagagatcggcggaaaaagaagcccacagttgtaagttatcaagaaaatgatcggcagaagtgggaaaagttgtcctatatgtatggcacaatatgcgacatttggatagcatcgaaatttcaaaattttgggcaattttgtccacatgattttcctactgtatttgggaaaatttcttcctcgaccaaaatatggaaaccactggctcaaacgaggtccattatgcaacccaaaacagtatttccaccactcactcagataaaattacagagatatcctgaatcagcagaggaaaaggtgaaggttgaaccattggattcactcagcttatttcatcttaaaacggaatccaacgggaaggcattcactgataaagcttataattctcaggtacagttaacggtgaatgccaatcagaaagcccatcctttgacccagccctcctctccacctaaccagtgtgctaacgtgatggcaggcgatgaccaaatacggtttcagcaggttgttaaggagcaactcatgcatcagagactgccaacattgcctggtatctctcatgaaacacccttaccggagtcagcactaactctcaggaatgtaaatgtagtgtgttcaggtggaattacagtggtttctaccaaaagtgaagaggaagtctgttcatccagttttggaacatcagaattttccacagtggacagtgcacagaaaaattttaatgattatgccatgaacttctttactaaccctacaaaaaacctagtgtctataactaaagattctgaactgcccacctgcagctgtcttgatcgagttatacaaaaagacaaaggcccatattatacacaccttggggcaggaccaagtgttgctgctgtcagggaaatcatggagaataggtatggtcaaaaaggaaacgcaataaggatagaaatagtagtgtacaccggtaaagaagggaaaagctctcatgggtgtccaattgctaagtgggttttaagaagaagcagtgatgaagaaaaagttctttgtttggtccggcagcgtacaggccaccactgtccaactgctgtgatggtggtgctcatcatggtgtgggatggcatccctcttccaatggccgaccggctatacacagagctcacagagaatctaaagtcatacaatgggcaccctaccgacagaagatgcaccctcaatgaaaatcgtacctgtacatgtcaaggaattgatccagagacttgtggagcttcattctcttttggctgttcatggagtatgtactttaatggctgtaagtttggtagaagcccaagccccagaagatttagaattgatccaagctctcccttacatgaaaaaaaccttgaagataacttacagagtttggctacacgattagctccaatttataagcagtatgctccagtagcttaccaaaatcaggtggaatatgaaaatgttgcccgagaatgtcggcttggcagcaaggaaggtcgtcccttctctggggtcactgcttgcctggacttctgtgctcatccccacagggacattcacaacatgaataatggaagcactgtggtttgtaccttaactcgagaagataaccgctctttgggtgttattcctcaagatgagcagctccatgtgctacctctttataagctttcagacacagatgagtttggctccaaggaaggaatggaagccaagatcaaatctggggccatcgaggtcctggcaccccgccgcaaaaaaagaacgtgtttcactcagcctgttccccgttctggaaagaagagggctgcgatgatgacagaggttcttgcacataagataagggcagtggaaaagaaacctattccccgaatcaagcggaagaataactcaacaacaacaaacaacagtaagccttcgtcactgccaaccttagggagtaacactgagaccgtgcaacctgaagtaaaaagtgaaaccgaaccccattttatcttaaaaagttcagacaacactaaaacttattcgctgatgccatccgctcctcacccagtgaaagaggcatctccaggcttctcctggtccccgaagactgcttcagccacaccagctccactgaagaatgacgcaacagcctcatgcgggttttcagaaagaagcagcactccccactgtacgatgccttcgggaagactcagtggtgccaatgcagctgctgctgatggccctggcatttcacagcttggcgaagtggctcctctccccaccctgtctgctcctgtgatggagcccctcattaattctgagccttccactggtgtgactgagccgctaacgcctcatcagccaaaccaccagccctccttcctcacctctcctcaagaccttgcctcttctccaatggaagaagatgagcagcattctgaagcagatgagcctccatcagacgaacccctatctgatgaccccctgtcacctgctgaggagaaattgccccacattgatgagtattggtcagacagtgagcacatctttttggatgcaaatattggtggggtggccatcgcacctgctcacggctcggttttgattgagtgtgcccggcgagagctgcacgctaccactcctgttgagcaccccaaccgtaatcatccaacccgcctctcccttgtcttttaccagcacaaaaacctaaataagccccaacatggttttgaactaaacaagattaagtttgaggctaaagaagctaagaataagaaaatgaaggcctcagagcaaaaagaccaggcagctaatgaaggtccagaacagtcctctgaagtaaatgaattgaaccaaattccttctcataaagcattaacattaacccatgacaatgttgtcaccgtgtccccttatgctctcacacacgttgcggggccctataaccattgggtctgaaggcttttctccccctcttaatgcctttgctagtgcagtgtattttttcaaggtgctgttaaaagaaagtcatgttgtcgtttactatcttcatctcacccatttcaagtctgaggtaaaaaaataataatgataacaaaacggggtgggtattcttaactgtgactatattttgacaattggtagaaggtgcacattttaagcaaaaataaaagttttatagttttaaatacataaagaaatgtttcagttaggcattaaccttgatagaatcactcagtttggtgctttaaattaagtctgtttactatgaaacaagagtcatttttagaggattttaacaggttcatgttctatgatgtaaaatcaagacacacagtgttaactctacacagcttctggtgcttaaccacatccacacagttaaaaataagctgaattattatttcatggtgccattgttccaacatcttccaatcattgctagaaaattggcatattcctttgaaataaacttatgaaatgttttctctcttaaaatatttctcctgtgtaaaataaatcattgttgttagtaatggttggaggctgttcataaattgtaaatatatattttaaaagcactttctatttttaaaagtaacttgaaataatatagtataagaatcctattgtctattgtttgtgcatatttgcatacaagagaaatcatttatccttgctgtgtagagttccatcttgttaactgcagtatgtattctaatcatgtatatggtttgtgttcttttactgtgtcctctcacattcaagtattagcaacttgcagtatataaaatagttagataatgagaagttgttaattatctctaaaattggaattaggaagcatatcaccaatactgattaacattctctttggaactaggtaagagtggtctcttcttattgaacaacctcaatttagtttcatcccacctttctcagtataatccatgagaggtgtttccaaaaggagatgagggaacaggataggtttcagaagagtcaaatgcttctaatgtctcaaggtgataaaatacaaaaactaagtagacagatatttgtactgaagtctgatacagaattagaaaaaaaaaattcttgttgaaatattttgaaaacaaattccctactatcatcacatgcctccccaaccccaagtcaaaaacaagaggaatggtactacaaacatggctttgtccattaagagctaattcatttgtttatcttagcatactagatttgggaaaatgataactcatcttttctgataattgcctatgttctaggtaacaggaaaacaggcattaagtttattttagtcttcccattttcttcctattactttattgactcattttattgcaaaacaaaaaggattacccaaacaacatgtttcgaacaaggagaattttcaatgaaatacttgattctgttaaaatgcagaggtgctataacattcaaagtgtcagattccttgggagtatggaaaacctaatggtgcttctcccttggaaatgccataggaagcccacaaccgctaacacttacaattttggtgcaaaagcaaacagttccagcaggctctctaaagaaaaactcattgtaacttattaaaataatatctggtgcaaagtatctgttttgagcttttgactaatccaagtaaaggaatatgaagggattgtaaaaaacaaaatgtccattgatagaccatcgtgtacaagtagatttctgcttgttgaatatgtaaaatagggtaattcattgacttgttttagtattttgtgtgccttagatttccgttttaagacatgtatatttttgtgagcctaaggtttcttatatacatataagtatataaataagtgattgtttattgcttcagctgcttcaacaagatatttactagtattagactatcaggaatacacccttgcgagattatgttttagattttaggccttagctcccactagaaattatttcttcaccagatttaatggataaagttttatggctctttatgcatccactcatctactcattcttcgagtctacacttattgaatgcctgcaaaatctaagtatcacttttatttttctttggatcaccacctatgacatagtaaacttgaagaataaaaactaccctcagaaatatttttaaaagaagtagcaaattatcttcagtataatccatggtaatgtatgcagtaattcaaattgatctctctctcaataggtttcttaacaatctaaacttgaaacatcaatgttaatttttggaactattgggatttgtgacgcttgttgcagtttaccaaaacaagtatttgaaaatatatagtatcaactgaaatgtttccattccgttgttgtagttaacatcatgaatggacttcttaagctgattaccccactgtgggaaccaaattggattcctactttgttggactctctttcctgattttaacaatttaccatcccattctctgccctgtgattttttttaaaagcttattcaatgttctgcagcattgtgattgtatgctggctacactgcttttagaatgctctttctcatgaagcaaggaaataaatttgtttgaaatgacattttctctcataaaa

SEQ ID NO: 6943 - protein, 1465 aa, Homo sapiens
MDYSRCGHGEEQKLELNPHTVENVTKNEDSMTGIEVEKWTQNKKSQLTDHVKGDFSANVPEAEKSKNSEVDKKRTKSPKLFVQTVRNGIKHVHCLPAETNVSFKKFNIEEFGKTLENNSYKFLKDTANHKNAMSSVATDMSCDHLKGRSNVLVFQQPGFNCSSIPHSSHSIINHHASIHNEGDQPKTPENIPSKEPKDGSPVQPSLLSLMKDRRLTLEQVVAIEALTQLSEAPSENSSPSKSEKDEESEQRTASLLNSCKAILYTVRKDLQDPNLQGEPPKLNHCPSLEKQSSCNTVVFNGQTTTLSNSHINSATNQASTKSHEYSKVTNSLSLFIPKSNSSKIDTNKSIAQGIITLDNCSNDLHQLPPRNNEVEYCNQLLDSSKKLDSDDLSCQDATHTQIEEDVATQLTQLASIIKINYIKPEDKKVESTPTSLVTCNVQQKYNQEKGTIQQKPPSSVHNNHGSSLTKQKNPTQKKTKSTPSRDRRKKKPTVVSYQENDRQKWEKLSYMYGTICDIWIASKFQNFGQFCPHDFPTVFGKISSSTKIWKPLAQTRSIMQPKTVFPPLTQIKLQRYPESAEEKVKVEPLDSLSLFHLKTESNGKAFTDKAYNSQVQLTVNANQKAHPLTQPSSPPNQCANVMAGDDQIRFQQVVKEQLMHQRLPTLPGISHETPLPESALTLRNVNVVCSGGITVVSTKSEEEVCSSSFGTSEFSTVDSAQKNFNDYAMNFFTNPTKNLVSITKDSELPTCSCLDRVIQKDKGPYYTHLGAGPSVAAVREIMENRYGQKGNAIRIEIVVYTGKEGKSSHGCPIAKWVLRRSSDEEKVLCLVRQRTGHHCPTAVMVVLIMVWDGIPLPMADRLYTELTENLKSYNGHPTDRRCTLNENRTCTCQGIDPETCGASFSFGCSWSMYFNGCKFGRSPSPRRFRIDPSSPLHEKNLEDNLQSLATRLAPIYKQYAPVAYQNQVEYENVARECRLGSKEGRPFSGVTACLDFCAHPHRDIHNMNNGSTVVCTLTREDNRSLGVIPQDEQLHVLPLYKLSDTDEFGSKEGMEAKIKSGAIEVLAPRRKKRTCFTQPVPRSGKKRAAMMTEVLAHKIRAVEKKPIPRIKRKNNSTTTNNSKPSSLPTLGSNTETVQPEVKSETEPHFILKSSDNTKTYSLMPSAPHPVKEASPGFSWSPKTASATPAPLKNDATASCGFSERSSTPHCTMPSGRLSGANAAAADGPGISQLGEVAPLPTLSAPVMEPLINSEPSTGVTEPLTPHQPNHQPSFLTSPQDLASSPMEEDEQHSEADEPPSDEPLSDDPLSPAEEKLPHIDEYWSDSEHIFLDANIGGVAIAPAHGSVLIECARRELHATTPVEHPNRNHPTRLSLVFYQHKNLNKPQHGFELNKIKFEAKEAKNKKMKASEQKDQAANEGPEQSSEVNELNQIPSHKALTLTHDNVVTVSPYALTHVAGPYNHWV

SEQ ID NO: 6944 - DNA, 1184 bp, Homo sapiens
aacctgaagtaaaaagtgaaaccgaaccccattttatcttaaaaagttcagacaacactaaaacttattcgctgatgccatccgctcctcacccagtgaaagaggcatctccaggcttctcctggtccccgaagactgcttcagccacaccagctccactgaagaatgacgcaacagcctcatgcgggttttcagaaagaagcagcactccccactgtacgatgccttcgggaagactcagtggtgccaatgcagctgctgctgatggccctggcatttcacagcttggcgaagtggctcctctccccaccctgtctgctcctgtgatggagcccctcattaattctgagccttccactggtgtgactgagccgctaacgcctcatcagccaaaccaccagccctccttcctcacctctcctcaagaccttgcctcttctccaatggaagaagatgagcagcattctgaagcagatgagcctccatcagacgaacccctatctgatgaccccctgtcacctgctgaggagaaattgccccacattgatgagtattggtcagacagtgagcacatctttttggatgcaaatattggtggggtggccatcgcacctgctcacggctcggttttgattgagtgtgcccggcgagagctgcacgctaccactcctgttgagcaccccaaccgtaatcatccaacccgcctctcccttgtcttttaccagcacaaaaacctaaataagccccaacatggttttgaactaaacaagattaagtttgaggctaaagaagctaagaataagaaaatgaaggcctcagagcaaaaagaccaggcagctaatgaaggtccagaacagtcctctgaagtaaatgaattgaaccaaattccttctcataaagcattaacattaacccatgacaatgttgtcaccgtgtccccttatgctctcacacacgttgcggggccctataaccattgggtctgaaggcttttctccccctcttaatgcctttgctagtgcagtgtattttttcaaggtgctgttaaaagaaagtcatgttgtcgtttactatcttcatctcacccatttcaagtctgaggtaaaaaaataataatgataacaaaacggggtgggtattcttaactgtgaagatatttgtactgaagtctgatacagaattag

SEQ ID NO: 6945 - protein, 303 aa, Homo sapiens [sequence omitted]

SEQ ID NO: 6946 - DNA, 3936 bp, Homo sapiens
agaacgtcagccagtaagcgccgttcctccgggagatgtggaggaggggggcggcgtggaggaagagggggaagttggcgcatgcgcctaaagctgacgggtttgaaatggcttcgatgttagccgggacccgactcagatcgatgctatagaagacaaacaagggaaggttttttttccttttgcatcatggctcaatttggaggacagaagaatccgccatgggctactcagtttacagccactgcagtatcacagccagctgcactgggtgttcaacagccatcactccttggagcatctcctaccatttatacacagcaaactgcattggcagcagcaggccttaccacacaaactccagcaaactatcagttaacacaaactgctgcattgcagcaacaagccgcagctgcagcagctgcattacaacagcaatattcacaacctcagcaggccctgtatagtgtgcaacaacagttacagcaaccccagcaaaccctcttaacacagccagctgttgcactgcctacaagccttagcctgtctactcctcagccaacagcacaaataactgtatcatatccaacaccaaggtccagtcaacagcaaacccagcctcagaagcagcgtgttttcacaggggtggttacaaaactacatgatacgtttggatttgtggatgaagatgtattctttcagcttagtgctgtcaaagggaaaaccccccaagtaggtgacagagtattggttgaagctacttataatcctaatatgccttttaaatggaatgcacagagaattcaaacactaccaaatcagaatcagtcgcaaacccagccattactgaagactcctcctgctgtacttcagccaattgcaccacagacaacatttggtgttcagactcagccccagccccagtcactgctgcaggcacagatttcagcagcttctattacaccactattgcagactcaaccacagcccttattacagcagcctcagcaaaaagctggtttattgcagcctcctgttcgtatagtttcacagccacaaccggcacgacgattagatcccccatcccgattttcaggaagaaatgacagaggggatcaagtgcctaacagaaaagatgatcgaagtcgtgagagagagagagaaagacgtagatcgagagaaagatcacctcagaggaaacgttcccgggaaagatctccacgaagagagcgagagcgatcacctcggagagttcgacgtgttgttccacgttacacagttcagttttcaaagttttctttagattgtcccagttgtgacatgatggaactaaggcgccgttatcaaaatttgtatatacctagtgacttttttgatgctcaatttacatgggtggatgctttccctttgtcaagaccatttcagctgggaaattactgcaatttttatgtaatgcacagagaagtagagtccttagaaaaaaatatggccattcttgatccaccagatgctgaccacttatacagtgcaaaggtaatgctgatggctagccctagtatggaagatttatatcataagtcatgtgctcttgctgaggacccacaagaacttcgagatggattccaacatcctgctagacttgttaagtttttagtgggcatgaaaggcaaggatgaagctatggccattggaggccactggtctccttcgttggatggaccagacccagaaaaagatccctctgtgttgattaagactgctattcgttgttgtaaggctctgacaggcattgatctaagtgtgtgcacacaatggtaccgttttgcagagattcgctaccatcgccctgaggagacccacaaggggcgtacagttccagctcatgtggagacagtggttttatttttcccggatgtttggcattgccttcccacccgctcagagtgggaaaccctctcccgaggatacaagcagcagctggtcgagaagcttcagggtgaacgcaaggaggctgatggagaacaggatgaagaagagaaggatgatggtgaagctaaagaaatttctacacctacccattggtctaaacttgatccaaagacaatgaaggtaaatgacctccgaaaagaattagaaagtcgagctcttagttccaaaggattaaaatcccagttaatagcccgattgacaaaacagcttaaagtagaggaacaaaaagaagaacagaaggagttagagaaatctgaaaaagaagaggatgaggatgatgataggaaatctgaagacgataaagaggaagaagaaaggaaacgtcaagaggaaatagaacgccagcgtcgagaaagaagatatattttgcctgatgaaccggccatcattgtacatccaaattgggctgcaaaaagtggcaagtttgattgtagcatcatgtctttgagtgtcctattggactacagattagaggataataaagaacattcatttgaggtttcattgtttgcggaacttttcaacgaaatgcttcaaagagattttggtgtccgtatatacaaatcattactgtctcttcctgagaaagaggacaaaaaagaaaaggataaaaaaagcaaaaaagatgagagaaaagataaaaaagaagaaagagatgatgaaactgatgaaccaaaacccaaacggagaaaatcaggcgatgataaagataaaaaagaagatagagatgaaaggaagaaagaagataaaagaaaagatgattctaaagatgatgatgaaactgaagaagataacaatcaagatgaatatgaccctatggaagcagaagaagctgaggatgaagaagatgatagggatgaggaagaaatgaccaaacgagatgacaaaagagatatcaacagatactgcaaggagaggccctctaaagataaggaaaaagaaaagactcaaatgatcacaattaacagagatctgttaatggcttttgtttattttgatcaaagtcattgtggttaccttcttgaaaaggatttggaagaaatactttatactcttggactacatctttctcgggctcaggtaaagaagcttcttaataaagtagtgctccgtgaatcttgcttttaccggaaattaacagacacctcaaaagatgaagagaaccatgaagagtctgagtcattgcaggaagatatgctaggaaacagattattacttccaacaccaacagtaaagcaggaatcaaaggatgtggaagaaaatgttggcctcattgtgtacaatggtgcaatggtagatgtaggaagcctcttgcaaaaattggaaaagagcgaaaaagtaagagctgaggtagaacagaagctgcagttactagaagaaaaaacagatgaagatgaaaaaaccatattaaatttggagaattccaacaaaagcctctctggtgaactcagagaagttaaaaaggaccttagtcagttacaagaaaacttaaagatttcggaaaacatgaatttacaatttgaaaaccaaatgaataagacaatcagaaacttatctacggtaatggatgaaatccacactgttctcaagaaggataatgtaaagaatgaagacaaagatcaaaaatccaaggagaatggtgccagtgtatgataaaatccatgtagtgatgaggaatggtgttaaataatgtaatatataaaaatcatgatataagaatgtttgaaggtgatgcatgtttgattttagtagtataaatgtattttagttcaaatgatgtataaagttttatgaatgtgagtttctgcttttgaaaattgcttgtaattcctagccttcaaattattaaacactccttgagtgaaataattttgcattgcaaagtgttttaggatgaactttgttatagttttaactccaataaagttcatcagtttaattgactgt

SEQ ID NO: 6947 - protein, 1150 aa, Homo sapiens; identical to SEQ ID NO: 771

SEQ ID NO: 6948 - DNA, 4751 bp, Homo sapiens
agaacgtcagccagtaagcgccgttcctccgggagatgtggaggaggggggcggcgtggaggaagagggggaagttggcgcatgcgcctaaagctgacgggtttgaaatggcttcgatgttagccgggacccgactcagatcgatgctatagaagacaaacaagggaaggttttttttccttttgcatcatggctcaatttggaggacagaagaatccgccatgggctactcagtttacagccactgcagtatcacagccagctgcactgggtgttcaacagccatcactccttggagcatctcctaccatttatacacagcaaactgcattggcagcagcaggccttaccacacaaactccagcaaactatcagttaacacaaactgctgcattgcagcaacaagccgcagctgcagcagctgcattacaacagcaatattcacaacctcagcaggccctgtatagtgtgcaacaacagttacagcaaccccagcaaaccctcttaacacagccagctgttgcactgcctacaagccttagcctgtctactcctcagccaacagcacaaataactgtatcatatccaacaccaaggtccagtcaacagcaaacccagcctcagaagcagcgtgttttcacaggggtggttacaaaactacatgatacgtttggatttgtggatgaagatgtattctttcagcttagtgctgtcaaagggaaaaccccccaagtaggtgacagagtattggttgaagctacttataatcctaatatgccttttaaatggaatgcacagagaattcaaacactaccaaatcagaatcagtcgcaaacccagccattactgaagactcctcctgctgtacttcagccaattgcaccacagacaacatttggtgttcagactcagccccagccccagtcactgctgcaggcacagatttcagcagcttctattacaccactattgcagactcaaccacagcccttattacagcagcctcagcaaaaagctggtttattgcagcctcctgttcgtatagtttcacagccacaaccggcacgacgattagatcccccatcccgattttcaggaagaaatgacagaggggatcaagtgcctaacagaaaagatgatcgaagtcgtgagagagagagagaaagacgtagatcgagagaaagatcacctcagaggaaacgttcccgggaaagatctccacgaagagagcgagagcgatcacctcggagagttcgacgtgttgttccacgttacacagttcagttttcaaagttttctttagattgtcccagttgtgacatgatggaactaaggcgccgttatcaaaatttgtatatacctagtgacttttttgatgctcaatttacatgggtggatgctttccctttgtcaagaccatttcagctgggaaattactgcaatttttatgtaatgcacagagaagtagagtccttagaaaaaaatatggccattcttgatccaccagatgctgaccacttatacagtgcaaaggtaatgctgatggctagccctagtatggaagatttatatcataagtcatgtgctcttgctgaggacccacaagaacttcgagatggattccaacatcctgctagacttgttaagtttttagtgggcatgaaaggcaaggatgaagctatggccattggaggccactggtctccttcgttggatggaccagacccagaaaaagatccctctgtgttgattaagactgctattcgttgttgtaaggctctgacaggcattgatctaagtgtgtgcacacaatggtaccgttttgcagagattcgctaccatcgccctgaggagacccacaaggggcgtacagttccagctcatgtggagacagtggttttatttttcccggatgtttggcattgccttcccacccgctcagagtgggaaaccctctcccgaggatacaagcagcagctggtcgagaagcttcagggtgaacgcaaggaggctgatggagaacaggatgaagaagagaaggatgatggtgaagctaaagaaatttctacacctacccattggtctaaacttgatccaaagacaatgaaggtaaatgacctccgaaaagaattagaaagtcgagctcttagttccaaaggattaaaatcccagttaatagcccgattgacaaaacagcttaaagtagaggaacaaaaagaagaacagaaggagttagagaaatctgaaaaagaagaggatgaggatgatgataggaaatctgaagacgataaagaggaagaagaaaggaaacgtcaagaggaaatagaacgccagcgtcgagaaagaagatatattttgcctgatgaaccggccatcattgtacatccaaattgggctgcaaaaagtggcaagtttgattgtagcatcatgtctttgagtgtcctattggactacagattagaggataataaagaacattcatttgaggtttcattgtttgcggaacttttcaacgaaatgcttcaaagagattttggtgtccgtatatacaaatcattactgtctcttcctgagaaagaggacaaaaaagaaaaggataaaaaaagcaaaaaagatgagagaaaagataaaaaagaagaaagagatgatgaaactgatgaaccaaaacccaaacggagaaaatcaggcgatgataaagataaaaaagaagatagagatgaaaggaagaaagaagataaaagaaaagatgattctaaagatgatgatgaaactgaagaagataacaatcaagatgaatatgaccctatggaagcagaagaagctgaggatgaagaagatgatagggatgaggaagaaatgaccaaacgagatgacaaaagagatatcaacagatactgcaaggagaggccctctaaagataaggaaaaagaaaagactcaaatgatcacaattaacagagatctgttaatggcttttgtttattttgatcaaagtcattgtggttaccttcttgaaaaggatttggaagaaatactttatactcttggactacatctttctcgggctcaggtaaagaagcttcttaataaagtagtgctccgtgaatcttgcttttaccggaaattaacagacacctcaaaagatgaagagaaccatgaagagtctgagtcattgcaggaagatatgctaggaaacagattattacttccaacaccaacagtaaagcaggaatcaaaggatgtggaagaaaatgttggcctcattgtgtacaatggtgcaatggtagatgtaggaagcctcttgcaaaaattggaaaagagcgaaaaagtaagagctgaggtagaacagaagctgcagttactagaagaaaaaacagatgaagatgaaaaaaccatattaaatttggagaattccaacaaaagcctctctggtgaactcagagaagttaaaaaggaccttagtcagttacaagaaaacttaaagatttcggaaaacatgaatttacaatttgaaaaccaaatgaataagacaatcagaaacttatctacggtaatggatgaaatccacactgttctcaagaaggataatgtaaagaatgaagacaaagatcaaaaatccaaggagaatggtgccagtgtatgataaaatccatgtagtgatgaggaatggtgttaaataatgtaatatataaaaatcatgatataagaatgtttgaaggtgatgcatgtttgattttagtagtataaatgtattttagttcaaatgatgtataaagttttatgaatgtgagtttctgcttttgaaaattgcttgtaattcctagccttcaaattattaaacactccttgagtgaaataattttgcattgcaaagtgttttaggatgaactttgttatagttttaactccaataaagttcatcagtttaattgactgtagtatttaattaccaaatttcttttattaaaatgcctagaaatttttaatttatagaattattaggttttaaaatttttagttcatctgttaaaatttcagtcaaaatcataaaatagcatgatgcttaatttttgcaagttttttgaaactttttgttttttttactcatcaccaaaaaatcccctcttgatcagtctctaaaagcattcattaaaaattcagttcaggccgggcacggtggctcacacctgtaatcccaacactttgggaggccgaggcaggtggatcacctgaggttaggagttcgagaccagcctggccaacatggtgaaacccggtctctactaaaaatataaaaattagctgggcatggtggtgggtgcctgtaatcccagctacttgggaggctgaggcaggagaatcgcttgaacccaggaggcggaggttgcagtcactcaggatcatgcagctacactccagcctgggcgacaagagtgaaactccatctcaaaaagaaaaaaaaaaaaaatcagtttatttgaaagacagtatatcagaaagaaagaagcaatagagaactagtattgttctttatgggttagactttacataatattagttgtcctgatgtcaatgttactgctttcaattaatttttctactttcccagaatagcatctatattccttttaattttgagggtttaaaaaaaaatgcagtgtatgtcaaatttacagtttagtaccaagccagtagatgtcagtatgatgccttaaattaagtcttctttaattaaagatatttttttaaatt

SEQ ID NO: 6949 - protein, 1150 aa, Homo sapiens; identical to SEQ ID NO: 771

SEQ ID NO: 6950 - DNA, 3886 bp, Homo sapiens
acgataagtgatttttttgtgactggcttcttttacttagcctgttatcaaggttcatgtatgttttagcataaggttttctctttatgtttttgttgttgttgtttaaaagacagggtcttgatctgtcacccagactggagtgcagtggtatagtcatagctcactacaccctcgaacgcctggccctcctgagtagctgggataacagtcatgtgccactgtgcccacttgaaagtatgtgtattaatgacttttttgccactgttatatttattttacagatagggatgaggaagaaatgaccaaacgagatgacaaaagagatatcaacagatactgcaaggagaggccctctaaagataaggtgtttattgaatactgtattctttataatatggtgatatcttacatcatctaaacataacacagttgtgaagtttattagtccttatacatctttattaccactaagtaaaattctgtcagttgtttttttgtggctatgtcagataactagtatgtctgattcttttctctcatattcgtataccagataaactcattttagctaggatgaggcaaatatcttattagattattgctatcttatgcacagtctccgtttctcactttttgggggtaaaaaatttgaaatttgaatactatgttttctacttctccattttcttaggaaaaagaaaagactcaaatgatcacaattaacagagatctgttaatggcttttgtttattttgatcaaagtcattgtggttaccttcttgaaaaggatttggaagaaatactttatactcttggactacatctttctcgggctcaggtaatctatcttgtgaatatttaaaaggaaaacattttttaaaagttacctttccagtgaaaagttaatagaacctctgttgactttttgatatattaaagcaatataagggccaggcgtggtggctcacacctataatcccagcaggttgggaggctgaggcgggcagatcagttgaggccaggagtttaagaccagcttggccaacatggcgtagctccgtctctactaaaaatgcaaaaattagctgggtgtggtggcacacgcctgtaatcccagctactcgggaagctgagacaggagaatctcttgaacccaggaggtggaggttgcaatgagccaagatcacgccactgcactccagcctgggtgacagagtgagactccatctcaaaaaataaaaataaagcaatataacacaagccagttgtaaaacacttcccttctccctctccctctgtttctactccttaggactacaatatataaaattctagatctttttgtaagcagctcagttccatttttataaacaaaacgtggaattattctgtacgttttgactggctttttttttttcattccacagtattctatagatacattcaccatgaaaatagagacctgcctcattctttttatagctgcacagtacccattatacagatgtaccataatttacctacctagtctccattgctggtggttttcatttattggatttaccaactatgctgtaataaatcatccctgtgcataaatttttatcaatgttatactttttaacaatgaagttttttttttcaaaagtaacttggatcttactcaattccatggatttccatcataagtgaaaattacagctgggcatagtggctcacacctgtaatcccagcactttgggaggcggaggagggtggatcacctgaggtcaggagttcaagaccagcctggctaacatggtgaaaccctgtctctccaaaaatacaaaaattggccaggcatgcgccaccatgcccagctattttttgtatttttagtagaaatggggtttcaccatgttggccaggatggtctcaaactcctgacctcaagggatcacccactttggcctcctatagtgttgggattacaggcaggagccaccatgctctgcagggacctttacttttcactatttctggttcaggttataaaattgcttagctttatctgaatcttaggtcttcctgtgtattctcaggttcattgttacctgttgcatccttttaatcatcttctggttccacttttttttttttgagacagagttttgccctgtcacccaggctggagtgcagtggggctatcttggcccattgcaacctccacctcccaagttcaagcgattctcctgcctcagcctcccaagtagctgggactacaggtgcgtgtcaccacgcctggctaattttttgtatttttagtagagacagggtttcaccatgtttgctaggatggtctcgatctcctgacctcgtgatccgcccacctcagcctcccaaagtgctgggtttacaggcatgagccactgcgcctggcctccacttagtttttaccagtctgtgttctctaatctatacagtcatctaaaaatagaacataggttttgaaataatacaagttaaaaatttaaatgaaacaggccaggcatggtggctcccgcctgtaatcccagcactttgggaggccgaggcaggcagattgtttgaggtcaggagttcgagaccagcctgaccaacatggtgaaaccccgtctctaaaaatacaaaaattagctgggtgtggtggtacgcgcctgtaatcccagccaagatcgtgccacttcgctcaagctggcgcaacagagtgagactcagtctcaaaagtaaatacataaataaatgaatattgcagtgtgctttatgactaatgaaattgacagacattgccattttatggaattctatcagctttttattttcacagcttaaatattttaacctcaaagttaaatttgaaattttaggaagtaaaatgttaatttttggatttttttaaacagatgaagatgaaaaaaccatattaaatttggagaattccaacaaaagcctctctggtgaactcagagaagttaaaaaggaccttagtcagttacaagaaaacttaaagatttcggaaaacatgaatttacaatttgaaaaccaaatgaataagacaatcagaaacttatctacggtaatggatgaaatccacactgttctcaagaaggtgagaaattttgtacttttaacattttcttagttttaaaaatctaactctggtgtttttaatgtattttaatgttattaagctcttagtgattattctaaaagcaaataatgatagcattgtgaccttcctgagattagtaaaaagtgattcacaggctgggcacagtggctcacacctgtaatcccagcactttgggaggccaacgcgggcggatcacctgaggtcaggagttcaagtccagcctcgccaacgtggtgaaaccccatgtctactaaaaatacaaaaaaaattatgattcccaaaagatgttgtttttctaaatcttagttggaatgtcaacatgatttaagtatacagacttcttgaagcaaatttcatttttatttctttttaatccagagtataaatttgaattaaaccattcacttcacttctctgtgttttttttgttttgttttgtctttttgagacagggtcttgcacttttgcccaggctggtttgttagtggcgctatcttggctcactgcagcctctgcctcctaggctcacgtgatcctcccacctcagcctcctgatgagctgggactacaggtgtgctccagcacacccagctaatttttatattttttttagagacagggtttcagaccgggcgcggtggctcatgcctgtaatctcagcactttcggaggccaaggtgggcggatcacgaagtcaggagattgagaccacagtaaaaccccgtctctact

SEQ ID NO: 6951 - protein, 72 aa, Homo sapiens [sequence omitted]

SEQ ID NO: 6952 - DNA, 3738 bp, Homo sapiens
gcgcgcgccccccgcctgcctgcaggtgctgcgcgatgcctggcggcgccgggccctgcggccgccgcgcggcttccgcatcagggcggtgggtgatgtctttccagtgcaaatgaatccaataactcaatctcagttcgtacctttgggtgaagttctttgctgtgctatatctgatatgaatacagctcagattgtagtaacgcaggaatcacttttggagcgtttgatgaaacattacccaggcattgcaattccatcggaagatattctttataccactctgggaacgctgattaaagaaaggaagatttatcacactggagaaggatacttcatagttactcctcagacttacttcattacaaatacaaccacccaggaaaataagagaatgctgccatcagatgaaagtcgcctgatgccagcttccatgacatatctggtgagcatggagagctgtgcagagtcagcccaagagaatgctgcccccatatcccactgtcagtcttgccagtgtttccgggacatgcacactcaggatgttcaggaagcaccagttgctgcagaagtgactaggaagagtcacagaggtcttggggaatccgtatcttgggtacagaatggggcagtttcagtgtctgcggagcaccacatttgtgagagcaccaaacctttaccatacacaagagataaagaaaaaggcaagaagtttggttttagtctcttatggcgcagcttatctagaaaggagaagcccaaaacagaacacagcagtttctctgctcagttcccacctgaagaatggcccgtccgagatgaagatgacttggacaatatccctcgagatgttgaacatgagataatcaaacgaattaaccccattttgactgttgacaatttaatcaaacacactgtcctaatgcaaaaatacgaagaacagaaaaaatataatagccagggcacttccactgacatgctgacaatcgggcataagtatccttcaaaagagggggttaagaaaaggcagggtctgtctgcaaaacctcaagggcagggccattctcgaagggatagacacaaagccaggaatcagggaagtgagtttcagccaggaagcattagactggagaaacaccccaagctccctgctacacagcccatccccagaattaaaagcccaaatgaaatggtaggtcagaaaccacttggtgagattacaacagtgctaggttcccatttgatttacaaaaagcgaatcagtaatcctttccagggtttgtctcaccgaggaagcacaatatccaaagggcacaaaattcagaagacgagtgatctgaaacccagccagactggaccaaaggaaaagcctttccaaaagcctaggtccttggattcctcaagaatctttgatggtaaagccaaagagccatatgctgaacaacctaatgataaaatggaagcagaatccatttacataaatgaccctactgtcaaacccatcaatgatgacttcagaggtcacctcttcagtcaccctcaacagagcatgttgcaaaatgatggtaaatgctgtccctttatggaaagcatgttgagatatgaagtgtatggtggagaaaatgaggtaattcctgaagtcttgaggaaaagtcattcccactttgacaaattaggggagaccaaacagactccgcatagtctgccatcacgaggtgcctccttttcagaccgaacaccctctgcttgtagattagtggataacacaatacaccagtttcaaaatcttggccttttggattacccagttggcgtgaaccctttaagacaagctgcaagacaagacaaagactcagaagaattattgagaaaaggatttgtccaggatgcagagactacaagcctagaaaatgaacagctttctaacgatgaccaggccttgtatcagaatgaagtggaagatgatgatggtgcctgtagttcattatatctagaggaggatgacatttctgagaatgacgacttacgtcaaatgctgcctggccacagtcagtattccttcacaggtggaagccagggaaatcatttaggaaaacaaaaagtgattgagagatctctgaccgagtacaacagcacaatggagagggttgagtctcaggtgcttaaaagaaatgaatgctacaaacccactgggctgcatgctaccccaggtgaaagccaagaacctaacctctctgctgaaagttgtggcctaaattcaggggcccagtttggttttaactacgaagaagaacccagtgttgctaaatgtgtacaggcctcagcacctgctgatgaaagaatctttgattactatagcgcaagaaaagccagttttgaagctgaagtcatacaagacactattggtgacacaggaaagaagccagctagctggagtcagagtcctcagaatcaggaaatgagaaaacatttcccacaaaagttccaacttttcaacacttcacatatgccagtgttggctcaggatgtccaatatgaacacagtcacttggaagggacagaaaatcacagcatggcaggagatagtggaatagattctccacggacacagagtctgggatctaataattcagtcattttggatggactaaaaagaagacagaattttctgcaaaatgtcgaaggcacaaagagcagtcaaccactcacatctaattccttactaccgctaactccagtcataaacgtttaattttcttttggaaacctacttttttctttataaaaaggtagagcattattacagaatctttcaatcatgtaagaattgagtatataagaattgtctaaaggcaagcatatctatactattaaccacattacacattttgttctaattactggctttttttcctcttttggtgtcttaaggctttttgaagcttattttactgtgagtttattgggagtatatagattattttcgattaaaaagtggaattattggtccccttccaattgtaattatcttgaatttttatacattagtttctcaaatatatagaatgccaatttacttcctgtagtgaatttttttttaacctacactaatattgagttctaagttaagtggatctcaccagatttcaacacaaaatcagaaaacagtgtgtgttgaagcagtgtctgttgcaagaaaacagtgtctgctgcaagatatctatgcaaccctaggtctttatcattaccaagaaagagtttacataaatgtgttggctactctgcaacaagaattcctttaatcattgctgcccaggggcttctctttgaccagcttggacatgaacaaatggttcccaatgtgactgacaatgtcgaaaattcctgtggcaagaggcatctggctgtactactgttcctctggttcctccctacatttcaggccttctttgagatggagtcttgctctgttgcccaggctggagtgcagtcgcacaatctcggctcactgcaacctctgcctcccaggttcatgccattctcctgccccagcttcccgagtagctgggattacaggcgcctgccaccacacccggcaaattttttgtatttttagtagagacggggtttcaccgtgttagccaggatgatctcgatctcctgacctcgtgatccacccgcctcggcctcccaaagtgttgggattacaggcatgagccaccgcacctgacccaggcc

SEQ ID NO: 6953 - protein, 879 aa, Homo sapiens
MNPITQSQFVPLGEVLCCAISDMNTAQIVVTQESLLERLMKHYPGIAIPSEDILYTTLGTLIKERKIYHTGEGYFIVTPQTYFITNTTTQENKRMLPSDESRLMPASMTYLVSMESCAESAQENAAPISHCQSCQCFRDMHTQDVQEAPVAAEVTRKSHRGLGESVSWVQNGAVSVSAEHHICESTKPLPYTRDKEKGKKFGFSLLWRSLSRKEKPKTEHSSFSAQFPPEEWPVRDEDDLDNIPRDVEHEIIKRINPILTVDNLIKHTVLMQKYEEQKKYNSQGTSTDMLTIGHKYPSKEGVKKRQGLSAKPQGQGHSRRDRHKARNQGSEFQPGSIRLEKHPKLPATQPIPRIKSPNEMVGQKPLGEITTVLGSHLIYKKRISNPFQGLSHRGSTISKGHKIQKTSDLKPSQTGPKEKPFQKPRSLDSSRIFDGKAKEPYAEQPNDKMEAESIYINDPTVKPINDDFRGHLFSHPQQSMLQNDGKCCPFMESMLRYEVYGGENEVIPEVLRKSHSHFDKLGETKQTPHSLPSRGASFSDRTPSACRLVDNTIHQFQNLGLLDYPVGVNPLRQAARQDKDSEELLRKGFVQDAETTSLENEQLSNDDQALYQNEVEDDDGACSSLYLEEDDISENDDLRQMLPGHSQYSFTGGSQGNHLGKQKVIERSLTEYNSTMERVESQVLKRNECYKPTGLHATPGESQEPNLSAESCGLNSGAQFGFNYEEEPSVAKCVQASAPADERIFDYYSARKASFEAEVIQDTIGDTGKKPASWSQSPQNQEMRKHFPQKFQLFNTSHMPVLAQDVQYEHSHLEGTENHSMAGDSGIDSPRTQSLGSNNSVILDGLKRRQNFLQNVEGTKSSQPLTSNSLLPLTPVINV

SEQ ID NO: 6954 - DNA, 611 bp, Homo sapiens
cttccttgacatactgatctttacttcattgtgggtttctgatttggctactagagatcttgatgacaagctacttatgaggcctgggtccagtaccatcctttcaactcgaaattggccaaatcgagctgtggagtttagtacatcatctctgtcatacacagtgcagtccaccaggagacgcaatccaccaccacgaactcttcatcccgactcgctctcctctccctcaccgacgcccctgagtcgaaataatctgctaccacctattggcacagctgaagtggaacatgtgagcactgtggggccacaaagacagatgaaaccccatggcgactctagtcgagctcaaagtgcggtggtggatgaacctaactatcagcagccacaagaaaggctccttttgcccgactttttccccaggcccaacacaactcaatcatttttggtagagtgacgtacttcctagaatggtcttgatagttggggaaagaaaaggtggggggaataatagtttggcagacttaagattttatctagaggcttaacccagaataaaagttgagtttccaacaataaaaagtgttataaatacattttgttcaaattct

SEQ ID NO: 6955 - protein, 126 aa, Homo sapiens
MRPGSSTILSTRNWPNRAVEFSTSSLSYTVQSTRRRNPPPRTLHPDSLSSPSPTPLSRNNLLPPIGTAEVEHVSTVGPQRQMKPHGDSSRAQSAVVDEPNYQQPQERLLLPDFFPRPNTTQSFLVE

SEQ ID NO: 6956 - DNA, 2519 bp, Homo sapiens
aaaaatatcctcaaaggtatgagataataaggccacagcagtgttttcaatgcggcttccaagttaagcattattatgtggatgtagctatatctataccaacagagctataaatgcattcatttggggatgagtagtcttgatgtataattaatctctcattccttctgacagtactttttttcaaagttgaaaagtaagttgctttgttacttctgggacatgaaagtatcattcagtttcaattactgtcttaaggataaggaatactgcaagctgctccagatcctactgaagggaatgaaggtttaggaactttacccgagaactatagttattagggaaaacgataaccagaaggtccagaactgtcaagaattccatcatcagctgggaatttacaaatccaaatcagcagagaagtgcaataccagatagggacaaatgttttattccagttctgtgggagagaaaaggccagcttctgttgtgtacccagagtatagagcttcaaaacaaaatcagaaaacactattttaaaaactaattttccaaaaatcctgagatctctacttgaaaacataggtagcctaaagctttctgtgcacattaaactcatctgcttcatttatctgatttctaatcaatttgctggtattgttataacttcatgctttcataccttcgtgtttgttggtgggatctgcagcccagtggcacccgactcgctctcctctccctcaccgacgcccctgagtcgaaataatctgctaccacctattggcacagctgaagtggaacatgtgagcactgtggggccacaaagacagatggtatgtttctttcatattgcctctccatgtacttaccatacaacctaatgggcagtaattctgcaggatctgtgccctgatcttgatttatactgtgttttgtcaaaagtacaaacacagtgctaatttatgacgtggaattggagctgtttggcctgcacttaccatatctgccatggtcgatagggttttaactacataccacattacagatagttttcactgtttctgtaacttttgtctcctctgcagaaaccccatggcgactctagtcgagctcaaagtgcggtggtggatgaacctaactatcagcagccacaagaaaggctccttttgcccgactttttccccaggcccaacacaactcaatcatttttgctggatacacagtatcgtcgctcatgtgcagttgagtatcctcatcaggcccgacctggcaggggatctgcaggtcctcagttacatgggtctacaaaatctcaaagcggaggcagaccagtctctcgaaccaggcagggaccataaggcaaatgagaagaatctatcaggctgcaggaaacacgagatttcatgaagcagtattcagtcatcaagtgatgcagagcttgtatagaagatcgactagaaatcatcttcatgaagagtgattttggcacaagtgaccgaagaacaaaacaccatagcagccaaaaatgacatgagtgttgtttctatctccagttactgtctctttcagcagaaattaacctatcccattggaaaggcaagtttgtacccaaagatgcaacagtgaataatacccaaatcactgctcatgttatctcttaacaatgatcagttcaatcatataggatttgatgagctcacacatacacaaaaagcagcaaatcatcagtgacaatatcactggcttcagaatacttcagcctgtgttcatttctggagagttgtactcagttttaagtcattttgctgttgaaaatctgacctcatcaaatagatgtcattcctaaaactctctttagatgtcctaccctatcagcagattaaaatggaaggggtgtgtaactaaaaacataaatgttaagcattagtataaagtaacttctgtaataaattatatcgcatattttttcagataggacagctcaaccttacgatgcctacctgatgccaggtgatgcttattttcttcctaaagtaggttactggtcatatcttttttccaaatattaaatgcaccttgccagatattctcctgcagctctaaggaaaggaaatcaatttaaaaataatttgtagaatctactattgagccaccaaagtataattccctaaaagtttaagaaaccctggcaattaattcagcataaacatatcctataaacagcaggagaggttcagctttctgattttactgtggaccttttcctaagggcattcatgaatgcagcaacagttttaactatggcttacatttattttaaatttcactaaatacaaatcttgattgtcatgccagttttagatcttattaattttcagaatggataaattcaaataatcataaattacggtaactttttattataccaaggtgttctaatgccatcatatgaagacagatgcttcaaacaacctgcattaaattatatttttaataaaattaaaatctatttttaacct

SEQ ID NO: 6957 - protein, 132 aa, Homo sapiens [sequence omitted]

SEQ ID NO: 6958 - DNA, 313 bp, Homo sapiens
acctattggcacagctgaagtggaacatgtgagcactgtggggccacaaagacagatgaaaccccatggcgactctagtcgagctcaaagtgcggtggtggatgaacctaactatcagcagccacaagaaaggctccttttgcccgactttttccccaggcccaacacaactcaatcatttttggtagagtgacgtacttcctagaatggtcttgatagttggggaaagaaaaggtggggggaataatagtttggcagacttaagattttatctagaggcttaacccagaataaaagttgagtttccaacaat

SEQ ID NO: 6959 - protein, 45 aa, Homo sapiens
MKPHGDSSRAQSAVVDEPNYQQPQERLLLPDFFPRPNTTQSFLVE

SEQ ID NO: 6960 - DNA, 1480 bp, Homo sapiens
agctgaagtggaacatgtgagcactgtggggccacaaagacagatgaaaccccatggcgactctagtcgagctcaaagtgcggtggtggatgaacctaactatcagcagccacaagaaaggctccttttgcccgactttttccccaggcccaacacaactcaatcatttttgctggatacacagtatcgtcgctcatgtgcagttgagtatcctcatcaggcccgacctggcaggggatctgcaggtcctcagttacatgggtctacaaaatctcaaagcggaggcagaccagtctctcgaaccaggcagggaccataaggcaaatgagaagaatctatcaggctgcaggaaacacgagatttcatgaagcagtattcagtcatcaagtgatgcagagcttgtatagaagatcgactagaaatcatcttcatgaagagtgattttggcacaagtgaccgaagaacaaaacaccatagcagccaaaaatgacatgagtgttgtttctatctccagttactgtctctttcagcagaaattaacctatcccattggaaaggcaagtttgtacccaaagatgcaacagtgaataatacccaaatcactgctcatgttatctcttaacaatgatcagttcaatcatataggatttgatgagctcacacatacacaaaaagcagcaaatcatcagtgacaatatcactggcttcagaatacttcagcctgtgttcatttctggagagttgtactcagttttaagtcattttgctgttgaaaatctgacctcatcaaatagatgtcattcctaaaactctctttagatgtcctaccctatcagcagattaaaatggaaggggtgtgtaactaaaaacataaatgttaagcattagtataaagtaacttctgtaataaattatatcgcatattttttcagataggacagctcaaccttacgatgcctacctgatgccaggtgatgcttattttcttcctaaagtaggttactggtcatatcttttttccaaatattaaatgcaccttgccagatattctcctgcagctctaaggaaaggaaatcaatttaaaaataatttgtagaatctactattgagccaccaaagtataattccctaaaagtttaagaaaccctggcaattaattcagcataaacatatcctataaacagcaggagaggttcagctttctgattttactgtggaccttttcctaagggcattcatgaatgcagcaacagttttaactatggcttacatttattttaaatttcactaaatacaaatcttgattgtcatgccagttttagatcttattaattttcagaatggataaattcaaataatcataaattacggtaactttttattataccaaggtgttctaatgccatcatatgaagacagatgcttcaaacaacctgcattaaattatatttttaataaaattaaaatctatttttaacct

SEQ ID NO: 6961 - protein, 104 aa, Homo sapiens [sequence omitted]

SEQ ID NO: 6962 - DNA, 3511 bp, Homo sapiens
agctgaagtggaacatgtgagcactgtggggccacaaagacagatgaaaccccatggcgactctagtcgagctcaaagtgcggtggtggatgaacctaactatcagcagccacaagaaaggctccttttgcccgactttttccccaggcccaacacaactcaatcatttttgctggatacacagtatcgtcgctcatgtgcagttgagtatcctcatcaggcccgacctggcaggggatctgcaggtcctcagttacatgggtctacaaaatctcaaagcggaggcagaccagtctctcgaaccaggcagggaccataaggcaaatgagaagaatctatcaggctgcaggaaacacgagatttcatgaagcagtattcagtcatcaagtgatgcagagcttgtatagaagatcgactagaaatcatcttcatgaagagtgattttggcacaagtgaccgaagaacaaaacaccatagcagccaaaaatgacatgagtgttgtttctatctccagttactgtctctttcagcagaaattaacctatcccattggaaaggcaagtttgtacccaaagatgcaacagtgaataatacccaaatcactgctcatgttatctcttaacaatgatcagttcaatcatataggatttgatgagctcacacatacacaaaaagcagcaaatcatcagtgacaatatcactggcttcagaatacttcagcctgtgttcatttctggagagttgtactcagttttaagtcattttgctgttgaaaatctgacctcatcaaatagatgtcattcctaaaactctctttagatgtcctaccctatcagcagattaaaatggaaggggtgtgtaactaaaaacataaatgttaagcattagtataaagtaacttctgtaataaattatatcgcatattttttcagataggacagctcaaccttacgatgcctacctgatgccaggtgatgcttattttcttcctaaagtaggttactggtcatatcttttttccaaatattaaatgcaccttgccagatattctcctgcagctctaaggaaaggaaatcaatttaaaaataatttgtagaatctactattgagccaccaaagtataattccctaaaagtttaagaaaccctggcaattaattcagcataaacatatcctataaacagcaggagaggttcagctttctgattttactgtggaccttttcctaagggcattcatgaatgcagcaacagttttaactatggcttacatttattttaaatttcactaaatacaaatcttgattgtcatgccagttttagatcttattaattttcagaatggataaattcaaataatcataaattacggtaactttttattataccaaggtgttctaatgccatcatatgaagacagatgcttcaaacaacctgcattaaattatatttttaataaaattaaaatctatttttaacctatttgtagtcacaaaccgaaaacgtgtcgtctttaccttagagctaaaggcttactttatgcatacggtatatttaatagtctacaaatcaaagatttaaacagtcccttaaaaattccatatattctcataccaactcatctacatagaaatgaaaatctctattgttctcacaaaccattaccatgagttcactataacaactggatcaatatggcttgcctttcaaagttaaagaatcagaaaggggcctgtaagaagtcatttagcccaattccctcaccctgtgtgttttccctcaaagccagtgcaatttttttttaaccaaaaaactggacatgtttaatacatacagtttgacaaatttggatttcactctttgttttgatgtagtaactcttttataaaagggaacagattcagacaagctcagtggcccaactgaagacattcagcaattaatggcaggacttcagtaatcagtggcaggactacaacatacatctcttcatgctagggaaaccaggctctctattataaagctgaccagggctattgttttccccttttctctcatcctaaacaccattcatatttttcctaggtcacattttagtgggatcatttacaaagcccccagaacttaatcatcatgttttaccttttttattgaattatatacacctcttacaaaaatgcttgaagtaatttaacacctgtacatcagtacaaaacctggctgagtaaaatgaagagaggatctattcaagatcattaagaccaaatgtaaactgggaagtatgtggaagatagctgtccagcaagtgtctggaaggtgttctagctgggtagagagcctattctaacagacacgcacatcgcagaaagcagcatgaacagaaccacatcctagataagagttctgtgtacagaagatccatggaggcaagtgctgtcaggaaggacactgcctccctccaccctcccaaatgtcaccaccaagttccttcaggtgagacctcacacaatgtcaagtgctttctaggaaatactaagatcaggttgagagattctgcttggtctagtcaatctgaaaaattcaggctggaaagacaccttttctcaagagctgaattgacttttgccttcaaatcctgcctgcaccttgcctacgatggcatcaatttacacctaaggacctttgaagagaaaaattccattatttcttttctttcttgagagcagattttttccctcctcctttggaagatttgcagtactttgcttccatctgagccagaaaattgtccatttccttttgccgatccttttgtctgctctgtttgagaagttaaaacacaagctttcacaacattatccatagacagaaagtacctagtggttgccaggggctggaaaagtggaataactactaatgggtatggagtttttttggaatggtgaaaatgtcctacaattggtgttaataattgtaaaactttgtaaatacacttaaaaccaccaaattgtacactttaaaaggacaaatagaaggtatgcggttatgtcttaaaagaagaaaacaaaatacaacattccaaagaaaatattagcagtaggaatcagatcattaaagatgtggcaacaaactgccaagtttacctgaatggctgccttcaggctatccacgccttcatcaagccccaactcctttctgctcatttctgcttctttggcctcttcctgagcctgaaacaggaactcacatgagactcagggccaccaggaaatgcttaaaatacatactctttcccaaaagcaaatctataattctgtttcaattttatgaatatatgaatagacaaaatgaatcgaattacataactatgtcattcattaaatggcaacaatgctgacagcaagcagtagatcctctgattccaattaccatttgttttttacccaattctatttgctagaggtagtaagtactctggcactcataaatcacatgatgataaaaaggaacat

SEQ ID NO: 6963 - protein, 104 aa, Homo sapiens [sequence omitted]

SEQ ID NO: 6964 - DNA, 3663 bp, Homo sapiens
gtaattctgcaggatctgtgccctgatcttgatttatactgtgttttgtcaaaagtacaaacacagtgctaatttatgacgtggaattggagctgtttggcctgcacttaccatatctgccatggtcgatagggttttaactacataccacattacagatagttttcactgtttctgtaacttttgtctcctctgcagaaaccccatggcgactctagtcgagctcaaagtgcggtggtggatgaacctaactatcagcagccacaagaaaggctccttttgcccgactttttccccaggcccaacacaactcaatcatttttgctggatacacagtatcgtcgctcatgtgcagttgagtatcctcatcaggcccgacctggcaggggatctgcaggtcctcagttacatgggtctacaaaatctcaaagcggaggcagaccagtctctcgaaccaggcagggaccataaggcaaatgagaagaatctatcaggctgcaggaaacacgagatttcatgaagcagtattcagtcatcaagtgatgcagagcttgtatagaagatcgactagaaatcatcttcatgaagagtgattttggcacaagtgaccgaagaacaaaacaccatagcagccaaaaatgacatgagtgttgtttctatctccagttactgtctctttcagcagaaattaacctatcccattggaaaggcaagtttgtacccaaagatgcaacagtgaataatacccaaatcactgctcatgttatctcttaacaatgatcagttcaatcatataggatttgatgagctcacacatacacaaaaagcagcaaatcatcagtgacaatatcactggcttcagaatacttcagcctgtgttcatttctggagagttgtactcagttttaagtcattttgctgttgaaaatctgacctcatcaaatagatgtcattcctaaaactctctttagatgtcctaccctatcagcagattaaaatggaaggggtgtgtaactaaaaacataaatgttaagcattagtataaagtaacttctgtaataaattatatcgcatattttttcagataggacagctcaaccttacgatgcctacctgatgccaggtgatgcttattttcttcctaaagtaggttactggtcatatcttttttccaaatattaaatgcaccttgccagatattctcctgcagctctaaggaaaggaaatcaatttaaaaataatttgtagaatctactattgagccaccaaagtataattccctaaaagtttaagaaaccctggcaattaattcagcataaacatatcctataaacagcaggagaggttcagctttctgattttactgtggaccttttcctaagggcattcatgaatgcagcaacagttttaactatggcttacatttattttaaatttcactaaatacaaatcttgattgtcatgccagttttagatcttattaattttcagaatggataaattcaaataatcataaattacggtaactttttattataccaaggtgttctaatgccatcatatgaagacagatgcttcaaacaacctgcattaaattatatttttaataaaattaaaatctatttttaacctatttgtagtcacaaaccgaaaacgtgtcgtctttaccttagagctaaaggcttactttatgcatacggtatatttaatagtctacaaatcaaagatttaaacagtcccttaaaaattccatatattctcataccaactcatctacatagaaatgaaaatctctattgttctcacaaaccattaccatgagttcactataacaactggatcaatatggcttgcctttcaaagttaaagaatcagaaaggggcctgtaagaagtcatttagcccaattccctcaccctgtgtgttttccctcaaagccagtgcaatttttttttaaccaaaaaactggacatgtttaatacatacagtttgacaaatttggatttcactctttgttttgatgtagtaactcttttataaaagggaacagattcagacaagctcagtggcccaactgaagacattcagcaattaatggcaggacttcagtaatcagtggcaggactacaacatacatctcttcatgctagggaaaccaggctctctattataaagctgaccagggctattgttttccccttttctctcatcctaaacaccattcatatttttcctaggtcacattttagtgggatcatttacaaagcccccagaacttaatcatcatgttttaccttttttattgaattatatacacctcttacaaaaatgcttgaagtaatttaacacctgtacatcagtacaaaacctggctgagtaaaatgaagagaggatctattcaagatcattaagaccaaatgtaaactgggaagtatgtggaagatagctgtccagcaagtgtctggaaggtgttctagctgggtagagagcctattctaacagacacgcacatcgcagaaagcagcatgaacagaaccacatcctagataagagttctgtgtacagaagatccatggaggcaagtgctgtcaggaaggacactgcctccctccaccctcccaaatgtcaccaccaagttccttcaggtgagacctcacacaatgtcaagtgctttctaggaaatactaagatcaggttgagagattctgcttggtctagtcaatctgaaaaattcaggctggaaagacaccttttctcaagagctgaattgacttttgccttcaaatcctgcctgcaccttgcctacgatggcatcaatttacacctaaggacctttgaagagaaaaattccattatttcttttctttcttgagagcagattttttccctcctcctttggaagatttgcagtactttgcttccatctgagccagaaaattgtccatttccttttgccgatccttttgtctgctctgtttgagaagttaaaacacaagctttcacaacattatccatagacagaaagtacctagtggttgccaggggctggaaaagtggaataactactaatgggtatggagtttttttggaatggtgaaaatgtcctacaattggtgttaataattgtaaaactttgtaaatacacttaaaaccaccaaattgtacactttaaaaggacaaatagaaggtatgcggttatgtcttaaaagaagaaaacaaaatacaacattccaaagaaaatattagcagtaggaatcagatcattaaagatgtggcaacaaactgccaagtttacctgaatggctgccttcaggctatccacgccttcatcaagccccaactcctttctgctcatttctgcttctttggcctcttcctgagcctgaaacaggaactcacatgagactcagggccaccaggaaatgcttaaaatacatactctttcccaaaagcaaatctataattctgtttcaattttatgaatatatgaatagacaaaatgaatcgaattacataactatgtcattcattaaatggcaacaatgctgacagcaagcagtagatcctctgattccaattaccatttgttttttacccaattctatttgctagaggtagtaagtactctggcactcataaatcacatgatgataaaaaggaacat

SEQ ID NO: 6965 - protein, 132 aa, Homo sapiens [sequence omitted]

SEQ ID NO: 6966 - DNA, 5411 bp, Homo sapiens
cttattcttgtacttttctttcttgctggtaattttatggagcaggttaagaaggctgctctgtgttaggataaactgtataccaataatgttgacaacctgtaatgagtgttgcattttacttcttgtatcttttccttcctaccttgatgccagtaatctataagggatctttatagtttgaatgtatttgaataacttcagtatactttagttctacttttttatttgactcacaaccattcttaggtctcaagtattcccatgtgttttaaaagcctgaagtcagtgagatgaaattcaacatcaagaatttgaagtaacttgtaaggaaaaataatataaagataccattggggcagtggctcacacctgtaatctcagcactttgggaggctgaggtggaaggatcacttgaagccagagtttgagaccagcctgtgcaacacagcaagaccccgtctctacaaaaacttaaaaaattagctggctgtggtgttgctcacccatagttccagctactcgggaagctgaggcagtaagatcacttgagcccaggaggccgatgctgcagtgaactgtgattgttccactacagtccagcctgggtgacagagaaaagaaaaagaaaacattacataatttggctagagcataataatttgattttctggtttttgaaaatttgagttgcaataaaaggatatttcagtgtgcgatttcaattttccgtagcaaatgtatatatagaaaaatgttaaaatagatgtatttgaataccttaaaaaatacaagaaactggaagaaagataatattgcaaagcatctacatatatcctaggccttttgtgtacaaggttatttgtgacaattgtaaggtattatgaaggcaggtaggattatctccgttttacagatagggaagctgaggcctagaggtggaaacttgcccagtgatgtaagattcatctcccggttatgccctcctggaaagcccttcccaacatattatgttgtccatagagggaaaaatgagcaaagacagatggcttaactctggtgtgtgactaagatataggaaatttatagaggaggttctatcaatgtgccgacttactttgtgttttatgttctgagaacgattaccagccatctcaaattctgtggttgtcaaagctcccctggggttgttgctggttggcccccacttgctttgagactttgatgccagggcaggttgagaggaactgacttcagctgagtttgatcttggatctgggaaagagaaatgctttgaaaatcacggcaactctgggaagtttaaaagatattaatgtatcctggagagtttgaggctttgcagaaacttattggcagagcagaatgattctgaaaaatgctacatcagtgaggggatatttgataaggtattttctgccaactcgggtattcacttagcattgtttatcctttaagatatgtatacacatacttcctctgtgagtttaccctactaacaaagttttatccccagcctcaaccttgctttgggtctccaggcccaagtttctcaccatctcttggatgattgctccagcccactctgctgccacctgggatccaacatgttcaaacccagctgtgaacttcacagagtattaaaagaaagagcctttgcttcagcagtttatgttattaagacggaggcttgggtcatgttatctctctccaccaatgtgtaaggtgaaagtcctattaggtaagagtttttggaagacccgtgttttgtgctttttgggtttcagtatagggttttttcctacagggctagagggaaagtaccccagcatttccaaccagtggggtgcaaaattatttgggtctacagctttacctattcctttcaagaacatttttgaaaaaacacatctgttaagttgaaccatgtgtaactgctgaatgctgatgtttggccgttttctacttaaaaaaataggccagcagtttgtaaattcaagctaatatatgaactttttgaaaaagttgttcttggacactaaaaggtaagacggacgccagatttccagagcaaggggaggagagacccgagcaacatcacttccctgaagacctagctcctgcgcgcggccggggactgtgactccacatgccggcgttacttacccgggcccgcgcctgactcgccacacctcattttgcggccgccgtaaagcgcggatgcgcggcgtggccacgccccttcagtgcttgtgacgcaggcgccctgggctttttgggcgcgaaaaagaagcagtcctgggttgtacccggcgcagctgggagcggctgcttcctccggggtcgtatctccgcccggcatggggctgctggacctttgcgaggaagtgttcggcaccgccgacctttaccgggtgctgggcgtgcgacgcgaggcctccgacggcgaggtccgacgaggctaccacaaggtgtccctgcaggtacacccggaccgggtgggtgagggcgacaaggaggacgccacccgccgcttccagatcctgggaaaagtctattccgttctcagtgacagagaacagagagcagtgtacgatgagcagggaacagtggacgaggactctcctgtgctcacccaagaccgagactgggaggcgtattggcggctactctttaaaaagatatctttagaggacattcaagcttttgaaaagacatacaaaggttcggaagaagagctggctgatattaagcaggcctatctggacttcaagggtgacatggatcagatcatggagtctgtgctttgcgtgcagtacacagaggaacccaggataaggaatatcattcagcaagctattgacgccggagaggtcccatcctataatgcctttgtcaaagaatcgaaacaaaagatgaatgcaaggaaaaggagggctcaggaagaggccaaagaagcagaaatgagcagaaaggagttggggcttgatgaaggcgtggatagcctgaaggcagccattcagagcagacaaaaggatcggcaaaaggaaatggacaattttctggctcagatggaagcaaagtactgcaaatcttccaaaggaggagggaaaaaatctgctctcaagaaagaaaagaaataatggaatttttctcttcaaaggtccttaggtgtaaattgatgccatcgtaggcaaggtgcaggcaggatttgaaggcaaaagtcaattcagctcttgagaaaaggtgtctttccagcctgaatttttcagattgactagaccaagcagaatctctcaacctgatcttagtatttcctagaaagcacttgacattgtgtgaggtctcacctgaaggaacttggtggtgacatttgggagggtggagggaggcagtgtccttcctgacagcacttgcctccatggatcttctgtacacagaactcttatctaggatgtggttctgttcatgctgctttctgcgatgtgcgtgtctgttagaataggctctctacccagctagaacaccttccagacacttgctggacagctatcttccacatacttcccagtttacatttggtcttaatgatcttgaatagatcctctcttcattttactcagccaggttttgtactgatgtacaggtgttaaattacttcaagcatttttgtaagaggtgtatataattcaataaaaaaggtaaaacatgatgattaagttctgggggctttgtaaatgatcccactaaaatgtgacctaggaaaaatatgaatggtgtttaggatgagagaaaaggggaaaacaatagccctggtcagctttataatagagagcctggtttccctagcatgaagagatgtatgttgtagtcctgccactgattactgaagtcctgccattaattgctgaatgtcttcagttgggccactgagcttgtctgaatctgttcccttttataaaagagttactacatcaaaacaaagagtgaaatccaaatttgtcaaactgtatgtattaaacatgtccagttttttggttaaaaaaaaattgcactggctttgagggaaaacacacagggtgagggaattgggctaaatgacttcttacaggcccctttctgattctttaactttgaaaggcaagccatattgatccagttgttatagtgaactcatggtaatggtttgtgagaacaatagagattttcatttctatgtagatgagttggtatgagaatatatggaatttttaagggactgtttaaatctttgatttgtagactattaaatataccgtatgcataaagtaagcctttagctctaaggtaaagacgacacgttttcggtttgtgactacaaataggttaaaaatagattttaattttattaaaaatataatttaatgcaggttgtttgaagcatctgtcttcatatgatggcattagaacaccttggtataataaaaagttaccgtaatttatgattatttgaatttatccattctgaaaattaataagatctaaaactggcatgacaatcaagatttgtatttagtgaaatttaaaataaatgtaagccatagttaaaactgttgctgcattcatgaatgcccttaggaaaaggtccacagtaaaatcagaaagctgaacctctcctgctgtttataggatatgtttatgctgaattaattgccagggtttcttaaacttttagggaattatactttggtggctcaatagtagattctacaaattatttttaaattgatttcctttccttagagctgcaggagaatatctggcaaggtgcatttaatatttggaaaaaagatatgaccagtaacctactttaggaagaaaataagcatcacctggcatcaggtaggcatcgtaaggttgagctgtcctatctgaaaaaatatgcgatataatttattacagaagttactttatactaatgcttaacatttatgtttttagttacacaccccttccattttaatctgctgatagggtaggacatctaaagagagttttaggaatgacatctatttgatgaggtcagattttcaacagcaaaatgacttaaaactgagtacaactctccagaaatgaacacaggctgaagtattctgaagccagtgatattgtcactgatgatttgctgctttttgtgtatgtgtgagctcatcaaatcctatatgattgaactgatcattgttaagagataacatgagcagtgatttgggtattattcactgttgcatctttgggtacaaacttgcctttccaatgggataggttaatttctgctgaaagagacagtaactggagatagaaacaacactcatgtcatttttggctgctatggtgttttgttcttcggtcacttg

SEQ ID NO: 6967 - protein, 260 aa, Homo sapiens; identical to SEQ ID NO: 775

SEQ ID NO: 6968 - DNA, 4603 bp, Homo sapiens
cttattcttgtacttttctttcttgctggtaattttatggagcaggttaagaaggctgctctgtgttaggataaactgtataccaataatgttgacaacctgtaatgagtgttgcattttacttcttgtatcttttccttcctaccttgatgccagtaatctataagggatctttatagtttgaatgtatttgaataacttcagtatactttagttctacttttttatttgactcacaaccattcttaggtctcaagtattcccatgtgttttaaaagcctgaagtcagtgagatgaaattcaacatcaagaatttgaagtaacttgtaaggaaaaataatataaagataccattggggcagtggctcacacctgtaatctcagcactttgggaggctgaggtggaaggatcacttgaagccagagtttgagaccagcctgtgcaacacagcaagaccccgtctctacaaaaacttaaaaaattagctggctgtggtgttgctcacccatagttccagctactcgggaagctgaggcagtaagatcacttgagcccaggaggccgatgctgcagtgaactgtgattgttccactacagtccagcctgggtgacagagaaaagaaaaagaaaacattacataatttggctagagcataataatttgattttctggtttttgaaaatttgagttgcaataaaaggatatttcagtgtgcgatttcaattttccgtagcaaatgtatatatagaaaaatgttaaaatagatgtatttgaataccttaaaaaatacaagaaactggaagaaagataatattgcaaagcatctacatatatcctaggccttttgtgtacaaggttatttgtgacaattgtaaggtattatgaaggcaggtaggattatctccgttttacagatagggaagctgaggcctagaggtggaaacttgcccagtgatgtaagattcatctcccggttatgccctcctggaaagcccttcccaacatattatgttgtccatagagggaaaaatgagcaaagacagatggcttaactctggtgtgtgactaagatataggaaatttatagaggaggttctatcaatgtgccgacttactttgtgttttatgttctgagaacgattaccagccatctcaaattctgtggttgtcaaagctcccctggggttgttgctggttggcccccacttgctttgagactttgatgccagggcaggttgagaggaactgacttcagctgagtttgatcttggatctgggaaagagaaatgctttgaaaatcacggcaactctgggaagtttaaaagatattaatgtatcctggagagtttgaggctttgcagaaacttattggcagagcagaatgattctgaaaaatgctacatcagtgaggggatatttgataaggtattttctgccaactcgggtattcacttagcattgtttatcctttaagatatgtatacacatacttcctctgtgagtttaccctactaacaaagttttatccccagcctcaaccttgctttgggtctccaggcccaagtttctcaccatctcttggatgattgctccagcccactctgctgccacctgggatccaacatgttcaaacccagctgtgaacttcacagagtattaaaagaaagagcctttgcttcagcagtttatgttattaagacggaggcttgggtcatgttatctctctccaccaatgtgtaaggtgaaagtcctattaggtaagagtttttggaagacccgtgttttgtgctttttgggtttcagtatagggttttttcctacagggctagagggaaagtaccccagcatttccaaccagtggggtgcaaaattatttgggtctacagctttacctattcctttcaagaacatttttgaaaaaacacatctgttaagttgaaccatgtgtaactgctgaatgctgatgtttggccgttttctacttaaaaaaataggccagcagtttgtaaattcaagctaatatatgaactttttgaaaaagttgttcttggacactaaaaggtaagacggacgccagatttccagagcaaggggaggagagacccgagcaacatcacttccctgaagacctagctcctgcgcgcggccggggactgtgactccacatgccggcgttacttacccgggcccgcgcctgactcgccacacctcattttgcggccgccgtaaagcgcggatgcgcggcgtggccacgccccttcagtgcttgtgacgcaggcgccctgggctttttgggcgcgaaaaagaagcagtcctgggttgtacccggcgcagctgggagcggctgcttcctccggggtcgtatctccgcccggcatggggctgctggacctttgcgaggaagtgttcggcaccgccgacctttaccgggtgctgggcgtgcgacgcgaggcctccgacggcgaggtccgacgaggctaccacaaggtgtccctgcaggtacacccggaccgggtgggtgagggcgacaaggaggacgccacccgccgcttccagatcctgggaaaagtctattccgttctcagtgacagagaacagagagcagtgtacgatgagcagggaacagtggacgaggactctcctgtgctcacccaagaccgagactgggaggcgtattggcggctactctttaaaaagatatctttagaggacattcaagcttttgaaaagacatacaaaggttcggaagaagagctggctgatattaagcaggcctatctggacttcaagggtgacatggatcagatcatggagtctgtgctttgcgtgcagtacacagaggaacccaggataaggaatatcattcagcaagctattgacgccggagaggtcccatcctataatgcctttgtcaaagaatcgaaacaaaagatgaatgcaaggaaaaggagggctcaggaagaggccaaagaagcagaaatgagcagaaaggagttggggcttgatgaaggcgtggatagcctgaaggcagccattcagagcagacaaaaggatcggcaaaaggaaatggacaattttctggctcagatggaagcaaagtactgcaaatcttccaaaggaggagggaaaaaatctgctctcaagaaagaaaagaaataatggaatttttctcttcaaaggtccttaggtgtaaattgatgccatcgtaggcaaggtgcaggcaggatttgaaggcaaaagtcaattcagctcttgagaaaaggtgtctttccagcctgaatttttcagattgactagaccaagcagaatctctcaacctgatcttagtatttcctagaaagcacttgacattgtgtgaggtctcacctgaaggaacttggtggtgacatttgggagggtggagggaggcagtgtccttcctgacagcacttgcctccatggatcttctgtacacagaactcttatctaggatgtggttctgttcatgctgctttctgcgatgtgcgtgtctgttagaataggctctctacccagctagaacaccttccagacacttgctggacagctatcttccacatacttcccagtttacatttggtcttaatgatcttgaatagatcctctcttcattttactcagccaggttttgtactgatgtacaggtgttaaattacttcaagcatttttgtaagaggtgtatataattcaataaaaaaggtaaaacatgatgattaagttctgggggctttgtaaatgatcccactaaaatgtgacctaggaaaaatatgaatggtgtttaggatgagagaaaaggggaaaacaatagccctggtcagctttataatagagagcctggtttccctagcatgaagagatgtatgttgtagtcctgccactgattactgaagtcctgccattaattgctgaatgtcttcagttgggccactgagcttgtctgaatctgttcccttttataaaagagttactacatcaaaacaaagagtgaaatccaaatttgtcaaactgtatgtattaaacatgtccagttttttggttaaaaaaaaattgcactggctttgagggaaaacacacagggtgagggaattgggctaaatgacttcttacaggcccctttctgattctttaactttgaaaggcaagccatattgatccagttgttatagtgaactcatggtaatggtttgtgagaacaatagagattttcatttctatgtagatgagttggtatgagaatatatggaatttttaagggactgtttaaatctttgatttgtagactattaaatataccgtatgcataaagtaagcctttagctctaaggtaaagacgacacgttttcggtttgtgactacaaataggttaaaaatagattttaattttattaaaaatataatttaatgcaggttgtttgaagcatctgtcttcatatgatggcattagaacaccttggtataataaaaagttaccgtaatttatgattatttgaatttatccattctgaaaattaataagatctaaaactggcatgacaatcaagatttgtatttagtgaaatttaaaataaatgtaagccatagtt

SEQ ID NO: 6969 - protein, 260 aa, Homo sapiens; identical to SEQ ID NO: 775

SEQ ID NO: 6970 - DNA, 3735 bp, Homo sapiens
cttattcttgtacttttctttcttgctggtaattttatggagcaggttaagaaggctgctctgtgttaggataaactgtataccaataatgttgacaacctgtaatgagtgttgcattttacttcttgtatcttttccttcctaccttgatgccagtaatctataagggatctttatagtttgaatgtatttgaataacttcagtatactttagttctacttttttatttgactcacaaccattcttaggtctcaagtattcccatgtgttttaaaagcctgaagtcagtgagatgaaattcaacatcaagaatttgaagtaacttgtaaggaaaaataatataaagataccattggggcagtggctcacacctgtaatctcagcactttgggaggctgaggtggaaggatcacttgaagccagagtttgagaccagcctgtgcaacacagcaagaccccgtctctacaaaaacttaaaaaattagctggctgtggtgttgctcacccatagttccagctactcgggaagctgaggcagtaagatcacttgagcccaggaggccgatgctgcagtgaactgtgattgttccactacagtccagcctgggtgacagagaaaagaaaaagaaaacattacataatttggctagagcataataatttgattttctggtttttgaaaatttgagttgcaataaaaggatatttcagtgtgcgatttcaattttccgtagcaaatgtatatatagaaaaatgttaaaatagatgtatttgaataccttaaaaaatacaagaaactggaagaaagataatattgcaaagcatctacatatatcctaggccttttgtgtacaaggttatttgtgacaattgtaaggtattatgaaggcaggtaggattatctccgttttacagatagggaagctgaggcctagaggtggaaacttgcccagtgatgtaagattcatctcccggttatgccctcctggaaagcccttcccaacatattatgttgtccatagagggaaaaatgagcaaagacagatggcttaactctggtgtgtgactaagatataggaaatttatagaggaggttctatcaatgtgccgacttactttgtgttttatgttctgagaacgattaccagccatctcaaattctgtggttgtcaaagctcccctggggttgttgctggttggcccccacttgctttgagactttgatgccagggcaggttgagaggaactgacttcagctgagtttgatcttggatctgggaaagagaaatgctttgaaaatcacggcaactctgggaagtttaaaagatattaatgtatcctggagagtttgaggctttgcagaaacttattggcagagcagaatgattctgaaaaatgctacatcagtgaggggatatttgataaggtattttctgccaactcgggtattcacttagcattgtttatcctttaagatatgtatacacatacttcctctgtgagtttaccctactaacaaagttttatccccagcctcaaccttgctttgggtctccaggcccaagtttctcaccatctcttggatgattgctccagcccactctgctgccacctgggatccaacatgttcaaacccagctgtgaacttcacagagtattaaaagaaagagcctttgcttcagcagtttatgttattaagacggaggcttgggtcatgttatctctctccaccaatgtgtaaggtgaaagtcctattaggtaagagtttttggaagacccgtgttttgtgctttttgggtttcagtatagggttttttcctacagggctagagggaaagtaccccagcatttccaaccagtggggtgcaaaattatttgggtctacagctttacctattcctttcaagaacatttttgaaaaaacacatctgttaagttgaaccatgtgtaactgctgaatgctgatgtttggccgttttctacttaaaaaaataggccagcagtttgtaaattcaagctaatatatgaactttttgaaaaagttgttcttggacactaaaaggtaagacggacgccagatttccagagcaaggggaggagagacccgagcaacatcacttccctgaagacctagctcctgcgcgcggccggggactgtgactccacatgccggcgttacttacccgggcccgcgcctgactcgccacacctcattttgcggccgccgtaaagcgcggatgcgcggcgtggccacgccccttcagtgcttgtgacgcaggcgccctgggctttttgggcgcgaaaaagaagcagtcctgggttgtacccggcgcagctgggagcggctgcttcctccggggtcgtatctccgcccggcatggggctgctggacctttgcgaggaagtgttcggcaccgccgacctttaccgggtgctgggcgtgcgacgcgaggcctccgacggcgaggtccgacgaggctaccacaaggtgtccctgcaggtacacccggaccgggtgggtgagggcgacaaggaggacgccacccgccgcttccagatcctgggaaaagtctattccgttctcagtgacagagaacagagagcagtgtacgatgagcagggaacagtggacgaggactctcctgtgctcacccaagaccgagactgggaggcgtattggcggctactctttaaaaagatatctttagaggacattcaagcttttgaaaagacatacaaaggttcggaagaagagctggctgatattaagcaggcctatctggacttcaagggtgacatggatcagatcatggagtctgtgctttgcgtgcagtacacagaggaacccaggataaggaatatcattcagcaagctattgacgccggagaggtcccatcctataatgcctttgtcaaagaatcgaaacaaaagatgaatgcaaggaaaaggagggctcaggaagaggccaaagaagcagaaatgagcagaaaggagttggggcttgatgaaggcgtggatagcctgaaggcagccattcagagcagacaaaaggatcggcaaaaggaaatggacaattttctggctcagatggaagcaaagtactgcaaatcttccaaaggaggagggaaaaaatctgctctcaagaaagaaaagaaataatggaatttttctcttcaaaggtccttaggtgtaaattgatgccatcgtaggcaaggtgcaggcaggatttgaaggcaaaagtcaattcagctcttgagaaaaggtgtctttccagcctgaatttttcagattgactagaccaagcagaatctctcaacctgatcttagtatttcctagaaagcacttgacattgtgtgaggtctcacctgaaggaacttggtggtgacatttgggagggtggagggaggcagtgtccttcctgacagcacttgcctccatggatcttctgtacacagaactcttatctaggatgtggttctgttcatgctgctttctgcgatgtgcgtgtctgttagaataggctctctacccagctagaacaccttccagacacttgctggacagctatcttccacatacttcccagtttacatttggtcttaatgatcttgaatagatcctctcttcattttactcagccaggttttgtactgatgtacaggtgttaaattacttcaagcatttttgtaagaggtgtatataattcaataaaaaaggtaaaacatgatgatt

SEQ ID NO: 6971 - protein, 260 aa, Homo sapiens; identical to SEQ ID NO: 775

SEQ ID NO: 6972 - DNA, 4385 bp, Homo sapiens
ggggagagctctcccaggcgcgatggaggcaacccgaacctgaagcagccacactgccttacatttgatccttctctcagttttttccccacttaatcaccgctgaaaaatttccaccccattgaagcagctaaggctccgacaagctactctcctctgcaaggcctaccgtgggggccacttaaccatccgccttgccctgggtggctgcaccaatcggccgttctaccgcattgtggctgctcacaacaagtgtcccagggatggccgtttcgtagagcagctgggctcctatgatccattgcccaacagtcatggagaaaaactcgttgccctcaacctagacaggatccgtcattggattggctgcggggcccacctctctaagcctatggaaaagcttctgggtcttgctggctttttccctctgcatcctatgatgatcacaaatgctgagagactgcgaaggaaacgggcacgtgaagtcctgttagcttctcagaaaacagatgcagaagctacagatacagaggctacagaaacataaatgagctgactttagtgagcatagcagtgggaacaaggtcaaggtccttttgaaacactgcagcgatcttaattttgttagatttggagttcaataaatggagtatcctgagttgcccttgctcttctggcctggcctgcacagggcccagggagagatttgttcttgtgtgacttagagctgggtgtgggtactaattagcttttttcgactttgtcttgggatagacagtggctatgggaggattggacttttgagttgggctctgggtctcttggacaactttacaatttactggcttccaagacttcctgcttcaaaacccccagccagactattcatggcccattcagatcttcatgttcatcccacaagtgcaagaacagttaacctttcttaattgatttttgtaattggaggtttatattgtcttgcctaatgcatattctctttttttttttttttttgagacggagtcttgttctgttgccaggctggagtgcggtggtgcaatctcagctcactgcaatctccacctcctgggttcaagaggttctcctgcctcagcctcctgagtagccggggagctacaagcatgcaccaccacacccagctaattttttttttttttttgagaggagtctcgctctgtcgcccaggcttgagtgcagtggcgcgatctcggctcactgcaagctctgtctcctgggttcatgccattctcctgcttcagcctcccgagtagtcccaggagtagctgggactacaggtgcccaccaccacacccagctaatttttttgtatttttagtagagatggggtttcaccatgttatccaggatggttttgatctcctgacctcgtgatccgcccgccttggcctcccaaaagtgctgggattataggcgtgagccaccgcccgggcaaatttttgtatttttagtagagatggggtttcaccgtgttggccaggatggtctcaatctgaccttgtgatctgcccacctcggcctcccaaagtgctaggattactggcgtgagccaccactcctagccttaatgcatattcttaaatatacaaaggtagatttgttatgaaaattgctttggggctctaataacctaccttttaagaatgagaaactgctgggcttaagggagttcagtatgaatcaagattgaaccattcaaatgtggctgtgatttctgcatatatcatagatgggatccttctgagaatactggaatagggaattaggacaccaagccaattcagctgtgaaccttattcttgtacttttctttcttgctggtaattttatggagcaggttaagaaggctgctctgtgttaggataaactgtataccaataatgttgacaacctgtaatgagtgttgcattttacttcttgtatcttttccttcctaccttgatgccagtaatctataagggatctttatagtttgaatgtatttgaataacttcagtatactttagttctacttttttatttgactcacaaccattcttaggtctcaagtattcccatgtgttttaaaagcctgaagtcagtgagatgaaattcaacatcaagaatttgaagtaacttgtaaggaaaaataatataaagataccattggggcagtggctcacacctgtaatctcagcactttgggaggctgaggtggaaggatcacttgaagccagagtttgagaccagcctgtgcaacacagcaagaccccgtctctacaaaaacttaaaaaattagctggctgtggtgttgctcacccatagttccagctactcgggaagctgaggcagtaagatcacttgagcccaggaggccgatgctgcagtgaactgtgattgttccactacagtccagcctgggtgacagagaaaagaaaaagaaaacattacataatttggctagagcataataatttgattttctggtttttgaaaatttgagttgcaataaaaggatatttcagtgtgcgatttcaattttccgtagcaaatgtatatatagaaaaatgttaaaatagatgtatttgaataccttaaaaaatacaagaaactggaagaaagataatattgcaaagcatctacatatatcctaggccttttgtgtacaaggttatttgtgacaattgtaaggtattatgaaggcaggtaggattatctccgttttacagatagggaagctgaggcctagaggtggaaacttgcccagtgatgtaagattcatctcccggttatgccctcctggaaagcccttcccaacatattatgttgtccatagagggaaaaatgagcaaagacagatggcttaactctggtgtgtgactaagatataggaaatttatagaggaggttctatcaatgtgccgacttactttgtgttttatgttctgagaacgattaccagccatctcaaattctgtggttgtcaaagctcccctggggttgttgctggttggcccccacttgctttgagactttgatgccagggcaggttgagaggaactgacttcagctgagtttgatcttggatctgggaaagagaaatgctttgaaaatcacggcaactctgggaagtttaaaagatattaatgtatcctggagagtttgaggctttgcagaaacttattggcagagcagaatgattctgaaaaatgctacatcagtgaggggatatttgataaggtattttctgccaactcgggtattcacttagcattgtttatcctttaagatatgtatacacatacttcctctgtgagtttaccctactaacaaagttttatccccagcctcaaccttgctttgggtctccaggcccaagtttctcaccatctcttggatgattgctccagcccactctgctgccacctgggatccaacatgttcaaacccagctgtgaacttcacagagtattaaaagaaagagcctttgcttcagcagtttatgttattaagacggaggcttgggtcatgttatctctctccaccaatgtgtaaggtgaaagtcctattaggtaagagtttttggaagacccgtgttttgtgctttttgggtttcagtatagggttttttcctacagggctagagggaaagtaccccagcatttccaaccagtggggtgcaaaattatttgggtctacagctttacctattcctttcaagaacatttttgaaaaaacacatctgttaagttgaaccatgtgtaactgctgaatgctgatgtttggccgttttctacttaaaaaaataggccagcagtttgtaaattcaagctaatatatgaactttttgaaaaagttgttcttggacactaaaaggtaagacggacgccagatttccagagcaaggggaggagagacccgagcaacatcacttccctgaagacctagctcctgcgcgcggccggggactgtgactccacatgccggcgttacttacccgggcccgcgcctgactcgccacacctcattttgcggccgccgtaaagcgcggatgcgcggcgtggccacgccccttcagtgcttgtgacgcaggcgccctgggctttttgggcgcgaaaaagaagcagtcctgggttgtacccggcgcagctgggagcggctgcttcctccggggtcgtatctccgcccggcatggggctgctggacctttgcgaggaagtgttcggcaccgccgacctttaccgggtgctgggcgtgcgacgcgaggcctccgacggcgaggtccgacgaggctaccacaaggtgtccctgcaggtacacccggaccgggtgggtgagggcgacaaggaggacgccacccgccgctt

SEQ ID NO: 6973 - protein, 51 aa, Homo sapiens [sequence omitted]

SEQ ID NO: 6974 - DNA, 2790 bp, Homo sapiens
attgtgggaagtatagggcggcaagcggaggaggcgtggcgagcggatcatccgcttccggagtcgaggttttcgggcttgtaccgcttggcggtgcggcctggtgtcggcttgcaggttctttctgtgtttgttctctgccctgccaaggccgtagagctggtgcgtgcgggtagcggggctctccgaggagccgcacgccggcggcaccatggtccacctcactactctcctctgcaaggcctaccgtgggggccacttaaccatccgccttgccctgggtggctgcaccaatcggccgttctaccgcattgtggctgctcacaacaagtgtcccagggatggccgtttcgtagagcagctgggctcctatgatccattgcccaacagtcatggagaaaaactcgttgccctcaacctagacaggatccgtcattggattggctgcggggcccacctctctaagcctatggaaaagcttctgggtctcaagtattcccatgtgttttaaaagcctgaagtcagtgagatgaaattcaacatcaagaatttgaagtaacttgtaaggaaaaataatataaagataccattggggcagtggctcacacctgtaatctcagcactttgggaggctgaggtggaaggatcacttgaagccagagtttgagaccagcctgtgcaacacagcaagaccccgtctctacaaaaacttaaaaaattagctggctgtggtgttgctcacccatagttccagctactcgggaagctgaggcagtaagatcacttgagcccaggaggccgatgctgcagtgaactgtgattgttccactacagtccagcctgggtgacagagaaaagaaaaagaaaacattacataatttggctagagcataataatttgattttctggtttttgaaaatttgagttgcaataaaaggatatttcagtgtgcgatttcaattttccgtagcaaatgtatatatagaaaaatgttaaaatagatgtatttgaataccttaaaaaatacaagaaactggaagaaagataatattgcaaagcatctacatatatcctaggccttttgtgtacaaggttatttgtgacaattgtaaggtattatgaaggcaggtaggattatctccgttttacagatagggaagctgaggcctagaggtggaaacttgcccagtgatgtaagattcatctcccggttatgccctcctggaaagcccttcccaacatattatgttgtccatagagggaaaaatgagcaaagacagatggcttaactctggtgtgtgactaagatataggaaatttatagaggaggttctatcaatgtgccgacttactttgtgttttatgttctgagaacgattaccagccatctcaaattctgtggttgtcaaagctcccctggggttgttgctggttggcccccacttgctttgagactttgatgccagggcaggttgagaggaactgacttcagctgagtttgatcttggatctgggaaagagaaatgctttgaaaatcacggcaactctgggaagtttaaaagatattaatgtatcctggagagtttgaggctttgcagaaacttattggcagagcagaatgattctgaaaaatgctacatcagtgaggggatatttgataaggtattttctgccaactcgggtattcacttagcattgtttatcctttaagatatgtatacacatacttcctctgtgagtttaccctactaacaaagttttatccccagcctcaaccttgctttgggtctccaggcccaagtttctcaccatctcttggatgattgctccagcccactctgctgccacctgggatccaacatgttcaaacccagctgtgaacttcacagagtattaaaagaaagagcctttgcttcagcagtttatgttattaagacggaggcttgggtcatgttatctctctccaccaatgtgtaaggtgaaagtcctattaggtaagagtttttggaagacccgtgttttgtgctttttgggtttcagtatagggttttttcctacagggctagagggaaagtaccccagcatttccaaccagtggggtgcaaaattatttgggtctacagctttacctattcctttcaagaacatttttgaaaaaacacatctgttaagttgaaccatgtgtaactgctgaatgctgatgtttggccgttttctacttaaaaaaataggccagcagtttgtaaattcaagctaatatatgaactttttgaaaaagttgttcttggacactaaaaggtaagacggacgccagatttccagagcaaggggaggagagacccgagcaacatcacttccctgaagacctagctcctgcgcgcggccggggactgtgactccacatgccggcgttacttacccgggcccgcgcctgactcgccacacctcattttgcggccgccgtaaagcgcggatgcgcggcgtggccacgccccttcagtgcttgtgacgcaggcgccctgggctttttgggcgcgaaaaagaagcagtcctgggttgtacccggcgcagctgggagcggctgcttcctccggggtcgtatctccgcccggcatggggctgctggacctttgcgaggaagtgttcggcaccgccgacctttaccgggtgctgggcgtgcgacgcgaggcctccgacggcgaggtccgacgaggctaccacaaggtgtccctgcaggtacacccggaccgggtgggtgagggcgacaaggaggacgccacccgccgctt

SEQ ID NO: 6975 - protein, 99 aa, Homo sapiens
MVHLTTLLCKAYRGGHLTIRLALGGCTNRPFYRIVAAHNKCPRDGRFVEQLGSYDPLPNSHGEKLVALNLDRIRHWIGCGAHLSKPMEKLLGLKYSHVF

SEQ ID NO: 6976 - DNA, 4465 bp, Homo sapiens
gcattgtgggaagtatagggcggcaagcggaggaggcgtggcgagcggatcatccgcttccggagtcgaggttttcgggcttgtaccgcttggcggtgcggcctggtgtcggcttgcaggttctttctgtgtttgttctctgccctgccaaggccgtagagctggtgcgtgcgggtagcggggctctccgaggagccgcacgccggcggcaccatggtccacctcactactctcctctgcaaggcctaccgtgggggccacttaaccatccgccttgccctgggtggctgcaccaatcggccgttctaccgcattgtggctgctcacaacaagtgtcccagggatggccgtttcgtagagcagctgggctcctatgatccattgcccaacagtcatggagaaaaactcgttgccctcaacctagacaggatccgtcattggattggctgcggggcccacctctctaagcctatggaaaagcttctgggtcttgctggctttttccctctgcatcctatgatgatcacaaatgctgagagactgcgaaggaaacgggcacgtgaagtcctgttagcttctcagaaaacagatgcagaagctacagatacagaggctacagaaacataaatgagctgactttagtgagcatagcagtgggaacaaggtcaaggtccttttgaaacactgcagcgatcttaattttgttagatttggagttcaataaatggagtatcctgagttgcccttgctcttctggcctggcctgcacagggcccagggagagatttgttcttgtgtgacttagagctgggtgtgggtactaattagcttttttcgactttgtcttgggatagacagtggctatgggaggattggacttttgagttgggctctgggtctcttggacaactttacaatttactggcttccaagacttcctgcttcaaaacccccagccagactattcatggcccattcagatcttcatgttcatcccacaagtgcaagaacagttaacctttcttaattgatttttgtaattggaggtttatattgtcttgcctaatgcatattctctttttttttttttttttgagacggagtcttgttctgttgccaggctggagtgcggtggtgcaatctcagctcactgcaatctccacctcctgggttcaagaggttctcctgcctcagcctcctgagtagccggggagctacaagcatgcaccaccacacccagctaattttttttttttttttgagaggagtctcgctctgtcgcccaggcttgagtgcagtggcgcgatctcggctcactgcaagctctgtctcctgggttcatgccattctcctgcttcagcctcccgagtagtcccaggagtagctgggactacaggtgcccaccaccacacccagctaatttttttgtatttttagtagagatggggtttcaccatgttatccaggatggttttgatctcctgacctcgtgatccgcccgccttggcctcccaaaagtgctgggattataggcgtgagccaccgcccgggcaaatttttgtatttttagtagagatggggtttcaccgtgttggccaggatggtctcaatctgaccttgtgatctgcccacctcggcctcccaaagtgctaggattactggcgtgagccaccactcctagccttaatgcatattcttaaatatacaaaggtagatttgttatgaaaattgctttggggctctaataacctaccttttaagaatgagaaactgctgggcttaagggagttcagtatgaatcaagattgaaccattcaaatgtggctgtgatttctgcatatatcatagatgggatccttctgagaatactggaatagggaattaggacaccaagccaattcagctgtgaaccttattcttgtacttttctttcttgctggtaattttatggagcaggttaagaaggctgctctgtgttaggataaactgtataccaataatgttgacaacctgtaatgagtgttgcattttacttcttgtatcttttccttcctaccttgatgccagtaatctataagggatctttatagtttgaatgtatttgaataacttcagtatactttagttctacttttttatttgactcacaaccattcttaggtctcaagtattcccatgtgttttaaaagcctgaagtcagtgagatgaaattcaacatcaagaatttgaagtaacttgtaaggaaaaataatataaagataccattggggcagtggctcacacctgtaatctcagcactttgggaggctgaggtggaaggatcacttgaagccagagtttgagaccagcctgtgcaacacagcaagaccccgtctctacaaaaacttaaaaaattagctggctgtggtgttgctcacccatagttccagctactcgggaagctgaggcagtaagatcacttgagcccaggaggccgatgctgcagtgaactgtgattgttccactacagtccagcctgggtgacagagaaaagaaaaagaaaacattacataatttggctagagcataataatttgattttctggtttttgaaaatttgagttgcaataaaaggatatttcagtgtgcgatttcaattttccgtagcaaatgtatatatagaaaaatgttaaaatagatgtatttgaataccttaaaaaatacaagaaactggaagaaagataatattgcaaagcatctacatatatcctaggccttttgtgtacaaggttatttgtgacaattgtaaggtattatgaaggcaggtaggattatctccgttttacagatagggaagctgaggcctagaggtggaaacttgcccagtgatgtaagattcatctcccggttatgccctcctggaaagcccttcccaacatattatgttgtccatagagggaaaaatgagcaaagacagatggcttaactctggtgtgtgactaagatataggaaatttatagaggaggttctatcaatgtgccgacttactttgtgttttatgttctgagaacgattaccagccatctcaaattctgtggttgtcaaagctcccctggggttgttgctggttggcccccacttgctttgagactttgatgccagggcaggttgagaggaactgacttcagctgagtttgatcttggatctgggaaagagaaatgctttgaaaatcacggcaactctgggaagtttaaaagatattaatgtatcctggagagtttgaggctttgcagaaacttattggcagagcagaatgattctgaaaaatgctacatcagtgaggggatatttgataaggtattttctgccaactcgggtattcacttagcattgtttatcctttaagatatgtatacacatacttcctctgtgagtttaccctactaacaaagttttatccccagcctcaaccttgctttgggtctccaggcccaagtttctcaccatctcttggatgattgctccagcccactctgctgccacctgggatccaacatgttcaaacccagctgtgaacttcacagagtattaaaagaaagagcctttgcttcagcagtttatgttattaagacggaggcttgggtcatgttatctctctccaccaatgtgtaaggtgaaagtcctattaggtaagagtttttggaagacccgtgttttgtgctttttgggtttcagtatagggttttttcctacagggctagagggaaagtaccccagcatttccaaccagtggggtgcaaaattatttgggtctacagctttacctattcctttcaagaacatttttgaaaaaacacatctgttaagttgaaccatgtgtaactgctgaatgctgatgtttggccgttttctacttaaaaaaataggccagcagtttgtaaattcaagctaatatatgaactttttgaaaaagttgttcttggacactaaaaggtaagacggacgccagatttccagagcaaggggaggagagacccgagcaacatcacttccctgaagacctagctcctgcgcgcggccggggactgtgactccacatgccggcgttacttacccgggcccgcgcctgactcgccacacctcattttgcggccgccgtaaagcgcggatgcgcggcgtggccacgccccttcagtgcttgtgacgcaggcgccctgggctttttgggcgcgaaaaagaagcagtcctgggttgtacccggcgcagctgggagcggctgcttcctccggggtcgtatctccgcccggcatggggctgctggacctttgcgaggaagtgttcggcaccgccgacctttaccgggtgctgggcgtgcgacgcgaggcctccgacggcgaggtccgacgaggctaccacaaggtgtccctgcaggtacacccggaccgggtgggtgagggcgacaaggaggacgccacccgccgctt

SEQ ID NO: 6977 - protein, 137 aa, Homo sapiens; identical to SEQ ID NO: 777

SEQ ID NO: 6978 - DNA, 1167 bp, Homo sapiens
tgttaaaatagatgtatttgaataccttaaaaaatacaagaaactggaagaaagataatattgcaaagcatctacatatatcctaggccttttgtgtacaaggttatttgtgacaattgtaaggtattatgaaggcaggtaggattatctccgttttacagatagggaagctgaggcctagaggtggaaacttgcccagtgatgtaagattcatctcccggttatgccctcctggaaagcccttcccaacatattatgttgtccatagagggaaaaatgagcaaagacagatggcttaactctggtgtgtgactaagatataggaaatttatagaggaggttctatcaatgtgccgacttactttgtgttttatgttctgagaacgattaccagccatctcaaattctgtggttgtcaaagctcccctggggttgttgctggttggcccccacttgctttgagactttgatgccagggcaggttgagaggaactgacttcagctgagtttgatcttggatctgggaaagagaaatgctttgaaaatcacggcaactctgggaagtttaaaagatattaatgtatcctggagagtttgaggctttgcagaaacttattggcagagcagaatgattctgaaaaatgctacatcagtgaggggatatttgataaggtattttctgccaactcgggtattcacttagcattgtttatcctttaagatatgtatacacatacttcctctgtgagtttaccctactaacaaagttttatccccagcctcaaccttgctttgggtctccaggcccaagtttctcaccatctcttggatgattgctccagcccactctgctgccacctgggatccaacatgttcaaacccagctgtgaacttcacagagtattaaaagaaagagcctttgcttcagcagtttatgttattaagacggaggcttgggtcatgttatctctctccaccaatgtgtaaggtgaaagtcctattaggtaagacggacgccagatttccagagcaaggggaggagagacccgagcaacatcacttccctgaagacctagctcctgcgcgcggccggggactgtgactccacatgccggcgttacttacccgggcccgcgcctgactcgccacacctcattttgcggccgc

SEQ ID NO: 6979 - protein, 55 aa, Homo sapiens
MLLRRRLGSCYLSPPMCKVKVLLGKTDARFPEQGEERPEQHHFPEDLAPARGRGL

SEQ ID NO: 6980 - DNA, 3573 bp, Homo sapiens
aaactgctggcctatttttttaagtagaaaacggccaaacatcagcattcagcagttacacatggttcaacttaacagatgtgttttttcaaaaatgttcttgaaaggaataggtaaagctgtagacccaaataattttgcaccccactggttggaaatgctggggtactttccctctagccctgtaggaaaaaaccctatactgaaacccaaaaagcacaaaacacgggtcttccaaaaactcttacctaataggactttcaccttacacattggtggagagagataacatgacccaagcctccgtcttaataacataaactgctgaagcaaaggctctttcttttaatactctgtgaagttcacagctgggtttgaacatgttggatcccaggtggcagcagagtgggctggagcaatcatccaagagatggtgagaaacttgggcctggagacccaaagcaaggttgaggctggggataaaactttgttagtagggtaaactcacagaggaagtatgtgtatacatatcttaaaggataaacaatgctaagtgaatacccgagttggcagaaaataccttatcaaatatcccctcactgatgtagcatttttcagaatcattctgctctgccaataagtttctgcaaagcctcaaactctccaggatacattaatatcttttaaacttcccagagttgccgtgattttcaaagcatttctctttcccagatccaagatcaaactcagctgaagtcagttcctctcaacctgccctggcatcaaagtctcaaagcaagtgggggccaaccagcaacaaccccaggggagctttgacaaccacagaatttgagatggctggtaatcgttctcagaacataaaacacaaacagacagccctgattgctattccaatgtcatcacaaacccccaggatgcttggaaggccaaggaatcaaggtcagctgtatccacagccctagtctcaagccttcatcctcttacccgatagcaggcgattcccagtcctagccagatagatgagccccagtctcaggaagatgaagtgcatctcagaagcatccactacaaagctaatggttcgttcatagcatgccttggcctcagaatgatttccactcagaaaatagagatggcccttcaggccccagacattggggttctgggaaagtgaaaagcaagtagtatatgggataaggtagtatttaaaagtaccttgatgatctttgtttaacatttaaatttagatagattgtccatttcctttctcttttctttttcagatcaaccgttttctttttctaagagcactcagaaacataaccatttaattgtacaaggagacatttttctagctctgccctcagatttctttcttgcattcttcaaagccattttgggtgtggagtaaatattaagaaaaacattcaagcataaccccaatactgttcacatgagaaaatataagaaatctagaaaaattgaaataaacactatcagctaaagatatccttttctctgctctttgcaaaactcatgattactttattattattattttttgagatggagtcttgcactgtcgcccaggctggagagtgcaatggctcaatctccgctcactgcaacctccgcctcccaggttcaggcgagtctcctgcctcaccctcctgagtagctgggattacaggcacctgccaccacgcccatctaattttttgtatttttagtagagatggggtttcactatgttggccaggctggtcttgaactcctgacctcgtgatctgcctgcctcggcctcccaaagtgctgcgattacagttgtgagccaccgcgcccagccaactcatgattacttaagaaaagcaaatggaagggtatagagagatgagtttactgacagctgatgaccacccttctgttcaccagaaatctacgtgtgatatggcatcaccacctttaaataaagccccttctccagactcaagaggctttagcaaaagtcattaccaggtagtccatctgggctgcttgttgaaggtattcctctgccttggcaaagttcttcttaagaatgtgtgtttgggccagcaccaagtaatattcacagctggggcctccttgagggcataacagctcatgtgcaagcactctgtgcacatactgcaaggataatcagattataagcaacatataaatggctgcattgcgtctttttcggttgaaggattctgtctctgataataaataatacgaaatgtattacagaatgaaataattatcctcaacttcaaaaggtaaagggtgaattacaaacattctgcacttcatagttccattaccagctattcacctagtcaccaaatgaagacattaccaagtgaataacttgcaatattgtacaattctggtcttgctggtcatcatactaggtgagtgttagactgcatgtattatgcagcagacaaaggcacatcatcaaccaccccatttacaaaggaggtaacattttcaggcagctgacattgtaaggaaacttaagtgaggtaaaactgcctttctaacaatctagacttgaaatcttagaaacataaatgtctgttttggatccacctccaaacattggttatgtttaccagttttgtagtttgggtcaatttttgtattttgtttttttttttttctttttttagagacagggtcttactctgtcacccagggctgcttactgcagccttctggcctcaagcaatcctcctgccttggcttcccaaaagtgctggaattataggggtgagccccatgcctggccaaatctttgctttttacactttataagacctacaaaattaacaaagttagatatacttcttaagtcgagggtaaatccttcttttcatctcccactgttcccatctcagcctataatgtagaaaattctacattatacttacacctttttaggagaatactagagggaacagctgcagctattttttccacctgccttctgggtctctgacctgggggagctaatgacttatttagctgtggaagaagagagtctgtttctattttgcggagggttaatgtgttaaagcctcctgcttaatgtggctcaatcccacccagttaataattcttgccctttcttgagcttgcctgcccttgagtagggcatgcacttggcaggatcaaaaccaaacactcctggctcctgagtcttgatctctcctactgcttgctcatgaatatgcttctttcttcccatgtaataggcagacttcctagaatgctcttcttctctgagaggaggcttcaattcttcagctgctctacctgtgactgcatgggtaagtcaaatgtggggctagttatgttgtccagccaagttttaccaataaaaataagctaatatttttattcccccacatagtactgtgtatgtttctagttggatctaacctagaagggaagaagggaatgatttggctcctgtgaacccccaacactcacaaaatgaattcccataataaagtgatatcaggc

SEQ ID NO: 6981 - protein, 42 aa, Homo sapiens
MAGNRSQNIKHKQTALIAIPMSSQTPRMLGRPRNQGQLYPQP

SEQ ID NO: 6982 - DNA, 323 bp, Homo sapiens
gtcagttcctctcaacctgccctggcatcaaagtctcaaagcaagtgggggccaaccagcaacaaccccaggggagctttgacaaccacagaatttgagatggctggtaatcgttctcagaacataaaacacaaacggtcccatcaggacatctataaaccatggagtttcaggtgcaaggttggaaatccacaggaactcactctcatgtgtgcatcattcagtgatttctccacacacagtgggctgtcagatacatttatagttttttttctttacattgtgcatccttttcttgaggtaaaaatctgatttgcctgttg

SEQ ID NO: 6983 - protein, 70 aa, Homo sapiens
MAGNRSQNIKHKRSHQDIYKPWSFRCKVGNPQELTLMCASFSDFSTHSGLSDTFIVFFLYIVHPFLEVKI

SEQ ID NO: 6984 - DNA, 1323 bp, Homo sapiens
ccaggggagctttgacaaccacagaatttgagatggctggtaatcgttctcagaacataaaacacaaagctggactgtagtggaacaatcacagttcactgcagcatcggcctcctgggctcaagtgatcttactgcctcagcttcccgagtagctggaactatgggtgagcaacaccacagccagctaattttttaagtttttgtagagacggggtcttgctgtgttgcacaggctggtctcaaactctggcttcaagtgatccttccacctcagcctcccaaagtgctgagattacaggtgtgagccactgccccaatggtatctttatattatttttccttacaagttacttcaaattcttgatgttgaatttcatctcactgacttcaggcttttaaaacacatgggaatacttgagacctaagaatggttgtgagtcaaataaaaaagtagaactaaagtatactgaagttattcaaatacattcaaactataaagatcccttatagattactggcatcaaggtaggaaggaaaagatacaagaagtaaaatgcaacactcattacaggttgtcaacattattggtatacagtttatcctaacacagagcagccttcttaacctgctccataaaattaccagcaagaaagaaaagtacaagaataaggttcacagctgaattggcttggtgtcctaattccctattccagtattctcagaaggatcccatctatgatatatgcagaaatcacagccacatttgaatggttcaatcttgattcatactgaactcccttaagcccagcagtttctcattcttaaaaggtaggttattagagccccaaagcaattttcataacaaatctacctttgtatatttaagaatatgcattaaggctaggagtggtggctcacgccagtaatcctagcactttgggaggccgaggtgggcagatcacaaggtcagattgagaccatcctggccaacacggtgaaaccccatctctactaaaaatacaaaaatttgcccgggcggtggctcacgcctataatcccagcacttttgggaggccaaggcgggcggatcacgaggtcaggagatcaaaaccatcctggataacatggtgaaaccccatctctactaaaaatacaaaaaaattagctgggtgtggtggtgggcacctgtagtcccagctactcctgggactactcgggaggctgaagcaggagaatggcatgaacccaggagacagagcttgcagtgagccgagatcgcgccactgcactcaagcctgggcgacagagcgagactcctctc

SEQ ID NO: 6985 - protein, 42 aa, Homo sapiens [sequence omitted]

SEQ ID NO: 6986 - DNA, 2554 bp, Homo sapiens
ggggagagctctcccaggcgcgatggaggcaacccgaacctgaagcagccacactgccttacatttgatccttctctcagttttttccccacttaatcaccgctgaaaaatttccaccccattgaagcagctaaggctccgacaagctactctcctctgcaaggcctaccgtgggggccacttaaccatccgccttgccctgggtggctgcaccaatcggccgttctaccgcattgtggctgctcacaacaagtgtcccagggatggccgtttcgtagagcagctgggctcctatgatccattgcccaacagtcatggagaaaaactcgttgccctcaacctagacaggatccgtcattggattggctgcggggcccacctctctaagcctatggaaaagcttctgggtcttgctggctttttccctctgcatcctatgatgatcacaaatgctgagagactgcgaaggaaacgggcacgtgaagtcctgttagcttctcagaaaacagatgcagaagctacagatacagaggctacagaaacataaatgagctgactttagtgagcatagcagtgggaacaaggtcaaggtccttttgaaacactgcagcgatcttaattttgttagatttggagttcaataaatggagtatcctgagttgcccttgctcttctggcctggcctgcacagggcccagggagagatttgttcttgtgtgacttagagctgggtgtgggtactaattagcttttttcgactttgtcttgggatagacagtggctatgggaggattggacttttgagttgggctctgggtctcttggacaactttacaatttactggcttccaagacttcctgcttcaaaacccccagccagactattcatggcccattcagatcttcatgttcatcccacaagtgcaagaacagttaacctttcttaattgatttttgtaattggaggtttatattgtcttgcctaatgcatattctctttttttttttttttttgagacggagtcttgttctgttgccaggctggagtgcggtggtgcaatctcagctcactgcaatctccacctcctgggttcaagaggttctcctgcctcagcctcctgagtagccggggagctacaagcatgcaccaccacacccagctaattttttttttttttttgagaggagtctcgctctgtcgcccaggcttgagtgcagtggcgcgatctcggctcactgcaagctctgtctcctgggttcatgccattctcctgcttcagcctcccgagtagtcccaggagtagctgggactacaggtgcccaccaccacacccagctaatttttttgtatttttagtagagatggggtttcaccatgttatccaggatggttttgatctcctgacctcgtgatccgcccgccttggcctcccaaaagtgctgggattataggcgtgagccaccgcccgggcaaatttttgtatttttagtagagatggggtttcaccgtgttggccaggatggtctcaatctgaccttgtgatctgcccacctcggcctcccaaagtgctaggattactggcgtgagccaccactcctagccttaatgcatattcttaaatatacaaaggtagatttgttatgaaaattgctttggggctctaataacctaccttttaagaatgagaaactgctgggcttaagggagttcagtatgaatcaagattgaaccattcaaatgtggctgtgatttctgcatatatcatagatgggatccttctgagaatactggaatagggaattaggacaccaagccaattcagctgtgaaccttattcttgtacttttctttcttgctggtaattttatggagcaggttaagaaggctgctctgtgttaggataaactgtataccaataatgttgacaacctgtaatgagtgttgcattttacttcttgtatcttttccttcctaccttgatgccagtaatctataagggatctttatagtttgaatgtatttgaataacttcagtatactttagttctacttttttatttgactcacaaccattcttaggtctcaagtattcccatgtgttttaaaagcctgaagtcagtgagatgaaattcaacatcaagaatttgaagtaacttgtaaggaaaaataatataaagataccattggggcagtggctcacacctgtaatctcagcactttgggaggctgaggtggaaggatcacttgaagccagagtttgagaccagcctgtgcaacacagcaagaccccgtctctacaaaaacttaaaaaattagctggctgtggtgttgctcacccatagttccagctactcgggaagctgaggcagtaagatcacttgagcccaggaggccgatgctgcagtgaactgtgattgttccactacagtccagcctgggtgacagagaaaagaaaaagaaaacattacataatttggctagagcataataatttgattttctggtttttgaaaatttgagttgcaataaaaggatatttcagtgtgcgatttc

SEQ ID NO: 6987 - protein, 51 aa, Homo sapiens [sequence omitted]

SEQ ID NO: 6988 - DNA, 959 bp, Homo sapiens
attgtgggaagtatagggcggcaagcggaggaggcgtggcgagcggatcatccgcttccggagtcgaggttttcgggcttgtaccgcttggcggtgcggcctggtgtcggcttgcaggttctttctgtgtttgttctctgccctgccaaggccgtagagctggtgcgtgcgggtagcggggctctccgaggagccgcacgccggcggcaccatggtccacctcactactctcctctgcaaggcctaccgtgggggccacttaaccatccgccttgccctgggtggctgcaccaatcggccgttctaccgcattgtggctgctcacaacaagtgtcccagggatggccgtttcgtagagcagctgggctcctatgatccattgcccaacagtcatggagaaaaactcgttgccctcaacctagacaggatccgtcattggattggctgcggggcccacctctctaagcctatggaaaagcttctgggtctcaagtattcccatgtgttttaaaagcctgaagtcagtgagatgaaattcaacatcaagaatttgaagtaacttgtaaggaaaaataatataaagataccattggggcagtggctcacacctgtaatctcagcactttgggaggctgaggtggaaggatcacttgaagccagagtttgagaccagcctgtgcaacacagcaagaccccgtctctacaaaaacttaaaaaattagctggctgtggtgttgctcacccatagttccagctactcgggaagctgaggcagtaagatcacttgagcccaggaggccgatgctgcagtgaactgtgattgttccactacagtccagcctgggtgacagagaaaagaaaaagaaaacattacataatttggctagagcataataatttgattttctggtttttgaaaatttgagttgcaataaaaggatatttcagtgtgcgatttc

SEQ ID NO: 6989 - protein, 99 aa, Homo sapiens; identical to SEQ ID NO: 6975

SEQ ID NO: 6990 - DNA, 2634 bp, Homo sapiens
gcattgtgggaagtatagggcggcaagcggaggaggcgtggcgagcggatcatccgcttccggagtcgaggttttcgggcttgtaccgcttggcggtgcggcctggtgtcggcttgcaggttctttctgtgtttgttctctgccctgccaaggccgtagagctggtgcgtgcgggtagcggggctctccgaggagccgcacgccggcggcaccatggtccacctcactactctcctctgcaaggcctaccgtgggggccacttaaccatccgccttgccctgggtggctgcaccaatcggccgttctaccgcattgtggctgctcacaacaagtgtcccagggatggccgtttcgtagagcagctgggctcctatgatccattgcccaacagtcatggagaaaaactcgttgccctcaacctagacaggatccgtcattggattggctgcggggcccacctctctaagcctatggaaaagcttctgggtcttgctggctttttccctctgcatcctatgatgatcacaaatgctgagagactgcgaaggaaacgggcacgtgaagtcctgttagcttctcagaaaacagatgcagaagctacagatacagaggctacagaaacataaatgagctgactttagtgagcatagcagtgggaacaaggtcaaggtccttttgaaacactgcagcgatcttaattttgttagatttggagttcaataaatggagtatcctgagttgcccttgctcttctggcctggcctgcacagggcccagggagagatttgttcttgtgtgacttagagctgggtgtgggtactaattagcttttttcgactttgtcttgggatagacagtggctatgggaggattggacttttgagttgggctctgggtctcttggacaactttacaatttactggcttccaagacttcctgcttcaaaacccccagccagactattcatggcccattcagatcttcatgttcatcccacaagtgcaagaacagttaacctttcttaattgatttttgtaattggaggtttatattgtcttgcctaatgcatattctctttttttttttttttttgagacggagtcttgttctgttgccaggctggagtgcggtggtgcaatctcagctcactgcaatctccacctcctgggttcaagaggttctcctgcctcagcctcctgagtagccggggagctacaagcatgcaccaccacacccagctaattttttttttttttttgagaggagtctcgctctgtcgcccaggcttgagtgcagtggcgcgatctcggctcactgcaagctctgtctcctgggttcatgccattctcctgcttcagcctcccgagtagtcccaggagtagctgggactacaggtgcccaccaccacacccagctaatttttttgtatttttagtagagatggggtttcaccatgttatccaggatggttttgatctcctgacctcgtgatccgcccgccttggcctcccaaaagtgctgggattataggcgtgagccaccgcccgggcaaatttttgtatttttagtagagatggggtttcaccgtgttggccaggatggtctcaatctgaccttgtgatctgcccacctcggcctcccaaagtgctaggattactggcgtgagccaccactcctagccttaatgcatattcttaaatatacaaaggtagatttgttatgaaaattgctttggggctctaataacctaccttttaagaatgagaaactgctgggcttaagggagttcagtatgaatcaagattgaaccattcaaatgtggctgtgatttctgcatatatcatagatgggatccttctgagaatactggaatagggaattaggacaccaagccaattcagctgtgaaccttattcttgtacttttctttcttgctggtaattttatggagcaggttaagaaggctgctctgtgttaggataaactgtataccaataatgttgacaacctgtaatgagtgttgcattttacttcttgtatcttttccttcctaccttgatgccagtaatctataagggatctttatagtttgaatgtatttgaataacttcagtatactttagttctacttttttatttgactcacaaccattcttaggtctcaagtattcccatgtgttttaaaagcctgaagtcagtgagatgaaattcaacatcaagaatttgaagtaacttgtaaggaaaaataatataaagataccattggggcagtggctcacacctgtaatctcagcactttgggaggctgaggtggaaggatcacttgaagccagagtttgagaccagcctgtgcaacacagcaagaccccgtctctacaaaaacttaaaaaattagctggctgtggtgttgctcacccatagttccagctactcgggaagctgaggcagtaagatcacttgagcccaggaggccgatgctgcagtgaactgtgattgttccactacagtccagcctgggtgacagagaaaagaaaaagaaaacattacataatttggctagagcataataatttgattttctggtttttgaaaatttgagttgcaataaaaggatatttcagtgtgcgatttc

SEQ ID NO: 6991 - protein, 137 aa, Homo sapiens; identical to SEQ ID NO: 777

SEQ ID NO: 6992 - DNA, 1655 bp, Homo sapiens
cgcacactgaaatatccttttattgcaactcaaattttcaaaaaccagaaaatcaaattattatgctctagccaaattatgtaatgttttctttttcttttctctgtcacccaggctggactgtagtggaacaatcacagttcactgcagcatcggcctcctgggctcaagtgatcttactgcctcagcttcccgagtagctggaactatgggtgagcaacaccacagccagctaattttttaagtttttgtagagacggggtcttgctgtgttgcacaggctggtctcaaactctggcttcaagtgatccttccacctcagcctcccaaagtgctgagattacaggtgtgagccactgccccaatggtatctttatattatttttccttacaagttacttcaaattcttgatgttgaatttcatctcactgacttcaggcttttaaaacacatgggaatacttgagacctaagaatggttgtgagtcaaataaaaaagtagaactaaagtatactgaagttattcaaatacattcaaactataaagatcccttatagattactggcatcaaggtaggaaggaaaagatacaagaagtaaaatgcaacactcattacaggttgtcaacattattggtatacagtttatcctaacacagagcagccttcttaacctgctccataaaattaccagcaagaaagaaaagtacaagaataaggttcacagctgaattggcttggtgtcctaattccctattccagtattctcagaaggatcccatctatgatatatgcagaaatcacagccacatttgaatggttcaatcttgattcatactgaactcccttaagcccagcagtttctcattcttaaaaggtaggttattagagccccaaagcaattttcataacaaatctacctttgtatatttaagaatatgcattaaggctaggagtggtgcatgcttgtagctccccggctactcaggaggctgaggcaggagaacctcttgaacccaggaggtggagattgcagtgagctgagattgcaccaccgcactccagcctggcaacagaacaagactccgtctcaaaaaaaaaaaaaaaaagagaatatgcattaggcaagacaatataaacctccaattacaaaaatcaattaagaaaggttaactgttcttgcacttgtgggatgaacatgaagatctgaatgggccatgaatagtctggctgggggttttgaagcaggaagtcttggaagccagtaaattgtaaagttgtccaagagacccagagcccaactcaaaagtccaatcctcccatagccactgtctatcccaagacaaagtcgaaaaaagctaattagtacccacacccagctctaagtcacacaagaacaaatctctccctgggccctgtgcaggccaggccagaagagcaagggcaactcaggatactccatttattgaactccaaatctaacaaaattaagatcgctgcagtgtttcaaaaggaccttgaccttgttcccactgctatgctcactaaagtcagctcatttatgtttctgtagcctctgtatctgtagcttctgcatctgttttctgagaagctaacaggacttcacgtgcccgtttccttcgcagtctctcagca

SEQ ID NO: 6993 - protein, 53 aa, Homo sapiens
MLVAPRLLRRLRQENLLNPGGGDCSELRLHHRTPAWQQNKTPSQKKKKKENMH

SEQ ID NO: 6994 - DNA, 657 bp, Homo sapiens
ggggagagctctcccaggcgcgatggaggcaacccgaacctgaagcagccacactgccttacatttgatccttctctcagttttttccccacttaatcaccgctgaaaaatttccaccccattgaagcagctaaggctccgacaagctactctcctctgcaaggcctaccgtgggggccacttaaccatccgccttgccctgggtggctgcaccaatcggccgttctaccgcattgtggctgctcacaacaagtgtcccagggatggccgtttcgtagagcagctgggctcctatgatccattgcccaacagtcatggagaaaaactcgttgccctcaacctagacaggatccgtcattggattggctgcggggcccacctctctaagcctatggaaaagcttctgggtcttgctggctttttccctctgcatcctatgatgatcacaaatgctgagagactgcgaaggaaacgggcacgtgaagtcctgttagcttctcagaaaacagatgcagaagctacagatacagaggctacagaaacataaatgagctgactttagtgagcatagcagtgggaacaaggtcaaggtccttttgaaacactgcagcgatcttaattttgttagatttggagttcaataaatggagtatcctg

SEQ ID NO: 6995 - protein, 51 aa, Homo sapiens [sequence omitted]

SEQ ID NO: 6996 - DNA, 737 bp, Homo sapiens
gcattgtgggaagtatagggcggcaagcggaggaggcgtggcgagcggatcatccgcttccggagtcgaggttttcgggcttgtaccgcttggcggtgcggcctggtgtcggcttgcaggttctttctgtgtttgttctctgccctgccaaggccgtagagctggtgcgtgcgggtagcggggctctccgaggagccgcacgccggcggcaccatggtccacctcactactctcctctgcaaggcctaccgtgggggccacttaaccatccgccttgccctgggtggctgcaccaatcggccgttctaccgcattgtggctgctcacaacaagtgtcccagggatggccgtttcgtagagcagctgggctcctatgatccattgcccaacagtcatggagaaaaactcgttgccctcaacctagacaggatccgtcattggattggctgcggggcccacctctctaagcctatggaaaagcttctgggtcttgctggctttttccctctgcatcctatgatgatcacaaatgctgagagactgcgaaggaaacgggcacgtgaagtcctgttagcttctcagaaaacagatgcagaagctacagatacagaggctacagaaacataaatgagctgactttagtgagcatagcagtgggaacaaggtcaaggtccttttgaaacactgcagcgatcttaattttgttagatttggagttcaataaatggagtatcctg

SEQ ID NO: 6997 - protein, 137 aa, Homo sapiens; identical to SEQ ID NO: 777

SEQ ID NO: 6998 - DNA, 588 bp, Homo sapiens
attgtgggaagtatagggcggcaagcggaggaggcgtggcgagcggatcatccgcttccggagtcgaggttttcgggcttgtaccgcttggcggtgcggcctggtgtcggcttgcaggttctttctgtgtttgttctctgccctgccaaggccgtagagctggtgcgtgcgggtagcggggctctccgaggagccgcacgccggcggcaccatggtccacctcactactctcctctgcaaggcctaccgtgggggccacttaaccatccgccttgccctgggtggctgcaccaatcggccgttctaccgcattgtggctgctcacaacaagtgtcccagggatggccgtttcgtagagcagctgggctcctatgatccattgcccaacagtcatggagaaaaactcgttgccctcaacctagacaggatccgtcattggattggctgcggggcccacctctctaagcctatggaaaagcttctgggtaactcagctctggtcttaccttattgaggggattttaaactgaagtcagctccaggacagtaggtgtaagaatgattttcggctgggcacggtggctcacg

SEQ ID NO: 6999 - protein, 100 aa, Homo sapiens
MVHLTTLLCKAYRGGHLTIRLALGGCTNRPFYRIVAAHNKCPRDGRFVEQLGSYDPLPNSHGEKLVALNLDRIRHWIGCGAHLSKPMEKLLGNSALVLPY

SEQ ID NO: 7000 - DNA, 784 bp, Homo sapiens
gtgcgatccctctcagacttgtgagtccctgctggagtcagaagttttaggcgaatcccaggcgcgccaaggaaagtgctacaaaagccatccatcttgcaagcgttggtgccgaggcgcaacgctgagaacgcaaatactaaagggcgctgttctttcctcgtggagctcacagtccgctggggagaccgtgagatgacagcagagaaactagcgcgatcagtagtactcagcgcaaggacagcgagcagagaaggcaaacctagtgcttgctaaggaagacttcacagaggaggtagtgtcagggccgagactaggagaaggattctccaggcttcatacggtaaaactctctgggaaggaaaggaactcagagtcccatgcagaaaattgttcagctggaggggtatcagaaagatggatttccaaagccaactgtttcctgtagtgtgtggatctctgcaagcagagcctcatctttcaatttcagctacatgaaagaggaagaaagggaaagatatatgtcatacgtgatatactttatgtggctttgaagacccctcttttgtggggctacggctaaagaacatagttccctgggatggaattggctcttcctatttccctacttcatgaaaactccagtagaagaccttagaaccttgtcctggttacatggatatgtttactttgtgaaaattcatcaagcactatgcacggtcatgatttgtacatttttttgtaagataacttcattaaaatttactttttttatttttaaaaa

SEQ ID NO: 7001 - protein, 57 aa, Homo sapiens [sequence omitted]

SEQ ID NO: 7002 - DNA, 553 bp, Homo sapiens
tagtgcttgctaaggaagacttcacagaggagtcacaccttaaaaaaaaaaggaggggttattcctgcttttgccgtgctgtgatccagggcagagctccaggcttcatacggtaaaactctctgggaaggaaaggaactcagagtcccatgcagaaaattgttcagctggaggggtatcagaaagatggatttccaaagccaactgtttcctgtagtgtgtggatctctgcaagcagagcctcatctttcaatttcagctacatgaaagaggaagaaagggaaagatatatgtcatacgtgatatactttatgtggctttgaagacccctcttttgtggggctacggctaaagaacatagttccctgggatggaattggctcttcctatttccctacttcatgaaaactccagtagaagaccttagaaccttgtcctggttacatggatatgtttactttgtgaaaattcatcaagcactatgcacggtcatgatttgtacatttttttgtaagataacttcattaaaatttactttttttatttttaaaaa

SEQ ID NO: 7003 - protein, 57 aa, Homo sapiens [sequence omitted]

SEQ ID NO: 7004 - DNA, 633 bp, Homo sapiens
cgtcccacccctatcgaggcagtcacaccttaaaaaaaaaaggaggggttattcctgcttttgccgtgctgtgatccagggcagagtttctcgtcaaccagtaaaacatccagtaacacagccaatggaaataaatgaatgggtctctgtttatagtgaagattctttcgttctccagctccaggcttcatacggtaaaactctctgggaaggaaaggaactcagagtcccatgcagaaaattgttcagctggaggggtatcagaaagatggatttccaaagccaactgtttcctgtagtgtgtggatctctgcaagcagagcctcatctttcaatttcagctacatgaaagaggaagaaagggaaagatatatgtcatacgtgatatactttatgtggctttgaagacccctcttttgtggggctacggctaaagaacatagttccctgggatggaattggctcttcctatttccctacttcatgaaaactccagtagaagaccttagaaccttgtcctggttacatggatatgtttactttgtgaaaattcatcaagcactatgcacggtcatgatttgtacatttttttgtaagataacttcattaaaatttactttttttatttttaaa

SEQ ID NO: 7005 - protein, 74 aa, Homo sapiens [sequence omitted]

SEQ ID NO: 7006 - DNA, 1713 bp, Homo sapiens
caggaggaacttcagacatttatcagtgagctctatgtgttcttagtagatcagatgcatgtagccctaaaccagaccatgccagatgatgtccaaggcactgttgcaaccatttatacaagcagtgaacagcttcaactctttgcatttgaagcagaagtcaatgagaactttgagatggcagcagcatattataaagagagattggtccgtgagccccagaatctggatcactggttggactatggtgccttctgcctcctaactgaagacaacatcaaagcacaagagtgttttcagaaagccctttccctcaaccagagtcatatccacagcttgttgctgtgtggtgtcctggctgtcctgttggagaactatgagcaagcagaaattttctttgaggatgctacttgcttggaaccaactaatgttgtagcctggactttacttggtttgtactatgaaattcaaaacaatgatattcgaatggaaatggcatttcatgaggcctccaaacagcttcaggcacggatgcttcaggcacaagtaacaaagcaaaagagcactggtgtagaagacactgaggaaagagggaagagagaatctagtttaggcccttggggaatcacaaatggttctgcaacagcaatcaaggtggaagccccagcaggaccaggagctgcattatctattctagacaaatttcttgaagaatcctccaaactgcagtctgattcacaagaacccattttgactacacaaacttgggatccaagtataagccaaaaaccatctaacacatttatcaaggagataccaacaaagaaagaagcatcaaaatgtcaagattcatcagctcttctgcatcccggccttcattatggtgtttctcaaactaccaccatcttcatggagaccatacatttcttgatgaaagtcaaggctgtgcagtatgtgcacagagtgcttgcacatgagctgttatgccctcaaggaggccccagctgtgaatattacttggtgctggcccaaacacacattcttaagaagaactttgccaaggcagaggaataccttcaacaagcagcccagatggactacctgaaccccaatgtctggggcctgaagggccatctctattttctgagtggaaatcattctgaggccaaggcatgctatgaacgaaccattagctttgtagtggatgcttctgagatgcacttcatcttcctgagactggggctcatctatctggaagagaaagagctggaggagctcacagaggctgaggatgctctttctgaagccaatgcattgaacaactacaatgctgaagtatgggcatatctggctctggtctgcctgaaagttggacggcaattagaagctgagcaggcctacaagtacatgatcaagctgaaattgaaagatgaggctctgcttgcagagatccacacactacaggaaacagttggctttggaaatccatctttctgatacccctccagctgaacaattttctgcatgggactctgagttcctttccttcccagagagttttaccgtatgaagcctggagctggagaacgaaagaatcttcactataaacagagacccattcatttatttccattggctgtgttactggatgttttactggttgacgagaaactgggtcacaataaaaaaatggagatatgaaactcaaaattc

SEQ ID NO: 7007 - protein, 480 aa, Homo sapiens
MHVALNQTMPDDVQGTVATIYTSSEQLQLFAFEAEVNENFEMAAAYYKERLVREPQNLDHWLDYGAFCLLTEDNIKAQECFQKALSLNQSHIHSLLLCGVLAVLLENYEQAEIFFEDATCLEPTNVVAWTLLGLYYEIQNNDIRMEMAFHEASKQLQARMLQAQVTKQKSTGVEDTEERGKRESSLGPWGITNGSATAIKVEAPAGPGAALSILDKFLEESSKLQSDSQEPILTTQTWDPSISQKPSNTFIKEIPTKKEASKCQDSSALLHPGLHYGVSQTTTIFMETIHFLMKVKAVQYVHRVLAHELLCPQGGPSCEYYLVLAQTHILKKNFAKAEEYLQQAAQMDYLNPNVWGLKGHLYFLSGNHSEAKACYERTISFVVDASEMHFIFLRLGLIYLEEKELEELTEAEDALSEANALNNYNAEVWAYLALVCLKVGRQLEAEQAYKYMIKLKLKDEALLAEIHTLQETVGFGNPSF

SEQ ID NO: 7008 - DNA, 3894 bp, Homo sapiens
gactcctgcctgagtcatcctcctcagtagttgtcaaatgagaaatattgaaatcaaagagtcgagaaagcaaaatgtaaaggtggaaacctatgcacttaaacccaactcttggcaaggtaaagcatccgcggaaacagcaggctctcgaagtgaggaggctgcagccggcgctagggcgcaggcgcagaagctcagcgtctcgctccctgctcccggccccagagggttatcgcgagtcttggaataaacttgctcgtgcgatggccaaaaagaccaaagaaaacagagggacttttcccagttggtgatatggagcaagtgccatcagcaggcagactcgtgcagatcaccgtgacagagggatatgatttgaaaggttttaaaggagatactccagttacctttattcgagcagaattcaatcaagtggttctgggagactctgcaaaaattactgtttctccagaaggaagtgcaaaatacaacttcactagcagttttgagtttaatcctgaaggaggaatcacttcagatgacctcgctcacaaacctgtgttcttaactgtgactgaagttttaccaaaggaaaagaaacagaaagaagagaagaccttaattcttggtcaggctgtggtggaccttcttcccttactggaaggacagagttcatttcaaacaacagttccattgcaccctgtgcaaggctcacccttagaaactcctagatcaagtgctaagcagtgcagtcttgaagttaaagtattagtggcagagcctttactgaccacagcccagatctcagggggcaatctactgaaggtcacgttggaggctgcttactctgtgcctgaatccttcattccaacaggtcctgggcagaactacatggtcggtctgcaagttccatcacttggagagaaggactatcccattttatttaagaatggaactctgaagcttggaggggaaagggaacctgttccccggcccaaaaagtggccaattgccaacattctggctccaggagctaataacattcctgatgcattcattgttggtggtccctatgaagaagaagaaggagaactcaaccatcctgaggacagcgaatttaggaatcaagcagagtgcataaagaaaaggattatttgggacttggaaagtcgctgctaccttgatccttctgcagtggtcagttttcagaagcgaattgccgattgccggctttggcctgtagagatcacaagagttcctctggtcactatacccaaagggaaagctggcaaaactgaaaagactgatgaagaagctcagctttcgtttcatggtgtggcttatgttaatatggtcccattgttgtatccaggtgtgaagagaattcggggagcttttcatgtttacccttacctagacagtgtagtccatgaaaagaccaaatgtttattgagcttgttccgggatattggccatcacttgattcataataataaaataggaggaattaattctctgctgtccaaacaagctgtttctaagaatctgaaagaagataaaccagtgaaagaaaaggatatagatggaaggcctaggcctggggatgtgcaggcacctagtataaaatctcagagctcagatactcctttggaaggtgaaccccctctaagtcacaatcctgaaggacagcaatatgtagaagcagggacatacattgtgttggaaattcagctggacaaagccttggttccaaagcgaatgccagaggagctagccagaagggtcaaggaaatgattcctccaaggcctcctcttacccgtcggacaggaggagctcagaaggcaatgagtgactaccacatacagatcaagaatatttctagagccattctagatgaatactacagaatgtttggaaaacaggtggccaaactggagagtgatatggatagtgaaaccttggaggagcagaagtgccagctcagctatgaacttaattgctctggaaaatactttgctttcaaagaacaactcaagcatgctgtggtaaagattgtgagagataaatacttgaagacaacatcatttgaaagccaggaggaacttcagacatttatcagtgagctctatgtgttcttagtagatcagatgcatgtagccctaaaccagaccatgccagatgatgtccaaggcactgttgcaaccatttatacaagcagtgaacagcttcaactctttgcatttgaagcagaagtcaatgagaactttgagatggcagcagcatattataaagagagattggtccgtgagccccagaatctggatcactggttggactatggtgccttctgcctcctaactgaagacaacatcaaagcacaagagtgttttcagaaagccctttccctcaaccagagtcatatccacagcttgttgctgtgtggtgtcctggctgtcctgttggagaactatgagcaagcagaaattttctttgaggatgctacttgcttggaaccaactaatgttgtagcctggactttacttggtttgtactatgaaattcaaaacaatgatattcgaatggaaatggcatttcatgaggcctccaaacagcttcaggcacggatgcttcaggcacaagtaacaaagcaaaagagcactggtgtagaagacactgaggaaagagggaagagagaatctagtttaggcccttggggaatcacaaatggttctgcaacagcaatcaaggtggaagccccagcaggaccaggagctgcattatctattctagacaaatttcttgaagaatcctccaaactgcagtctgattcacaagaacccattttgactacacaaacttgggatccaagtataagccaaaaaccatctaacacatttatcaaggagataccaacaaagaaagaagcatcaaaatgtcaagattcatcagctcttctgcatcccggccttcattatggtgtttctcaaactaccaccatcttcatggagaccatacatttcttgatgaaagtcaaggctgtgcagtatgtgcacagagtgcttgcacatgagctgttatgccctcaaggaggccccagctgtgaatattacttggtgctggcccaaacacacattcttaagaagaactttgccaaggcagaggaataccttcaacaagcagcccagatggactacctgaaccccaatgtctggggcctgaagggccatctctattttctgagtggaaatcattctgaggccaaggcatgctatgaacgaaccattagctttgtagtggatgcttctgagatgcacttcatcttcctgagactggggctcatctatctggaagagaaagagtatgaaaaggcaaagaaaacctatatgcaagcctgtaagagatcaccttcatgccttacctggctaggactgggaatcgcctgctatcggctggaggagctcacagaggctgaggatgctctttctgaagccaatgcattgaacaactacaatgctgaagtatgggcatatctggctctggtctgcctgaaagttggacggcaattagaagctgagcaggcctacaagtacatgatcaagctgaaattgaaagatgaggctctgcttgcagagatccacacactacaggaaacagttggctttggaaatccatctttctgatacccctccagctgaacaattttctgcatgggactctgagttcctttccttcccagagagttttaccgtatgaagcctggagctggagaacgaaagaatcttcactataaacagagacccattcatttatttccattggctgtgttactggatgttttactggttgacgagaaactgggtcacaataaaaaaatggagatatgaaactcaaaattc

SEQ ID NO: 7009 - protein, 1121 aa, Homo sapiens
MEQVPSAGRLVQITVTEGYDLKGFKGDTPVTFIRAEFNQVVLGDSAKITVSPEGSAKYNFTSSFEFNPEGGITSDDLAHKPVFLTVTEVLPKEKKQKEEKTLILGQAVVDLLPLLEGQSSFQTTVPLHPVQGSPLETPRSSAKQCSLEVKVLVAEPLLTTAQISGGNLLKVTLEAAYSVPESFIPTGPGQNYMVGLQVPSLGEKDYPILFKNGTLKLGGEREPVPRPKKWPIANILAPGANNIPDAFIVGGPYEEEEGELNHPEDSEFRNQAECIKKRIIWDLESRCYLDPSAVVSFQKRIADCRLWPVEITRVPLVTIPKGKAGKTEKTDEEAQLSFHGVAYVNMVPLLYPGVKRIRGAFHVYPYLDSVVHEKTKCLLSLFRDIGHHLIHNNKIGGINSLLSKQAVSKNLKEDKPVKEKDIDGRPRPGDVQAPSIKSQSSDTPLEGEPPLSHNPEGQQYVEAGTYIVLEIQLDKALVPKRMPEELARRVKEMIPPRPPLTRRTGGAQKAMSDYHIQIKNISRAILDEYYRMFGKQVAKLESDMDSETLEEQKCQLSYELNCSGKYFAFKEQLKHAVVKIVRDKYLKTTSFESQEELQTFISELYVFLVDQMHVALNQTMPDDVQGTVATIYTSSEQLQLFAFEAEVNENFEMAAAYYKERLVREPQNLDHWLDYGAFCLLTEDNIKAQECFQKALSLNQSHIHSLLLCGVLAVLLENYEQAEIFFEDATCLEPTNVVAWTLLGLYYEIQNNDIRMEMAFHEASKQLQARMLQAQVTKQKSTGVEDTEERGKRESSLGPWGITNGSATAIKVEAPAGPGAALSILDKFLEESSKLQSDSQEPILTTQTWDPSISQKPSNTFIKEIPTKKEASKCQDSSALLHPGLHYGVSQTTTIFMETIHFLMKVKAVQYVHRVLAHELLCPQGGPSCEYYLVLAQTHILKKNFAKAEEYLQQAAQMDYLNPNVWGLKGHLYFLSGNHSEAKACYERTISFVVDASEMHFIFLRLGLIYLEEKEYEKAKKTYMQACKRSPSCLTWLGLGIACYRLEELTEAEDALSEANALNNYNAEVWAYLALVCLKVGRQLEAEQAYKYMIKLKLKDEALLAEIHTLQETVGFGNPSF

SEQ ID NO: 7010 - DNA, 5004 bp, Homo sapiens
ggttgctatagttgtcaaaaacataactgaggctgctgcagagaccaaagaaaacagagggacttttcccagttggtgatatggagcaagtgccatcagcaggcagactcgtgcagatcaccgtgacagagggatatgatttgaaaggttttaaaggagatactccagttacctttattcgagcagaattcaatcaagtggttctgggagactctgcaaaaattactgtttctccagaaggaagtgcaaaatacaacttcactagcagttttgagtttaatcctgaaggaggaatcacttcagatgacctcgctcacaaacctgtgttcttaactgtgactgaagttttaccaaaggaaaagaaacagaaagaagagaagaccttaattcttggtcaggctgtggtggaccttcttcccttactggaagcagtgcagtcttgaagttaaagtattagtggcagagcctttactgaccacagcccagatctcagggggcaatctactgaaggtcacgttggaggctgcttactctgtgcctgaatccttcattccaacaggtcctgggcagaactacatggtcggtctgcaagttccatcacttggagagaaggactatcccattttatttaagaatggaactctgaagcttggaggggaaagggaacctgttccccggcccaaaaagtggccaattgccaacattctggctccaggagctaataacattcctgatgcattcattgttggtggtccctatgaagaagaagaaggagaactcaaccatcctgaggacagcgaatttaggaatcaagcagagtgcataaagaaaaggattatttgggacttggaaagtcgctgctaccttgatccttctgcagtggtcagttttcagaagcgaattgccgattgccggctttggcctgtagagatcacaagagttcctctggtcactatacccaaagggaaagctggcaaaactgaaaaggtgtgaagagaattcggggagcttttcatgtttacccttacctagacagtgtagtccatgaaaagaccaaatgtttattgagcttgttccgggatattggccatcacttgattcataataataaaataggaggaattaattctctgctgtccaaacaagctgtttctaagaatctgaaagaagataaaccagtgaaagaaaaggatatagatggaaggcctaggcctggggatgtgcaggcacctagtataaaatctcagagctcagatactcctttggaaggtgaaccccctctaagtcacaatcctgaaggacagcaatatgtagaagcagggacatacattgtgttggaaattcagctggacaaagccttggttccaaagcgaatgccagaggagctagccagaagggtcaaggaaatgattcctccaaggcctcctcttacccgtcggacaggaggagctcagaaggcaatgagtgactaccacatacagatcaagaatatttctagagccattctagatgaatactacagaatgtttggaaaacaggtggccaaactggagagtgatatggatagtgaaaccttggaggagcagaagtgccagctcagctatgaacttaattgctctggaaaatactttgctttcaaagaacaactcaagcatgctgtggtaaagattgtgagagataaatacttgaagacaacatcatttgaaagccaggaggaacttcagacatttatcagtgagctctatgtgttcttagtagatcagatgcatgtagccctaaaccaggtaagtgtcaagaactgagagcactttcttttctctgtagagcatcagagtcttctatgaataattccttccaactgcctaagcctaatcagtttaagactaattttggaaaaaaacaaggagatatgctctttcaatttcctagaaaaataaatttcacaactttaaaaaatgtgatggaattgtcaaaaatagattaaatatgttgcataaattgtgaaatgaaaattatcattctatttattctgtgaacaggtacaattcttaattttttattgaatatcataaaagcagagaaaaactttgagttttcagatattatacccaaatgacagtgacacttcaaacatgccttttctgtttgactggtggtctgctgtcccacccacttttctgtttatatttgtaagtcttccatcttgccttcatttgcttatttttatttgtattcaggggtagtttatttgaaaccagtgacaaagtcacagtctttttgtcccctggtagtgtctaaccatctgtgcctcctcaaattctttattctatttgcttttcccttccttgtttttcttctctaccaccatcacctcttgtttcactttgttctgtctttctggagaaggtaggacaggagtgtccagcatcaaaggattaagagaacagtcctgccttgggcatggatgatttgatttgaaaagcaattgagagtggagcatgagaaatgacaaaactgtgatgttagttgattattgcataataaggaggaaaaagtttaagttaagtttaagtttcaatgggtaattgatgccattcagtacttcttggttgatactaaaaagaaaagaaaaacattaaccaggacatggaatgcaattatgagtaaatttggtgggaggcagatggtactgaattcgcttttgaacataggctctagtggggttttgccggattcaaattatgatgaattgagtaaatgagcaatcaagaaacagatgaatataaattcaagttggatgacgaaggaaaaaactggaaaagtagtagctagaagtgtcagcagttttcagtgggctaagtaacaaaaaggtggaagacaagacatggagtgttggttctgggagtgggatattagagtattctgttttgggtgtagaagtgcatcgctgcagggatttgggggtcaagataatcaaaactaaaaagaacaggacaaaagtattaatcaatgatcagaaactctctttggcctatctcaaatttggctttactgtccacatttcttagcaattatccttattaaaatcactgatattattttgacttctaattaaagaattttgtggactctttcttgaccatagcttctgactcaggagattcctaattacaccagacctgctctcccaatctttgtgtataggatatattctttttctggttttcctcctacctttttgtttcctttgaaggatctatcagtctatatttcctactaaaactatagatttggcttctaaaggtttacccttaatctcctgttttcttcacatttaaagaccctagcgagggcttgccaacctttttcatgtcatgacacaaaaaaatgatagtatttgtcatatacactacagaaaatgaaggaagctgtttgaggtcagaggtgacctgcatagggactatgaatgccctgagggttgaggcagttatttctgccctaagcaatttttacttacttccatgagctcagactgttggtattcagatacctgagcttctccttcacccttgacatttctctcctggttcactcttattcttttacttttttggcaagactgtcattatagacatcaatcagtaacattttagacgtcataactggatctcacatcggatttatgcttatgaaacctctctacttgtaattgtttcatttttgtctacctaacatcttgacattgacaagaccatgccagatgatgtccaaggcactgttgcaaccatttatacaagcagtgaacagcttcaactctttgcatttgaagcagaagtcaatgagaactttgagatggcagcagcatattataaagagagattggtccgtgagccccagaatctggatcactggttggactatggtgccttctgcctcctaactgaagacaacatcaaagcacaagagtgttttcagaaagccctttccctcaaccagagtcatatccacagcttgttgctgtgtggtgtcctggctgtcctgttggagaactatgagcaagcagaaattttctttgaggatgctacttgcttggaaccaactaatgttgtagcctggactttacttggtttgtactatgaaattcaaaacaatgatattcgaatggaaatggcatttcatgaggcctccaaacagcttcaggcacggatgcttcaggcacaagtaacaaagcaaaagagcactggtgtagaagacactgaggaaagagggaagagagaatctagtttaggcccttggggaatcacaaatggttctgcaacagcaatcaaggtggaagccccagcagtatgtgcacagagtgcttgcacatgagctgttatgccctcaaggaggccccagctgtgaatattacttggtgctggcccaaacacacattcttaagaagaactttgccaaggcagaggaataccttcaacaagcagcccagatggactacctgaaccccaatgtctggggcctgaagggccatctctattttctgagtggaaatcattctgaggccaaggcatgctatgaacgaaccattagctttgtagtggatgcttctgagatgcacttcatcttcctgagactggggctcatctatctggaagagaaagaggttggacggcaattagaagctgagcaggcctacaagtacatgatcaagctgaaattgaaagatgaggctctgcttgcagagatccacacactacaggaaacagttggctttggaaatccatctttctgatacccctccagctgaacaattttctgcatgggactctgagttcctttccttcccagagagttttaccgtatgaagcctggagctggagaacgaaagaatcttcactataaacagagacccattcatttatttccattggctgtgttactggatgttttactggttgacgagaaactgggtcacaataaaaaaatggagatatgaaactcaaaatt

SEQ ID NO: 7011 - protein, 205 aa, Homo sapiens
MPDDVQGTVATIYTSSEQLQLFAFEAEVNENFEMAAAYYKERLVREPQNLDHWLDYGAFCLLTEDNIKAQECFQKALSLNQSHIHSLLLCGVLAVLLENYEQAEIFFEDATCLEPTNVVAWTLLGLYYEIQNNDIRMEMAFHEASKQLQARMLQAQVTKQKSTGVEDTEERGKRESSLGPWGITNGSATAIKVEAPAVCAQSACT

SEQ ID NO: 7012 - DNA, 579 bp, Homo sapiens
ggttgctatagttgtcaaaaacataactgaggctgctgcagaaaggttttaaaggagatactccagttacctttattcgagcagaattcaatcaagtggttctgggagactctgcaaaaattactgtttctccagaaggaagtgcaaaatacaacttcactagcagttttgagtttaatcctgaaggaggaatcacttcagatgacctcgctcacaaacctgtgttcttaactgtgactgaagttttaccaaaggaaaagaaacagaaagaagagaagaccttaattcttggtcaggctgtggtggaccttcttcccttactggaagcagtgcagtcttgaagttaaagtattagtggcagagcctttactgaccacagcccagatctcagggggcaatctactgaaggtcacgttggaggctgcttactctgtgcctgaatccttcattccaacaggtcctgggcagaactacatggtcggtctgcaagttccatcacttggagagaaggactatcccattttatttaagaatggaactctgaagcttggaggggaaagggaacctgttccccggccc

SEQ ID NO: 7013 - protein, 34 aa, Homo sapiens
MVGLQVPSLGEKDYPILFKNGTLKLGGEREPVPR

SEQ ID NO: 7014 - DNA, 576 bp, Homo sapiens
agttgtcaaaaacataactgaggctgctgcagagaccaaagaaaacagaagggatatgatttgaaaggttttaaaggagatactccagttacctttattcgagcagaattcaatcaagtggttctgggagactctgcaaaaattactgtttctccagaaggaagtgcaaaatacaacttcactagcagttttgagtttaatcctgaaggaggaatcacttcagatgacctcgctcacaaacctgtgttcttaactgtgactgaagttttaccaaaggaaaagaaacagaaagaagagaagaccttaattcttggtcaggctgtggtggaccttcttcccttactggaagcagtgcagtcttgaagttaaagtattagtggcagagcctttactgaccacagcccagatctcagggggcaatctactgaaggtcacgttggaggctgcttactctgtgcctgaatccttcattccaacaggtcctgggcagaactacatggtcggtctgcaagttccatcacttggagagaaggactatcccattttatttaagaatggaactctgaagcttggagg

SEQ ID NO: 7015 - protein, 113 aa, Homo sapiens
GCCRDQRKQKGYDLKGFKGDTPVTFIRAEFNQVVLGDSAKITVSPEGSAKYNFTSSFEFNPEGGITSDDLAHKPVFLTVTEVLPKEKKQKEEKTLILGQAVVDLLPLLEAVQS

SEQ ID NO: 7016 - DNA, 1586 bp, Homo sapiens
ctttatgcagagttcaaggcccagccctaccttttccagggcatgagtagaggagtaacttcctgagaaagtgtgtgtgaatccaaaggcaataatctgggaaattttttggaaatcgtgatgagaaccagagtataaaccaccaaatggctcaggaagatgctcagcgtctctatcaagctggtgaggggagactagggaccgatgaatcttgctttaacatgatccttgccacaagaagctttcctcagctgagagctaccatggaggcttattctaggatggctaatcgagacttgttaagcagtgtgagccgtgagttttccggatatgtagaaagtggtttgaagaccatcttgcagtgtgccctgaaccgccctgccttctttgctgagaggctctactatgctatgaaaggtgctggcacagatgactccaccctggtccggattgtggtcactcgaagtgagattgaccttgtacaaataaaacagatgttcgctcagatgtatcagaagactctgggcacaatgattgcaggtgacacgagtggagattaccgaagacttcttctggctattgtgggccagtaggagggatttttttttttttaatgaaaaaaaatttctattcatagcttatccttcagagcaatgacctgcatgcagcaatatcaaacatcagctaaccgaaagagctttctgtcaaggaccgtatcagggtaatgtgcttggtttgcacatgttgttattgccttaattctaattttattttgttctctacatacaatcaatgtaaagccatatcacaatgatacagtaatattgcaatgtttgtaaaccttcattcttactagtttcattctaatcaagatgtcaaattgaataaaaatcacagcaatctctgattctgtgtaataatattgaataattttttagaaggttactgaaagctctgccttccggaatccctctaagtctgcttgatagagtggatagtgtgttaaaactgtgtactttaaaaaaaaattcaacctttacatctagaataatttgcatctcattttgcctaaattggttctgtattcataaacactttccacatagaaaatagattagtattacctgtggcaccttttaagaaagggtcaaatgtttatatgcttaagatacatagcctacttttttttcgcagttgttttctttttttaaattgagttatgacaaataaaaaattgcatatatttaaggtgtacaatatggtgttttgatatcagcattccttgtgtaatgattccacaattaaggtcaggctaattacgtatctgtcaccttgacatagttaccattttttcatgtgtggtgaaaacacttaagatctactaccttagcaaattttaagtgttcagtacattattaactatagatactgtgctctacattaaacctctagcatttattcgttttataactgaaagtttataccctttgaccaacatctccccattttccccacctctcacctggacaaccaccactgtgtttaagttcagctattttagattccacgtataaatggtatacaat

SEQ ID NO: 7017 - protein, 148 aa, Homo sapiens [sequence omitted]

SEQ ID NO: 7018 - DNA, 2399 bp, Homo sapiens
gcccccggctccatcttgcgggagaccgggttgggctgtgacgctgctgctggggtcagcctgcaggtcaggagtcatcttttcccccttctggtcagtatccttatcctagtggctttcctccaatgggaggaggtgcctacccacaagtgccaagtagtggctacccaggagctggaggctaccctgcgcctggaggttatccagcccctggaggctatcctggtgccccacagccagggggagctccatcctatcccggagttcctccaggccaaggatttggagtcccaccaggtggagcaggcttttctgggtatccacagccaccttcacagtcttatggaggtggtccagcacaggttccactacctggtggctttcctggaggacagatgccttctcagtatcctggaggacaacctacttaccctagtcagcctgccacagtgactcaggtcactcaaggaactatccgaccagctgccaacttcgatgctataagagatgcagaaattcttcgtaaggcaatgaagggttttgggacagatgagcaggcaattgtggatgtggtggccaaccgttccaatgatcagaggcaaaaaattaaagcagcatttaagacctcctatggcaaggatttaatcaaagatctcaaatcagagttaagtggaaatatggaagaactgatcctggccctcttcatgcctcctacgtattacgatgcctggagcttacggaaagcaatgcagggagcaggaactcaggaacgtgtattgattgagattttgtgcacaagaacaaatcaggaaatccgagaaattgtcagatgttatcagtcagaatttggacgagaccttgaaaaggacattaggtcagatacatcaggacattttgaacgtttacttgtgtccatgtgccagggaaatcgtgatgagaaccagagtataaaccaccaaatggctcaggaagatgctcagcgtctctatcaagctggtgaggggagactagggaccgatgaatcttgctttaacatgatccttgccacaagaagctttcctcagctgagagctaccatggaggcttattctaggatggctaatcgagacttgttaagcagtgtgagccgtgagttttccggatatgtagaaagtggtttgaagaccatcttgcagtgtgccctgaaccgccctgccttctttgctgagaggctctactatgctatgaaaggtgctggcacagatgactccaccctggtccggattgtggtcactcgaagtgagattgaccttgtacaaataaaacagatgttcgctcagatgtatcagaagactctgggcacaatgattgcaggtgacacgagtggagattaccgaagacttcttctggctattgtgggccagtaggagggatttttttttttttaatgaaaaaaaatttctattcatagcttatccttcagagcaatgacctgcatgcagcaatatcaaacatcagctaaccgaaagagctttctgtcaaggaccgtatcagggtaatgtgcttggtttgcacatgttgttattgccttaattctaattttattttgttctctacatacaatcaatgtaaagccatatcacaatgatacagtaatattgcaatgtttgtaaaccttcattcttactagtttcattctaatcaagatgtcaaattgaataaaaatcacagcaatctctgattctgtgtaataatattgaataattttttagaaggttactgaaagctctgccttccggaatccctctaagtctgcttgatagagtggatagtgtgttaaaactgtgtactttaaaaaaaaattcaacctttacatctagaataatttgcatctcattttgcctaaattggttctgtattcataaacactttccacatagaaaatagattagtattacctgtggcaccttttaagaaagggtcaaatgtttatatgcttaagatacatagcctacttttttttcgcagttgttttctttttttaaattgagttatgacaaataaaaaattgcatatatttaaggtgtacaatatggtgttttgatatcagcattccttgtgtaatgattccacaattaaggtcaggctaattacgtatctgtcaccttgacatagttaccattttttcatgtgtggtgaaaacacttaagatctactaccttagcaaattttaagtgttcagtacattattaactatagatactgtgctctacattaaacctctagcatttattcgttttataactgaaagtttataccctttgaccaacatctccccattttccccacctctcacctggacaaccaccactgtgtttaagttcagctattttagattccacgtataaatggtatacaat

SEQ ID NO: 7019 - protein, 426 aa, Homo sapiens
MGGGAYPQVPSSGYPGAGGYPAPGGYPAPGGYPGAPQPGGAPSYPGVPPGQGFGVPPGGAGFSGYPQPPSQSYGGGPAQVPLPGGFPGGQMPSQYPGGQPTYPSQPATVTQVTQGTIRPAANFDAIRDAEILRKAMKGFGTDEQAIVDVVANRSNDQRQKIKAAFKTSYGKDLIKDLKSELSGNMEELILALFMPPTYYDAWSLRKAMQGAGTQERVLIEILCTRTNQEIREIVRCYQSEFGRDLEKDIRSDTSGHFERLLVSMCQGNRDENQSINHQMAQEDAQRLYQAGEGRLGTDESCFNMILATRSFPQLRATMEAYSRMANRDLLSSVSREFSGYVESGLKTILQCALNRPAFFAERLYYAMKGAGTDDSTLVRIVVTRSEIDLVQIKQMFAQMYQKTLGTMIAGDTSGDYRRLLLAIVGQ

SEQ ID NO: 7020 - DNA, 2460 bp, Homo sapiens
gggcccgcccccggctccatcttgcgggagaccgggttgggctgtgacgctgctgctggggtcagaatgtcatacccaggctatcccccaacaggctacccacctttccctggatatcctcctgcaggtcaggagtcatcttttcccccttctggtcagtatccttatcctagtggctttcctccaatgggaggaggtgcctacccacaagtgccaagtagtggctacccaggagctggaggctaccctgcgcctggaggttatccagcccctggaggctatcctggtgccccacagccagggggagctccatcctatcccggagttcctccaggccaaggatttggagtcccaccaggtggagcaggcttttctgggtatccacagccaccttcacagtcttatggaggtggtccagcacaggttccactacctggtggctttcctggaggacagatgccttctcagtatcctggaggacaacctacttaccctagtcagcctgccacagtgactcaggtcactcaaggaactatccgaccagctgccaacttcgatgctataagagatgcagaaattcttcgtaaggcaatgaagggttttgggacagatgagcaggcaattgtggatgtggtggccaaccgttccaatgatcagaggcaaaaaattaaagcagcatttaagacctcctatggcaaggatttaatcaaagatctcaaatcagagttaagtggaaatatggaagaactgatcctggccctcttcatgcctcctacgtattacgatgcctggagcttacggaaagcaatgcagggagcaggaactcaggaacgtgtattgattgagattttgtgcacaagaacaaatcaggaaatccgagaaattgtcagatgttatcagtcagaatttggacgagaccttgaaaaggacattaggtcagatacatcaggacattttgaacgtttacttgtgtccatgtgccagggaaatcgtgatgagaaccagagtataaaccaccaaatggctcaggaagatgctcagcgtctctatcaagctggtgaggggagactagggaccgatgaatcttgctttaacatgatccttgccacaagaagctttcctcagctgagagctaccatggaggcttattctaggatggctaatcgagacttgttaagcagtgtgagccgtgagttttccggatatgtagaaagtggtttgaagaccatcttgcagtgtgccctgaaccgccctgccttctttgctgagaggctctactatgctatgaaaggtgctggcacagatgactccaccctggtccggattgtggtcactcgaagtgagattgaccttgtacaaataaaacagatgttcgctcagatgtatcagaagactctgggcacaatgattgcaggtgacacgagtggagattaccgaagacttcttctggctattgtgggccagtaggagggatttttttttttttaatgaaaaaaaatttctattcatagcttatccttcagagcaatgacctgcatgcagcaatatcaaacatcagctaaccgaaagagctttctgtcaaggaccgtatcagggtaatgtgcttggtttgcacatgttgttattgccttaattctaattttattttgttctctacatacaatcaatgtaaagccatatcacaatgatacagtaatattgcaatgtttgtaaaccttcattcttactagtttcattctaatcaagatgtcaaattgaataaaaatcacagcaatctctgattctgtgtaataatattgaataattttttagaaggttactgaaagctctgccttccggaatccctctaagtctgcttgatagagtggatagtgtgttaaaactgtgtactttaaaaaaaaattcaacctttacatctagaataatttgcatctcattttgcctaaattggttctgtattcataaacactttccacatagaaaatagattagtattacctgtggcaccttttaagaaagggtcaaatgtttatatgcttaagatacatagcctacttttttttcgcagttgttttctttttttaaattgagttatgacaaataaaaaattgcatatatttaaggtgtacaatatggtgttttgatatcagcattccttgtgtaatgattccacaattaaggtcaggctaattacgtatctgtcaccttgacatagttaccattttttcatgtgtggtgaaaacacttaagatctactaccttagcaaattttaagtgttcagtacattattaactatagatactgtgctctacattaaacctctagcatttattcgttttataactgaaagtttataccctttgaccaacatctccccattttccccacctctcacctggacaaccaccactgtgtttaagttcagctattttagattccacgtataaatggtatacaat

SEQ ID NO: 7021 - protein, 466 aa, Homo sapiens; identical to SEQ ID NO: 781

SEQ ID NO: 7022 - DNA, 2532 bp, Homo sapiens
caccctgggcccgcccccggctccatcttgcgggagaccgggttgggctgtgacgctgctgctggggtcagaatgtcatacccaggctatcccccaacaggctacccacctttccctggatatcctcctgcaggtcaggagtcatcttttcccccttctggtcagtatccttatcctagtggctttcctccaatgggaggaggtgcctacccacaagtgccaagtagtggctacccaggagctggaggctaccctgcgcctggaggttatccagcccctggaggctatcctggtgccccacagccagggggagctccatcctatcccggagttcctccaggccaaggatttggagtcccaccaggtggagcaggcttttctgggtatccacagccaccttcacagtcttatggaggtggtccagcacaggttccactacctggtggctttcctggaggacagatgccttctcagtatcctggaggacaacctacttaccctagtcagatcaatacagattctttttcttcctatcctgttttctctcctgtttctttggattatagcagtgaacctgccacagtgactcaggtcactcaaggaactatccgaccagctgccaacttcgatgctataagagatgcagaaattcttcgtaaggcaatgaagggttttgggacagatgagcaggcaattgtggatgtggtggccaaccgttccaatgatcagaggcaaaaaattaaagcagcatttaagacctcctatggcaaggatttaatcaaagatctcaaatcagagttaagtggaaatatggaagaactgatcctggccctcttcatgcctcctacgtattacgatgcctggagcttacggaaagcaatgcagggagcaggaactcaggaacgtgtattgattgagattttgtgcacaagaacaaatcaggaaatccgagaaattgtcagatgttatcagtcagaatttggacgagaccttgaaaaggacattaggtcagatacatcaggacattttgaacgtttacttgtgtccatgtgccagggaaatcgtgatgagaaccagagtataaaccaccaaatggctcaggaagatgctcagcgtctctatcaagctggtgaggggagactagggaccgatgaatcttgctttaacatgatccttgccacaagaagctttcctcagctgagagctaccatggaggcttattctaggatggctaatcgagacttgttaagcagtgtgagccgtgagttttccggatatgtagaaagtggtttgaagaccatcttgcagtgtgccctgaaccgccctgccttctttgctgagaggctctactatgctatgaaaggtgctggcacagatgactccaccctggtccggattgtggtcactcgaagtgagattgaccttgtacaaataaaacagatgttcgctcagatgtatcagaagactctgggcacaatgattgcaggtgacacgagtggagattaccgaagacttcttctggctattgtgggccagtaggagggatttttttttttttaatgaaaaaaaatttctattcatagcttatccttcagagcaatgacctgcatgcagcaatatcaaacatcagctaaccgaaagagctttctgtcaaggaccgtatcagggtaatgtgcttggtttgcacatgttgttattgccttaattctaattttattttgttctctacatacaatcaatgtaaagccatatcacaatgatacagtaatattgcaatgtttgtaaaccttcattcttactagtttcattctaatcaagatgtcaaattgaataaaaatcacagcaatctctgattctgtgtaataatattgaataattttttagaaggttactgaaagctctgccttccggaatccctctaagtctgcttgatagagtggatagtgtgttaaaactgtgtactttaaaaaaaaattcaacctttacatctagaataatttgcatctcattttgcctaaattggttctgtattcataaacactttccacatagaaaatagattagtattacctgtggcaccttttaagaaagggtcaaatgtttatatgcttaagatacatagcctacttttttttcgcagttgttttctttttttaaattgagttatgacaaataaaaaattgcatatatttaaggtgtacaatatggtgttttgatatcagcattccttgtgtaatgattccacaattaaggtcaggctaattacgtatctgtcaccttgacatagttaccattttttcatgtgtggtgaaaacacttaagatctactaccttagcaaattttaagtgttcagtacattattaactatagatactgtgctctacattaaacctctagcatttattcgttttataactgaaagtttataccctttgaccaacatctccccattttccccacctctcacctggacaaccaccactgtgtttaagttcagctattttagattccacgtataaatggtatacaat

SEQ ID NO: 7023 - protein, 488 aa, Homo sapiens; identical to SEQ ID NO: 783

SEQ ID NO: 7024 - DNA, 1255 bp, Homo sapiens
ctttatgcagagttcaaggcccagccctaccttttccagggcatgagtagaggagtaacttcctgagaaagtgtgtgtgaatccaaaggcaataatctgggaaattttttggaaatcgtgatgagaaccagagtataaaccaccaaatggctcaggaagatgctcagcgtctctatcaagctggtgaggggagactagggaccgatgaatcttgctttaacatgatccttgccacaagaagctttcctcagctgagagctaccatggaggcttattctaggatggctaatcgagacttgttaagcagtgtgagccgtgagttttccggatatgtagaaagtggtttgaagaccatcttgcagtgtgccctgaaccgccctgccttctttgctgagaggctctactatgctatgaaaggtgctggcacagatgactccaccctggtccggattgtggtcactcgaagtgagattgaccttgtacaaataaaacagatgttcgctcagatgtatcagaagactctgggcacaatgattgcaggtgacacgagtggagattaccgaagacttcttctggctattgtgggccagtaggagggatttttttttttttaatgaaaaaaaatttctattcatagcttatccttcagagcaatgacctgcatgcagcaatatcaaacatcagctaaccgaaagagctttctgtcaaggaccgtatcagggtaatgtgcttggtttgcacatgttgttattgccttaattctaattttattttgttctctacatacaatcaatgtaaagccatatcacaatgatacagtaatattgcaatgtttgtaaaccttcattcttactagtttcattctaatcaagatgtcaaattgaataaaaatcacagcaatctctgattctgtgtaataatattgaataattttttagaaggttactgaaagctctgccttccggaatccctctaagtctgcttgatagagtggatagtgtgttaaaactgtgtactttaaaaaaaaattcaacctttacatctagaataatttgcatctcattttgcctaaattggttctgtattcataaacactttccacatagaaaatagattagtattacctgtggcaccttttaagaaagggtcaaatgtttatatgcttaagatacatagcctacttttttttcgcagttgttttctttttttaaattgagttatgacaaataaaaaattgcatatatttaaggtgtac

SEQ ID NO: 7025 - protein, 148 aa, Homo sapiens [sequence omitted]

SEQ ID NO: 7026 - DNA, 2068 bp, Homo sapiens
gcccccggctccatcttgcgggagaccgggttgggctgtgacgctgctgctggggtcagcctgcaggtcaggagtcatcttttcccccttctggtcagtatccttatcctagtggctttcctccaatgggaggaggtgcctacccacaagtgccaagtagtggctacccaggagctggaggctaccctgcgcctggaggttatccagcccctggaggctatcctggtgccccacagccagggggagctccatcctatcccggagttcctccaggccaaggatttggagtcccaccaggtggagcaggcttttctgggtatccacagccaccttcacagtcttatggaggtggtccagcacaggttccactacctggtggctttcctggaggacagatgccttctcagtatcctggaggacaacctacttaccctagtcagcctgccacagtgactcaggtcactcaaggaactatccgaccagctgccaacttcgatgctataagagatgcagaaattcttcgtaaggcaatgaagggttttgggacagatgagcaggcaattgtggatgtggtggccaaccgttccaatgatcagaggcaaaaaattaaagcagcatttaagacctcctatggcaaggatttaatcaaagatctcaaatcagagttaagtggaaatatggaagaactgatcctggccctcttcatgcctcctacgtattacgatgcctggagcttacggaaagcaatgcagggagcaggaactcaggaacgtgtattgattgagattttgtgcacaagaacaaatcaggaaatccgagaaattgtcagatgttatcagtcagaatttggacgagaccttgaaaaggacattaggtcagatacatcaggacattttgaacgtttacttgtgtccatgtgccagggaaatcgtgatgagaaccagagtataaaccaccaaatggctcaggaagatgctcagcgtctctatcaagctggtgaggggagactagggaccgatgaatcttgctttaacatgatccttgccacaagaagctttcctcagctgagagctaccatggaggcttattctaggatggctaatcgagacttgttaagcagtgtgagccgtgagttttccggatatgtagaaagtggtttgaagaccatcttgcagtgtgccctgaaccgccctgccttctttgctgagaggctctactatgctatgaaaggtgctggcacagatgactccaccctggtccggattgtggtcactcgaagtgagattgaccttgtacaaataaaacagatgttcgctcagatgtatcagaagactctgggcacaatgattgcaggtgacacgagtggagattaccgaagacttcttctggctattgtgggccagtaggagggatttttttttttttaatgaaaaaaaatttctattcatagcttatccttcagagcaatgacctgcatgcagcaatatcaaacatcagctaaccgaaagagctttctgtcaaggaccgtatcagggtaatgtgcttggtttgcacatgttgttattgccttaattctaattttattttgttctctacatacaatcaatgtaaagccatatcacaatgatacagtaatattgcaatgtttgtaaaccttcattcttactagtttcattctaatcaagatgtcaaattgaataaaaatcacagcaatctctgattctgtgtaataatattgaataattttttagaaggttactgaaagctctgccttccggaatccctctaagtctgcttgatagagtggatagtgtgttaaaactgtgtactttaaaaaaaaattcaacctttacatctagaataatttgcatctcattttgcctaaattggttctgtattcataaacactttccacatagaaaatagattagtattacctgtggcaccttttaagaaagggtcaaatgtttatatgcttaagatacatagcctacttttttttcgcagttgttttctttttttaaattgagttatgacaaataaaaaattgcatatatttaaggtgtac

SEQ ID NO: 7027 - protein, 426 aa, Homo sapiens; identical to SEQ ID NO: 7019

SEQ ID NO: 7028 - DNA, 2129 bp, Homo sapiens
gggcccgcccccggctccatcttgcgggagaccgggttgggctgtgacgctgctgctggggtcagaatgtcatacccaggctatcccccaacaggctacccacctttccctggatatcctcctgcaggtcaggagtcatcttttcccccttctggtcagtatccttatcctagtggctttcctccaatgggaggaggtgcctacccacaagtgccaagtagtggctacccaggagctggaggctaccctgcgcctggaggttatccagcccctggaggctatcctggtgccccacagccagggggagctccatcctatcccggagttcctccaggccaaggatttggagtcccaccaggtggagcaggcttttctgggtatccacagccaccttcacagtcttatggaggtggtccagcacaggttccactacctggtggctttcctggaggacagatgccttctcagtatcctggaggacaacctacttaccctagtcagcctgccacagtgactcaggtcactcaaggaactatccgaccagctgccaacttcgatgctataagagatgcagaaattcttcgtaaggcaatgaagggttttgggacagatgagcaggcaattgtggatgtggtggccaaccgttccaatgatcagaggcaaaaaattaaagcagcatttaagacctcctatggcaaggatttaatcaaagatctcaaatcagagttaagtggaaatatggaagaactgatcctggccctcttcatgcctcctacgtattacgatgcctggagcttacggaaagcaatgcagggagcaggaactcaggaacgtgtattgattgagattttgtgcacaagaacaaatcaggaaatccgagaaattgtcagatgttatcagtcagaatttggacgagaccttgaaaaggacattaggtcagatacatcaggacattttgaacgtttacttgtgtccatgtgccagggaaatcgtgatgagaaccagagtataaaccaccaaatggctcaggaagatgctcagcgtctctatcaagctggtgaggggagactagggaccgatgaatcttgctttaacatgatccttgccacaagaagctttcctcagctgagagctaccatggaggcttattctaggatggctaatcgagacttgttaagcagtgtgagccgtgagttttccggatatgtagaaagtggtttgaagaccatcttgcagtgtgccctgaaccgccctgccttctttgctgagaggctctactatgctatgaaaggtgctggcacagatgactccaccctggtccggattgtggtcactcgaagtgagattgaccttgtacaaataaaacagatgttcgctcagatgtatcagaagactctgggcacaatgattgcaggtgacacgagtggagattaccgaagacttcttctggctattgtgggccagtaggagggatttttttttttttaatgaaaaaaaatttctattcatagcttatccttcagagcaatgacctgcatgcagcaatatcaaacatcagctaaccgaaagagctttctgtcaaggaccgtatcagggtaatgtgcttggtttgcacatgttgttattgccttaattctaattttattttgttctctacatacaatcaatgtaaagccatatcacaatgatacagtaatattgcaatgtttgtaaaccttcattcttactagtttcattctaatcaagatgtcaaattgaataaaaatcacagcaatctctgattctgtgtaataatattgaataattttttagaaggttactgaaagctctgccttccggaatccctctaagtctgcttgatagagtggatagtgtgttaaaactgtgtactttaaaaaaaaattcaacctttacatctagaataatttgcatctcattttgcctaaattggttctgtattcataaacactttccacatagaaaatagattagtattacctgtggcaccttttaagaaagggtcaaatgtttatatgcttaagatacatagcctacttttttttcgcagttgttttctttttttaaattgagttatgacaaataaaaaattgcatatatttaaggtgtac

SEQ ID NO: 7029 - protein, 466 aa, Homo sapiens; identical to SEQ ID NO: 781

SEQ ID NO: 7030 - DNA, 2201 bp, Homo sapiens
caccctgggcccgcccccggctccatcttgcgggagaccgggttgggctgtgacgctgctgctggggtcagaatgtcatacccaggctatcccccaacaggctacccacctttccctggatatcctcctgcaggtcaggagtcatcttttcccccttctggtcagtatccttatcctagtggctttcctccaatgggaggaggtgcctacccacaagtgccaagtagtggctacccaggagctggaggctaccctgcgcctggaggttatccagcccctggaggctatcctggtgccccacagccagggggagctccatcctatcccggagttcctccaggccaaggatttggagtcccaccaggtggagcaggcttttctgggtatccacagccaccttcacagtcttatggaggtggtccagcacaggttccactacctggtggctttcctggaggacagatgccttctcagtatcctggaggacaacctacttaccctagtcagatcaatacagattctttttcttcctatcctgttttctctcctgtttctttggattatagcagtgaacctgccacagtgactcaggtcactcaaggaactatccgaccagctgccaacttcgatgctataagagatgcagaaattcttcgtaaggcaatgaagggttttgggacagatgagcaggcaattgtggatgtggtggccaaccgttccaatgatcagaggcaaaaaattaaagcagcatttaagacctcctatggcaaggatttaatcaaagatctcaaatcagagttaagtggaaatatggaagaactgatcctggccctcttcatgcctcctacgtattacgatgcctggagcttacggaaagcaatgcagggagcaggaactcaggaacgtgtattgattgagattttgtgcacaagaacaaatcaggaaatccgagaaattgtcagatgttatcagtcagaatttggacgagaccttgaaaaggacattaggtcagatacatcaggacattttgaacgtttacttgtgtccatgtgccagggaaatcgtgatgagaaccagagtataaaccaccaaatggctcaggaagatgctcagcgtctctatcaagctggtgaggggagactagggaccgatgaatcttgctttaacatgatccttgccacaagaagctttcctcagctgagagctaccatggaggcttattctaggatggctaatcgagacttgttaagcagtgtgagccgtgagttttccggatatgtagaaagtggtttgaagaccatcttgcagtgtgccctgaaccgccctgccttctttgctgagaggctctactatgctatgaaaggtgctggcacagatgactccaccctggtccggattgtggtcactcgaagtgagattgaccttgtacaaataaaacagatgttcgctcagatgtatcagaagactctgggcacaatgattgcaggtgacacgagtggagattaccgaagacttcttctggctattgtgggccagtaggagggatttttttttttttaatgaaaaaaaatttctattcatagcttatccttcagagcaatgacctgcatgcagcaatatcaaacatcagctaaccgaaagagctttctgtcaaggaccgtatcagggtaatgtgcttggtttgcacatgttgttattgccttaattctaattttattttgttctctacatacaatcaatgtaaagccatatcacaatgatacagtaatattgcaatgtttgtaaaccttcattcttactagtttcattctaatcaagatgtcaaattgaataaaaatcacagcaatctctgattctgtgtaataatattgaataattttttagaaggttactgaaagctctgccttccggaatccctctaagtctgcttgatagagtggatagtgtgttaaaactgtgtactttaaaaaaaaattcaacctttacatctagaataatttgcatctcattttgcctaaattggttctgtattcataaacactttccacatagaaaatagattagtattacctgtggcaccttttaagaaagggtcaaatgtttatatgcttaagatacatagcctacttttttttcgcagttgttttctttttttaaattgagttatgacaaataaaaaattgcatatatttaaggtgtac

SEQ ID NO: 7031 - protein, 488 aa, Homo sapiens; identical to SEQ ID NO: 783

SEQ ID NO: 7032 - DNA, 1046 bp, Homo sapiens
ctttatgcagagttcaaggcccagccctaccttttccagggcatgagtagaggagtaacttcctgagaaagtgtgtgtgaatccaaaggcaataatctgggaaattttttggaaatcgtgatgagaaccagagtataaaccaccaaatggctcaggaagatgctcagcgtctctatcaagctggtgaggggagactagggaccgatgaatcttgctttaacatgatccttgccacaagaagctttcctcagctgagagctaccatggaggcttattctaggatggctaatcgagacttgttaagcagtgtgagccgtgagttttccggatatgtagaaagtggtttgaagaccatcttgcagtgtgccctgaaccgccctgccttctttgctgagaggctctactatgctatgaaaggtgctggcacagatgactccaccctggtccggattgtggtcactcgaagtgagattgaccttgtacaaataaaacagatgttcgctcagatgtatcagaagactctgggcacaatgattgcaggtgacacgagtggagattaccgaagacttcttctggctattgtgggccagtaggagggatttttttttttttaatgaaaaaaaatttctattcatagcttatccttcagagcaatgacctgcatgcagcaatatcaaacatcagctaaccgaaagagctttctgtcaaggaccgtatcagggtaatgtgcttggtttgcacatgttgttattgccttaattctaattttattttgttctctacatacaatcaatgtaaagccatatcacaatgatacagtaatattgcaatgtttgtaaaccttcattcttactagtttcattctaatcaagatgtcaaattgaataaaaatcacagcaatctctgattctgtgtaataatattgaataattttttagaaggttactgaaagctctgccttccggaatccctctaagtctgcttgatagagtggatagtgtgttaaaactgtgtactttaaaaaaaaattcaacctttacatctag

SEQ ID NO: 7033 - protein, 148 aa, Homo sapiens [sequence omitted]

SEQ ID NO: 7034 - DNA, 1920 bp, Homo sapiens
gggcccgcccccggctccatcttgcgggagaccgggttgggctgtgacgctgctgctggggtcagaatgtcatacccaggctatcccccaacaggctacccacctttccctggatatcctcctgcaggtcaggagtcatcttttcccccttctggtcagtatccttatcctagtggctttcctccaatgggaggaggtgcctacccacaagtgccaagtagtggctacccaggagctggaggctaccctgcgcctggaggttatccagcccctggaggctatcctggtgccccacagccagggggagctccatcctatcccggagttcctccaggccaaggatttggagtcccaccaggtggagcaggcttttctgggtatccacagccaccttcacagtcttatggaggtggtccagcacaggttccactacctggtggctttcctggaggacagatgccttctcagtatcctggaggacaacctacttaccctagtcagcctgccacagtgactcaggtcactcaaggaactatccgaccagctgccaacttcgatgctataagagatgcagaaattcttcgtaaggcaatgaagggttttgggacagatgagcaggcaattgtggatgtggtggccaaccgttccaatgatcagaggcaaaaaattaaagcagcatttaagacctcctatggcaaggatttaatcaaagatctcaaatcagagttaagtggaaatatggaagaactgatcctggccctcttcatgcctcctacgtattacgatgcctggagcttacggaaagcaatgcagggagcaggaactcaggaacgtgtattgattgagattttgtgcacaagaacaaatcaggaaatccgagaaattgtcagatgttatcagtcagaatttggacgagaccttgaaaaggacattaggtcagatacatcaggacattttgaacgtttacttgtgtccatgtgccagggaaatcgtgatgagaaccagagtataaaccaccaaatggctcaggaagatgctcagcgtctctatcaagctggtgaggggagactagggaccgatgaatcttgctttaacatgatccttgccacaagaagctttcctcagctgagagctaccatggaggcttattctaggatggctaatcgagacttgttaagcagtgtgagccgtgagttttccggatatgtagaaagtggtttgaagaccatcttgcagtgtgccctgaaccgccctgccttctttgctgagaggctctactatgctatgaaaggtgctggcacagatgactccaccctggtccggattgtggtcactcgaagtgagattgaccttgtacaaataaaacagatgttcgctcagatgtatcagaagactctgggcacaatgattgcaggtgacacgagtggagattaccgaagacttcttctggctattgtgggccagtaggagggatttttttttttttaatgaaaaaaaatttctattcatagcttatccttcagagcaatgacctgcatgcagcaatatcaaacatcagctaaccgaaagagctttctgtcaaggaccgtatcagggtaatgtgcttggtttgcacatgttgttattgccttaattctaattttattttgttctctacatacaatcaatgtaaagccatatcacaatgatacagtaatattgcaatgtttgtaaaccttcattcttactagtttcattctaatcaagatgtcaaattgaataaaaatcacagcaatctctgattctgtgtaataatattgaataattttttagaaggttactgaaagctctgccttccggaatccctctaagtctgcttgatagagtggatagtgtgttaaaactgtgtactttaaaaaaaaattcaacctttacatctag

SEQ ID NO: 7035 - protein, 466 aa, Homo sapiens; identical to SEQ ID NO: 781

SEQ ID NO: 7036 - DNA, 1992 bp, Homo sapiens
caccctgggcccgcccccggctccatcttgcgggagaccgggttgggctgtgacgctgctgctggggtcagaatgtcatacccaggctatcccccaacaggctacccacctttccctggatatcctcctgcaggtcaggagtcatcttttcccccttctggtcagtatccttatcctagtggctttcctccaatgggaggaggtgcctacccacaagtgccaagtagtggctacccaggagctggaggctaccctgcgcctggaggttatccagcccctggaggctatcctggtgccccacagccagggggagctccatcctatcccggagttcctccaggccaaggatttggagtcccaccaggtggagcaggcttttctgggtatccacagccaccttcacagtcttatggaggtggtccagcacaggttccactacctggtggctttcctggaggacagatgccttctcagtatcctggaggacaacctacttaccctagtcagatcaatacagattctttttcttcctatcctgttttctctcctgtttctttggattatagcagtgaacctgccacagtgactcaggtcactcaaggaactatccgaccagctgccaacttcgatgctataagagatgcagaaattcttcgtaaggcaatgaagggttttgggacagatgagcaggcaattgtggatgtggtggccaaccgttccaatgatcagaggcaaaaaattaaagcagcatttaagacctcctatggcaaggatttaatcaaagatctcaaatcagagttaagtggaaatatggaagaactgatcctggccctcttcatgcctcctacgtattacgatgcctggagcttacggaaagcaatgcagggagcaggaactcaggaacgtgtattgattgagattttgtgcacaagaacaaatcaggaaatccgagaaattgtcagatgttatcagtcagaatttggacgagaccttgaaaaggacattaggtcagatacatcaggacattttgaacgtttacttgtgtccatgtgccagggaaatcgtgatgagaaccagagtataaaccaccaaatggctcaggaagatgctcagcgtctctatcaagctggtgaggggagactagggaccgatgaatcttgctttaacatgatccttgccacaagaagctttcctcagctgagagctaccatggaggcttattctaggatggctaatcgagacttgttaagcagtgtgagccgtgagttttccggatatgtagaaagtggtttgaagaccatcttgcagtgtgccctgaaccgccctgccttctttgctgagaggctctactatgctatgaaaggtgctggcacagatgactccaccctggtccggattgtggtcactcgaagtgagattgaccttgtacaaataaaacagatgttcgctcagatgtatcagaagactctgggcacaatgattgcaggtgacacgagtggagattaccgaagacttcttctggctattgtgggccagtaggagggatttttttttttttaatgaaaaaaaatttctattcatagcttatccttcagagcaatgacctgcatgcagcaatatcaaacatcagctaaccgaaagagctttctgtcaaggaccgtatcagggtaatgtgcttggtttgcacatgttgttattgccttaattctaattttattttgttctctacatacaatcaatgtaaagccatatcacaatgatacagtaatattgcaatgtttgtaaaccttcattcttactagtttcattctaatcaagatgtcaaattgaataaaaatcacagcaatctctgattctgtgtaataatattgaataattttttagaaggttactgaaagctctgccttccggaatccctctaagtctgcttgatagagtggatagtgtgttaaaactgtgtactttaaaaaaaaattcaacctttacatctag

SEQ ID NO: 7037 - protein, 488 aa, Homo sapiens; identical to SEQ ID NO: 783

SEQ ID NO: 7038 - DNA, 915 bp, Homo sapiens
ctttatgcagagttcaaggcccagccctaccttttccagggcatgagtagaggagtaacttcctgagaaagtgtgtgtgaatccaaaggcaataatctgggaaattttttggaaatcgtgatgagaaccagagtataaaccaccaaatggctcaggaagatgctcagcgtctctatcaagctggtgaggggagactagggaccgatgaatcttgctttaacatgatccttgccacaagaagctttcctcagctgagagctaccatggaggcttattctaggatggctaatcgagacttgttaagcagtgtgagccgtgagttttccggatatgtagaaagtggtttgaagaccatcttgcagtgtgccctgaaccgccctgccttctttgctgagaggctctactatgctatgaaaggtgctggcacagatgactccaccctggtccggattgtggtcactcgaagtgagattgaccttgtacaaataaaacagatgttcgctcagatgtatcagaagactctgggcacaatgattgcaggtgacacgagtggagattaccgaagacttcttctggctattgtgggccagtaggagggatttttttttttttaatgaaaaaaaatttctattcatagcttatccttcagagcaatgacctgcatgcagcaatatcaaacatcagctaaccgaaagagctttctgtcaaggaccgtatcagggtaatgtgcttggtttgcacatgttgttattgccttaattctaattttattttgttctctacatacaatcaatgtaaagccatatcacaatgatacagtaatattgcaatgtttgtaaaccttcattcttactagtttcattctaatcaagatgtcaaattgaataaaaatcacagcaatctctgattctgtgt

SEQ ID NO: 7039 - protein, 148 aa, Homo sapiens [sequence omitted]

SEQ ID NO: 7040 - DNA, 1789 bp, Homo sapiens
gggcccgcccccggctccatcttgcgggagaccgggttgggctgtgacgctgctgctggggtcagaatgtcatacccaggctatcccccaacaggctacccacctttccctggatatcctcctgcaggtcaggagtcatcttttcccccttctggtcagtatccttatcctagtggctttcctccaatgggaggaggtgcctacccacaagtgccaagtagtggctacccaggagctggaggctaccctgcgcctggaggttatccagcccctggaggctatcctggtgccccacagccagggggagctccatcctatcccggagttcctccaggccaaggatttggagtcccaccaggtggagcaggcttttctgggtatccacagccaccttcacagtcttatggaggtggtccagcacaggttccactacctggtggctttcctggaggacagatgccttctcagtatcctggaggacaacctacttaccctagtcagcctgccacagtgactcaggtcactcaaggaactatccgaccagctgccaacttcgatgctataagagatgcagaaattcttcgtaaggcaatgaagggttttgggacagatgagcaggcaattgtggatgtggtggccaaccgttccaatgatcagaggcaaaaaattaaagcagcatttaagacctcctatggcaaggatttaatcaaagatctcaaatcagagttaagtggaaatatggaagaactgatcctggccctcttcatgcctcctacgtattacgatgcctggagcttacggaaagcaatgcagggagcaggaactcaggaacgtgtattgattgagattttgtgcacaagaacaaatcaggaaatccgagaaattgtcagatgttatcagtcagaatttggacgagaccttgaaaaggacattaggtcagatacatcaggacattttgaacgtttacttgtgtccatgtgccagggaaatcgtgatgagaaccagagtataaaccaccaaatggctcaggaagatgctcagcgtctctatcaagctggtgaggggagactagggaccgatgaatcttgctttaacatgatccttgccacaagaagctttcctcagctgagagctaccatggaggcttattctaggatggctaatcgagacttgttaagcagtgtgagccgtgagttttccggatatgtagaaagtggtttgaagaccatcttgcagtgtgccctgaaccgccctgccttctttgctgagaggctctactatgctatgaaaggtgctggcacagatgactccaccctggtccggattgtggtcactcgaagtgagattgaccttgtacaaataaaacagatgttcgctcagatgtatcagaagactctgggcacaatgattgcaggtgacacgagtggagattaccgaagacttcttctggctattgtgggccagtaggagggatttttttttttttaatgaaaaaaaatttctattcatagcttatccttcagagcaatgacctgcatgcagcaatatcaaacatcagctaaccgaaagagctttctgtcaaggaccgtatcagggtaatgtgcttggtttgcacatgttgttattgccttaattctaattttattttgttctctacatacaatcaatgtaaagccatatcacaatgatacagtaatattgcaatgtttgtaaaccttcattcttactagtttcattctaatcaagatgtcaaattgaataaaaatcacagcaatctctgattctgtgt

SEQ ID NO: 7041 - protein, 466 aa, Homo sapiens; identical to SEQ ID NO: 781

SEQ ID NO: 7042 - DNA, 1861 bp, Homo sapiens
caccctgggcccgcccccggctccatcttgcgggagaccgggttgggctgtgacgctgctgctggggtcagaatgtcatacccaggctatcccccaacaggctacccacctttccctggatatcctcctgcaggtcaggagtcatcttttcccccttctggtcagtatccttatcctagtggctttcctccaatgggaggaggtgcctacccacaagtgccaagtagtggctacccaggagctggaggctaccctgcgcctggaggttatccagcccctggaggctatcctggtgccccacagccagggggagctccatcctatcccggagttcctccaggccaaggatttggagtcccaccaggtggagcaggcttttctgggtatccacagccaccttcacagtcttatggaggtggtccagcacaggttccactacctggtggctttcctggaggacagatgccttctcagtatcctggaggacaacctacttaccctagtcagatcaatacagattctttttcttcctatcctgttttctctcctgtttctttggattatagcagtgaacctgccacagtgactcaggtcactcaaggaactatccgaccagctgccaacttcgatgctataagagatgcagaaattcttcgtaaggcaatgaagggttttgggacagatgagcaggcaattgtggatgtggtggccaaccgttccaatgatcagaggcaaaaaattaaagcagcatttaagacctcctatggcaaggatttaatcaaagatctcaaatcagagttaagtggaaatatggaagaactgatcctggccctcttcatgcctcctacgtattacgatgcctggagcttacggaaagcaatgcagggagcaggaactcaggaacgtgtattgattgagattttgtgcacaagaacaaatcaggaaatccgagaaattgtcagatgttatcagtcagaatttggacgagaccttgaaaaggacattaggtcagatacatcaggacattttgaacgtttacttgtgtccatgtgccagggaaatcgtgatgagaaccagagtataaaccaccaaatggctcaggaagatgctcagcgtctctatcaagctggtgaggggagactagggaccgatgaatcttgctttaacatgatccttgccacaagaagctttcctcagctgagagctaccatggaggcttattctaggatggctaatcgagacttgttaagcagtgtgagccgtgagttttccggatatgtagaaagtggtttgaagaccatcttgcagtgtgccctgaaccgccctgccttctttgctgagaggctctactatgctatgaaaggtgctggcacagatgactccaccctggtccggattgtggtcactcgaagtgagattgaccttgtacaaataaaacagatgttcgctcagatgtatcagaagactctgggcacaatgattgcaggtgacacgagtggagattaccgaagacttcttctggctattgtgggccagtaggagggatttttttttttttaatgaaaaaaaatttctattcatagcttatccttcagagcaatgacctgcatgcagcaatatcaaacatcagctaaccgaaagagctttctgtcaaggaccgtatcagggtaatgtgcttggtttgcacatgttgttattgccttaattctaattttattttgttctctacatacaatcaatgtaaagccatatcacaatgatacagtaatattgcaatgtttgtaaaccttcattcttactagtttcattctaatcaagatgtcaaattgaataaaaatcacagcaatctctgattctgtgt

SEQ ID NO: 7043 - protein, 488 aa, Homo sapiens; identical to SEQ ID NO: 783

SEQ ID NO: 7044 - DNA, 401 bp, Homo sapiens
tacagtggtaattaaagcaattctttatttcacatcatccatctgaatatatagtttttagttctacagaacaaagaaatatttgacgaagatttaattacttgcagaaatttcatttttctttgtataatcttcccttcatttcatgtagggagcaggaactcaggaacgtgtattgattgagattttgtgcacaagaacaaatcaggaaatccgagaaattgtcagatgttatcagtcagaatttggacgagaccttttcctgtgttatattcagtcgcccatgtagaatgtgcctctacgtattccttgtgccagttgctcagaagacagttcttcagcttcaaggaggatttttccatcttattccaaagatggtccctgagactctaaaaggcagc

SEQ ID NO: 7045 - protein, 54 aa, Homo sapiens
MLSVRIWTRPFPVLYSVAHVECASTYSLCQLLRRQFFSFKEDFSILFQRWSLRL

SEQ ID NO: 7046 - DNA, 424 bp, Homo sapiens
tcagatttttttttcctttattttgaccctgacccttttgcccttggtctatctacttttctttttctttctttttttttttctttttccttgtcttgtcttgtcttttctttcaactggagtgcaatgatgcaaacacgactcactgccgccttgacctcctggcctcaagcaattctcccacctcagcttcctgaatagtttggactacaggtgggcgccgctgcactggaatgtcatacccaggctatcccccaacaggctacccacctttccctggatatcctcctgcaggtcaggagtcatcttttcccccttctggtcagtatccttatcctagtggctttcctccaatgggaggaggtgcctacccacaagtgccaagtagtggctacccaggagctggaggctaccctgcgcctgg

SEQ ID NO: 7047 - protein, 62 aa, Homo sapiens
MSYPGYPPTGYPPFPGYPPAGQESSFPPSGQYPYPSGFPPMGGGAYPQVPSSGYPGAGGYPA

SEQ ID NO: 7048 - DNA, 1992 bp, Homo sapiens
atttcacttggaggaaagagagaaggaaggaagctgaggacttagcagggtatcactggacaggccatggctccacggtcccggcgacgaaggcacaagaaacctccctcatcagtggctcccatcatcatggccccaaccacaattgtgacccctgtgcctctgaccccctcaaaacctggccctagcattgacacacttggcttcttctccttggatgataatgttcctggcctatcgcagctgatccttcaaaagctgaacatgaaaagctatgaagaatataagttggtggtagatgggggtacccccgtatcaggctttggatttcgatgtcctcaagaaatgttccagaggatggaagacacatttcgattctgtgctcactgtagagcactccctagtgggctttcagactccaaggttctccggcactgtaagaggtgcagaaatgtctattactgtggtccagagtgccagaagtcagactggcccgcacacaggagggtttgtcaagagcttcgtcttgtggctgtggaccgtctcatggaatggcttctggtcacagagcacctcaacttcacccctggaacctggcacaattcagcttagtgcccacaggggcctctaccatgacttctgggaggagcaagtagagaccgggcagacacaccatccagatttggtggcggcattccatccaggttttcattcctccccagacttgatggaggcttggctgcccaccctgctgctacttcgtgactataagattcctacattgattactgtttacagccatcaggagttggtatcctctttgcagattctggtggaactggatacacacatcactgcctttgggtctaatcctttcatgtccctcaaacctgaacaggtctattccagtcccaacaagcagccagtatactgcagtgcatactatatcatgtttcttggaagctcctgtcagctggataataggcaattagaagagaaagtggacggcgggatttaaatagatcataactggacatctggaaaacggggagtttgtgatgaaattaccctgctaatgccaggttcttgcaaactttgaaaaacattatattctaaacctcatttactgtttgggtaaaaattctaagctgaatgagagtttctgtataacataactggtttctttctttttttgagatggagtcttgctctgttgcccaggctggagtgcagcggcatgatctcgactcactgcagcctccgcctcctgggttcaagtggttctcctgcctcagcctccctagtagctgggattacaggtgcacaccaccacacctggctaatttttgtatttttagcagacagggtttcaccatgttggccaggctcgtatcaaacccttgaccccaggtgatctgcctgcctcagcctcccaaagttctgggattacaggcatgagccaccatgcccagccaatgtaactggtttctaagagtttagccacagtagcttctagagataggaaattagatttagtgggtgggaagaggccctgatgctggtctttccagagcttatagttgctaacacttttctttgtaaagaagtttaccttttgactggaaccagatggcactgagaaaaagaatgagaaccaccttattcttctgaaaaagactttcttctcatccagtaatttgggctaaaaaatggaaagatgttgatgacttgaagtgatgcaagaatggacaagtcagggaagtcattgggaacatggatgaggttgtaagcattggtacagtgtcctgtttcctgacttttttgagagaaatgtctacttttcctgttttctcttggggacttttgaccctagagtagccctggtgttatattttagatatcccaagctatatcagactttacctgaatatactggagttacttattatcccccattctataccccaataaactcagtttggggcttcttaa

SEQ ID NO: 7049 - protein, 239 aa, Homo sapiens
MGVPPYQALDFDVLKKCSRGWKTHFDSVLTVEHSLVGFQTPRFSGTVRGAEMSITVVQSARSQTGPHTGGFVKSFVLWLWTVSWNGFWSQSTSTSPLEPGTIQLSAHRGLYHDFWEEQVETGQTHHPDLVAAFHPGFHSSPDLMEAWLPTLLLLRDYKIPTLITVYSHQELVSSLQILVELDTHITAFGSNPFMSLKPEQVYSSPNKQPVYCSAYYIMFLGSSCQLDNRQLEEKVDGGI

SEQ ID NO: 7050 - DNA, 2423 bp, Homo sapiens
atttcacttggaggaaagagagaaggaaggaagctgaggacttagcagggtatcactggacaggccatggctccacggtcccggcgacgaaggcacaagaaacctccctcatcagtggctcccatcatcatggccccaaccacaattgtgacccctgtgcctctgaccccctcaaaacctggccctagcattgacacacttggcttcttctccttggatgataatgttcctggcctatcgcagctgatccttcaaaagctgaacatgaaaagctatgaagaatataagttggtggtagatgggggtacccccgtatcaggctttggatttcgatgtcctcaagaaatgttccagaggatggaagacacatttcgattctgtgctcactgtagagcactccctagtgggctttcagactccaaggttctccggcactgtaagaggtgcagaaatgtctattactgtggtccagagtgccagaagtcagactggcccgcacacaggagggtttgtcaagagcttcgtcttgtggctgtggaccgtctcatggaatggcttctggtcacaggtgattttgttctaccctcaggaccttggccatggccacctgaagctgtacaggactgggactcctggttttctatgaaggggttacacctagatgctacattggatgctgtgctagttagtcatgctgtgaccaccttatgggccagtgtaggacggccaaggccagacccggatgtcctgcagggatctttgaagcggctgctgacagatgtcctgtcacggcccttgactctaggcctaggacttagggccttggggatagatgttaggaggactgggggaagcacagtgcatgtggttggtgcttcccatgtggagacatttcttactcgcccaggggactatgatgagcttggttacatgtttcctgggcaccttggactccgtgtggtcatggtgggtgtagatgtagctactggcttttcacagagcacctcaacttcacccctggaacctggcacaattcagcttagtgcccacaggggcctctaccatgacttctgggaggagcaagtagagaccgggcagacacaccatccagatttggtggcggcattccatccaggttttcattcctccccagacttgatggaggcttggctgcccaccctgctgctacttcgtgactataagattcctacattgattactgtttacagccatcaggagttggtatcctctttgcagattctggtggaactggatacacacatcactgcctttgggtctaatcctttcatgtccctcaaacctgaacaggtctattccagtcccaacaagcagccagtatactgcagtgcatactatatcatgtttcttggaagctcctgtcagctggataataggcaattagaagagaaagtggacggcgggatttaaatagatcataactggacatctggaaaacggggagtttgtgatgaaattaccctgctaatgccaggttcttgcaaactttgaaaaacattatattctaaacctcatttactgtttgggtaaaaattctaagctgaatgagagtttctgtataacataactggtttctttctttttttgagatggagtcttgctctgttgcccaggctggagtgcagcggcatgatctcgactcactgcagcctccgcctcctgggttcaagtggttctcctgcctcagcctccctagtagctgggattacaggtgcacaccaccacacctggctaatttttgtatttttagcagacagggtttcaccatgttggccaggctcgtatcaaacccttgaccccaggtgatctgcctgcctcagcctcccaaagttctgggattacaggcatgagccaccatgcccagccaatgtaactggtttctaagagtttagccacagtagcttctagagataggaaattagatttagtgggtgggaagaggccctgatgctggtctttccagagcttatagttgctaacacttttctttgtaaagaagtttaccttttgactggaaccagatggcactgagaaaaagaatgagaaccaccttattcttctgaaaaagactttcttctcatccagtaatttgggctaaaaaatggaaagatgttgatgacttgaagtgatgcaagaatggacaagtcagggaagtcattgggaacatggatgaggttgtaagcattggtacagtgtcctgtttcctgacttttttgagagaaatgtctacttttcctgttttctcttggggacttttgaccctagagtagccctggtgttatattttagatatcccaagctatatcagactttacctgaatatactggagttacttattatcccccattctataccccaataaactcagtttggggcttcttaa

SEQ ID NO: 7051 - protein, 460 aa, Homo sapiens; identical to SEQ ID NO: 785

SEQ ID NO: 7052 - DNA, 3547 bp, Homo sapiens
agggacagctgcaagtaagccacaacctagatctgaagagatcaagcactcatttcacttggaggaaagagagaaggaaggaagctgaggacttagcagggtatcactggacaggccatggctccacggtcccggcgacgaaggcacaagaaacctccctcatcagtggctcccatcatcatggccccaaccacaattgtgacccctgtgcctctgaccccctcaaaacctggccctagcattgacacacttggcttcttctccttggatgataatgttcctggcctatcgcagctgatccttcaaaagctgaacatgaaaagctatgaagaatataagttggtggtagatgggggtacccccgtatcaggctttggatttcgatgtcctcaagaaatgttccagaggatggaagacacatttcgattctgtgctcactgtagagcactccctagtgggctttcagactccaaggttctccggcactgtaagaggtgcagaaatgtctattactgtggtccagagtgccagaagtcagactggcccgcacacaggagggtttgtcaagagcttcgtcttgtggctgtggaccgtctcatggaatggcttctggtcacaggtggagtggtggtgttgaggatctctgccataatggtcatagttgattgcatttaaaggaagatacaaaatcatattgttatgaaaaaatgaggaagtggggcaaaggatggggcacgcctgctcacaggtgattttgttctaccctcaggaccttggccatggccacctgaagctgtacaggactgggactcctggttttctatgaaggggttacacctagatgctacattggatgctgtgctagttagtcatgctgtgaccaccttatgggccagtgtaggacggccaaggccagacccggatgtcctgcagggatctttgaagcggctgctgacagatgtcctgtcacggcccttgactctaggcctaggacttagggccttggggatagatgttaggaggactgggggaagcacagtgcatgtggttggtgcttcccatgtggagacatttcttactcgcccaggggactatgatgagcttggttacatgtttcctgggcaccttggactccgtgtggtcatggtgggtgtagatgtagctactggcttttcacagagcacctcaacttcacccctggaacctggcacaattcagcttagtgcccacaggggcctctaccatgacttctgggaggagcaagtagagaccgggcagacacaccatccagatttggtggcggcattccatccaggtaagagtcattggttcaggggaatagagggtggctcccctgagaattttccatcctgaatcttctgtctttggaaccccattcatttggtctcattaaacacaatatgatgacaacttttctttttttttttttctttttttttttttgagacggagtctcgctctgtcgcccaggctggagtgcagtggcgcgatctcggctcactgcaagctccacctcccgggttcacgccattctcctgcctcagcctcccgagtagctgggactacaggcgcctggctaattttttgtatttttagtagaggcggggtttcactgtgttagccacgatgatctcgatctcctgaccttatgatccgcccgcctctgcctcccaaagtgctgggattacaggcgtgagccaccgcgcccagcctgatgacaacttttcttgataatttgccatatgtactacacttgggttcagaatttttcattgaagagtggatgatgatgatgatgataatgactggggataagcaaggtgaggggtggggtgctcacagtcaaagaaatatcttgctcttagggtctgctttagtctttccctattcccattttcatttttgttccacaggttttcattcctccccagacttgatggaggcttggctgcccaccctgctgctacttcgtgactataagattcctacattgattactgtttacaggttttgacctcatcctatttgtgatacttccctgactttacatctctctttatatagatgagctcatttttgcccccctcttgctcatctaccttctggtgaggatgttcttttccgcatatggcttttttatccccttggaacagtcctttgctagttaatggaatatttaatgagacatttgggagggaaagatagcccttgcctagtccagccttaggcaatttgggggatgggtgattacagaaatgtcaggctcttgggcagtttttcctttatctctgtcacaatcagtagagtaatttttcttctctctcttctacagccatcaggagttggtatcctctttgcagattctggtggaactggatacacacatcactgcctttgggtctaatcctttcatgtccctcaaacctgaacaggtctattccagtcccaacaagcagccagtatactgcagtgcatactatatcatgtttcttggaagctcctgtcagctggataataggcaattagaagagaaagtggacggcgggatttaaatagatcataactggacatctggaaaacggggagtttgtgatgaaattaccctgctaatgccaggttcttgcaaactttgaaaaacattatattctaaacctcatttactgtttgggtaaaaattctaagctgaatgagagtttctgtataacataactggtttctttctttttttgagatggagtcttgctctgttgcccaggctggagtgcagcggcatgatctcgactcactgcagcctccgcctcctgggttcaagtggttctcctgcctcagcctccctagtagctgggattacaggtgcacaccaccacacctggctaatttttgtatttttagcagacagggtttcaccatgttggccaggctcgtatcaaacccttgaccccaggtgatctgcctgcctcagcctcccaaagttctgggattacaggcatgagccaccatgcccagccaatgtaactggtttctaagagtttagccacagtagcttctagagataggaaattagatttagtgggtgggaagaggccctgatgctggtctttccagagcttatagttgctaacacttttctttgtaaagaagtttaccttttgactggaaccagatggcactgagaaaaagaatgagaaccaccttattcttctgaaaaagactttcttctcatccagtaatttgggctaaaaaatggaaagatgttgatgacttgaagtgatgcaagaatggacaagtcagggaagtcattgggaacatggatgaggttgtaagcattggtacagtgtcctgtttcctgacttttttgagagaaatgtctacttttcctgttttctcttggggacttttgaccctagagtagccctggtgttatattttagatatcccaagctatatcagactttacctgaatatactggagttacttattatcccccattctataccccaataaactcagtttggggcttcttaa

SEQ ID NO: 7053 - protein, 185 aa, Homo sapiens [sequence omitted]

SEQ ID NO: 7054 - DNA, 2313 bp, Homo sapiens
tatgggaaggatggaggggccaggaagataagtgacagaaatgttggtaaatgttctgagtatttgctctgatgatgaactaatgactgaaggtgaagaccagtttgatggttcagctgcagcccggaaagaaatcataagaaacaaaattcgagcaattggcaagatggcaagagtcttctctgttctcagggaggagagtgaaagtgtgctgacactcaagggcctgactcccacagggatgttgcctagtggagtgttagctggaggacggcagaccctgcaaagtgccacagttgaggctattgaggctgaaaaagcaatacgaggattctctccaccacatagaatctgcagttttgaagaggcaaagggtttggataggatcaatgagagaatgccacctcggaaagatgctgtacagcaagatggtttcaattctctgaacaccgcacatgccactgagaaccacgggacgggcaaccatactgcccagtgacccactacttcccagggactctcacatctcgggccccaaatggacagatcacccgaggagctggaggggtcggccaagctgactgtaaatttcacagtctctctgaagaaaccattgtgcttctgagaccctagcccccttcctggatggaggcttgagggccctgggacatgtgctatctgataagattgggtcatcgctgccaaggtggagagcagtgagcaaggggcttggggcaatttccagtggagggcatccacacctccattttatgcttgtggttcacacatttaagtttacaaatcagatttcttttccccttcagtagaattagattttgtttttcaatcatgatttcaaatgcaatcctaagagctaatgtggacttttctttttccatgaaatgtctttaaaggatgaattagcatggtcttaaaatacatttctgaggttactagctgtattttgaattgtgagcaaaatgccgagaaacccagttggcatttatacaaaatgttgacctcaggtctatagttcttaaatgtggctaattctgtaacatagtcttggtattttttaattatgaatgcatatcctatttccaggcaggctctcttacttgaacacaaatccaaaaactaatttagagtcttttttgcccagatcttttaagacttacaccccagagatttaagaagaaaacctctaaatttcaaaattatgaagaattacagaattactcatttaaggtactttaaaagaagtttgtacattgtcaaagtaaattttaattcaaatcatgtctgtaaaacttgacgtattttgtgtatgcatgttttcattttgcaaatatttaatatatagacctatgatgtacaggtacgacatgtataggttacctagatgttatgagaaattttagtttattgtgagtactcaagttgcttagagagccaccagggtgatttgctgctggctttctatcatttttatgttttaatgcaaaggaaattttaaaatgttctggaagtgtttttgattaagcaatgcagcctagaagcaatggttctgttcaatcattcagatgttagtggaagcataaaagtcaagactgcatgttgaaacctttcttttgatagttactgaactgcttggttaaactaaatggaaccatgtgctaatttttcacaattattgacctgtattgattgccactgtagtttggtatttccctttactttggtggcctgcttccctcatgccctggaatacaactcagagctccaggcagcggaaccatctattgttttgtttgccagaaagtgcaccctgtatggtctcctgtctaagttggaaatattatgcatgtgcaggactattcgagtattttataaacagtagcacacaataaattccatgcatgggccgctgctcctatctctgtgttgggttttatttggaagatgcaatctgatttgtccttttgatgcaaatcagaaaatcctgttactagagctgggatgtcctccggagattatctcgtggatagttcatggtaatttgattaattaaattctttataaattttgccttaaaaaaaacttttgttatatacttgttttacatgagcattagtaactgagcactagaggactttgaatgcctactgtaggcctcctaagtctaatatttaagatcactgtttattgtcttttaattgaaagaaaatatgttattgtctagaattttgttatagtggtattgggaatttactgggtgttctaacaataagaaaaatattagtgataattgca

SEQ ID NO: 7055 - protein, 152 aa, Homo sapiens
MLVNVLSICSDDELMTEGEDQFDGSAAARKEIIRNKIRAIGKMARVFSVLREESESVLTLKGLTPTGMLPSGVLAGGRQTLQSATVEAIEAEKAIRGFSPPHRICSFEEAKGLDRINERMPPRKDAVQQDGFNSLNTAHATENHGTGNHTAQ

SEQ ID NO: 7056 - DNA, 3524 bp, Homo sapiens
atgccggtcttagcccctctgtagggaaagagggtccgccatgttccccggcggcgccgccgcttggctctggtagccgccgcccccgcccccaaccccgcccggcccagagcctagccgagccccgggcccagcatggccgccccggagccggcccgggctgcaccgcccccacccccgcccccgccgccccctcccggggctgaccgcgtcgtcaaagctgtccctttccccccaacacatcgcttgacatctgaagaagtatttgatttggatgggatacccagggttgatgttctgaagaaccacttggtgaaagaaggtcgagtagatgaagaaattgcgcttagaattatcaatgagggtgctgccatccttcggagagagaaaaccatgatagaagtagaagctccaatcacagtgtgtggtgacatccatggccaattttttgatctgatgaaactttttgaagtaggaggatcacctgctaatacacgatacctttttcttggcgattatgtggacagaggttattttagtatagagtgtgtcttatatttatgggttctgaagattctatacccaagcacattatttcttctgagaggcaaccatgaatgcagacaccttactgaatattttacctttaagcaggaatgtaaaattaagtattcggaaagagtctatgaagcttgtatggaagcttttgatagtttgcctcttgctgcacttttaaaccaacagtttctttgtgttcatggtggactttcaccagaaatacacacactggatgatattaggagattagatagattcaaagagccacctgcatttggaccaatgtgtgacttgttatggtccgatccttctgaagattttggaaatgaaaaatcacaggaacattttagtcacaatacagttcgaggatgttcttatttttataactatccagcagtgtgtgaatttttgcaaaacaataatttgttatcgattattagagctcatgaagctcaagatgcaggctatagaatgtacagaaaaagtcaaactacagggttcccttcattaataacaattttttcggcacctaattacttagatgtctacaataataaagctgctgtattaaagtatgaaaataatgtgatgaatattcgacagtttaactgttctccacatccttactggttgcctaattttatggatgtcttcacgtggtctttaccgtttgttggagaaaaagtgacagaaatgttggtaaatgttctgagtatttgctctgatgatgaactaatgactgaaggtgaagaccagtttgatggttcagctgcagcccggaaagaaatcataagaaacaaaattcgagcaattggcaagatggcaagagtcttctctgttctcagggaggagagtgaaagtgtgctgacactcaagggcctgactcccacagggatgttgcctagtggagtgttagctggaggacggcagaccctgcaaagtgccacagttgaggctattgaggctgaaaaagcaatacgaggattctctccaccacatagaatctgcagttttgaagaggcaaagggtttggataggatcaatgagagaatgccacctcggaaagatgctgtacagcaagatggtttcaattctctgaacaccgcacatgccactgagaaccacgggacgggcaaccatactgcccagtgacccactacttcccagggactctcacatctcgggccccaaatggacagatcacccgaggagctggaggggtcggccaagctgactgtaaatttcacagtctctctgaagaaaccattgtgcttctgagaccctagcccccttcctggatggaggcttgagggccctgggacatgtgctatctgataagattgggtcatcgctgccaaggtggagagcagtgagcaaggggcttggggcaatttccagtggagggcatccacacctccattttatgcttgtggttcacacatttaagtttacaaatcagatttcttttccccttcagtagaattagattttgtttttcaatcatgatttcaaatgcaatcctaagagctaatgtggacttttctttttccatgaaatgtctttaaaggatgaattagcatggtcttaaaatacatttctgaggttactagctgtattttgaattgtgagcaaaatgccgagaaacccagttggcatttatacaaaatgttgacctcaggtctatagttcttaaatgtggctaattctgtaacatagtcttggtattttttaattatgaatgcatatcctatttccaggcaggctctcttacttgaacacaaatccaaaaactaatttagagtcttttttgcccagatcttttaagacttacaccccagagatttaagaagaaaacctctaaatttcaaaattatgaagaattacagaattactcatttaaggtactttaaaagaagtttgtacattgtcaaagtaaattttaattcaaatcatgtctgtaaaacttgacgtattttgtgtatgcatgttttcattttgcaaatatttaatatatagacctatgatgtacaggtacgacatgtataggttacctagatgttatgagaaattttagtttattgtgagtactcaagttgcttagagagccaccagggtgatttgctgctggctttctatcatttttatgttttaatgcaaaggaaattttaaaatgttctggaagtgtttttgattaagcaatgcagcctagaagcaatggttctgttcaatcattcagatgttagtggaagcataaaagtcaagactgcatgttgaaacctttcttttgatagttactgaactgcttggttaaactaaatggaaccatgtgctaatttttcacaattattgacctgtattgattgccactgtagtttggtatttccctttactttggtggcctgcttccctcatgccctggaatacaactcagagctccaggcagcggaaccatctattgttttgtttgccagaaagtgcaccctgtatggtctcctgtctaagttggaaatattatgcatgtgcaggactattcgagtattttataaacagtagcacacaataaattccatgcatgggccgctgctcctatctctgtgttgggttttatttggaagatgcaatctgatttgtccttttgatgcaaatcagaaaatcctgttactagagctgggatgtcctccggagattatctcgtggatagttcatggtaatttgattaattaaattctttataaattttgccttaaaaaaaacttttgttatatacttgttttacatgagcattagtaactgagcactagaggactttgaatgcctactgtaggcctcctaagtctaatatttaagatcactgtttattgtcttttaattgaaagaaaatatgttattgtctagaattttgttatagtggtattgggaatttactgggtgttctaacaataagaaaaatattagtgataattgca

SEQ ID NO: 7057 - protein, 524 aa, Homo sapiens; identical to SEQ ID NO: 787

SEQ ID NO: 7058 - DNA, 3494 bp, Homo sapiens
atgccggtcttagcccctctgtagggaaagagggtccgccatgttccccggcggcgccgccgcttggctctggtagccgccgcccccgcccccaaccccgcccggcccagagcctagccgagccccgggcccagcatggccgccccggagccggcccgggctgcaccgcccccacccccgcccccgccgccccctcccggggctgaccgcgtcgtcaaagctgtccctttccccccaacacatcgcttgacatctgaagaagtatttgatttggatgggatacccagggttgatgttctgaagaaccacttggtgaaagaaggtcgagtagatgaagaaattgcgcttagaattatcaatgagggtgctgccatccttcggagagagaaaaccatgatagaagtagaagctccaatcacagtgtgtggtgacatccatggccaattttttgatctgatgaaactttttgaagtaggaggatcacctgctaatacacgatacctttttcttggcgattatgtggacagaggttattttagtatagagtgtgtcttatatttatgggttctgaagattctatacccaagcacattatttcttctgagaggcaaccatgaatgcagacaccttactgaatattttacctttaagcaggaatgtaaaattaagtattcggaaagagtctatgaagcttgtatggaagcttttgatagtttgcctcttgctgcacttttaaaccaacagtttctttgtgttcatggtggactttcaccagaaatacacacactggatgatattaggagattagatagattcaaagagccacctgcatttggaccaatgtgtgacttgttatggtccgatccttctgaagattttggaaatgaaaaatcacaggaacattttagtcacaatacagttcgaggatgttcttatttttataactatccagcagtgtgtgaatttttgcaaaacaataatttgttatcgattattagagctcatgaagctcaagatgcaggctatagaatgtacagaaaaagtcaaactacagggttcccttcattaataacaattttttcggcacctaattacttagatgtctacaataataaagctgctgtattaaagtatgaaaataatgtgatgaatattcgacagtttaactgttctccacatccttactggttgcctaattttatggatgtcttcacgtggtctttaccgtttgttggagaaaaagtgacagaaatgttggtaaatgttctgagtatttgctctgatgatgaactaatgactgaaggtgaagaccagtttgatggttcagctgcagcccggaaagaaatcataagaaacaaaattcgagcaattggcaagatggcaagagtcttctctgttctcagggaggagagtgaaagtgtgctgacactcaagggcctgactcccacagggatgttgcctagtggagtgttagctggaggacggcagaccctgcaaagtgcaatacgaggattctctccaccacatagaatctgcagttttgaagaggcaaagggtttggataggatcaatgagagaatgccacctcggaaagatgctgtacagcaagatggtttcaattctctgaacaccgcacatgccactgagaaccacgggacgggcaaccatactgcccagtgacccactacttcccagggactctcacatctcgggccccaaatggacagatcacccgaggagctggaggggtcggccaagctgactgtaaatttcacagtctctctgaagaaaccattgtgcttctgagaccctagcccccttcctggatggaggcttgagggccctgggacatgtgctatctgataagattgggtcatcgctgccaaggtggagagcagtgagcaaggggcttggggcaatttccagtggagggcatccacacctccattttatgcttgtggttcacacatttaagtttacaaatcagatttcttttccccttcagtagaattagattttgtttttcaatcatgatttcaaatgcaatcctaagagctaatgtggacttttctttttccatgaaatgtctttaaaggatgaattagcatggtcttaaaatacatttctgaggttactagctgtattttgaattgtgagcaaaatgccgagaaacccagttggcatttatacaaaatgttgacctcaggtctatagttcttaaatgtggctaattctgtaacatagtcttggtattttttaattatgaatgcatatcctatttccaggcaggctctcttacttgaacacaaatccaaaaactaatttagagtcttttttgcccagatcttttaagacttacaccccagagatttaagaagaaaacctctaaatttcaaaattatgaagaattacagaattactcatttaaggtactttaaaagaagtttgtacattgtcaaagtaaattttaattcaaatcatgtctgtaaaacttgacgtattttgtgtatgcatgttttcattttgcaaatatttaatatatagacctatgatgtacaggtacgacatgtataggttacctagatgttatgagaaattttagtttattgtgagtactcaagttgcttagagagccaccagggtgatttgctgctggctttctatcatttttatgttttaatgcaaaggaaattttaaaatgttctggaagtgtttttgattaagcaatgcagcctagaagcaatggttctgttcaatcattcagatgttagtggaagcataaaagtcaagactgcatgttgaaacctttcttttgatagttactgaactgcttggttaaactaaatggaaccatgtgctaatttttcacaattattgacctgtattgattgccactgtagtttggtatttccctttactttggtggcctgcttccctcatgccctggaatacaactcagagctccaggcagcggaaccatctattgttttgtttgccagaaagtgcaccctgtatggtctcctgtctaagttggaaatattatgcatgtgcaggactattcgagtattttataaacagtagcacacaataaattccatgcatgggccgctgctcctatctctgtgttgggttttatttggaagatgcaatctgatttgtccttttgatgcaaatcagaaaatcctgttactagagctgggatgtcctccggagattatctcgtggatagttcatggtaatttgattaattaaattctttataaattttgccttaaaaaaaacttttgttatatacttgttttacatgagcattagtaactgagcactagaggactttgaatgcctactgtaggcctcctaagtctaatatttaagatcactgtttattgtcttttaattgaaagaaaatatgttattgtctagaattttgttatagtggtattgggaatttactgggtgttctaacaataagaaaaatattagtgataattgca

SEQ ID NO: 7059 - protein, 514 aa, Homo sapiens
MAAPEPARAAPPPPPPPPPPPGADRVVKAVPFPPTHRLTSEEVFDLDGIPRVDVLKNHLVKEGRVDEEIALRIINEGAAILRREKTMIEVEAPITVCGDIHGQFFDLMKLFEVGGSPANTRYLFLGDYVDRGYFSIECVLYLWVLKILYPSTLFLLRGNHECRHLTEYFTFKQECKIKYSERVYEACMEAFDSLPLAALLNQQFLCVHGGLSPEIHTLDDIRRLDRFKEPPAFGPMCDLLWSDPSEDFGNEKSQEHFSHNTVRGCSYFYNYPAVCEFLQNNNLLSIIRAHEAQDAGYRMYRKSQTTGFPSLITIFSAPNYLDVYNNKAAVLKYENNVMNIRQFNCSPHPYWLPNFMDVFTWSLPFVGEKVTEMLVNVLSICSDDELMTEGEDQFDGSAAARKEIIRNKIRAIGKMARVFSVLREESESVLTLKGLTPTGMLPSGVLAGGRQTLQSAIRGFSPPHRICSFEEAKGLDRINERMPPRKDAVQQDGFNSLNTAHATENHGTGNHTAQ

SEQ ID NO: 7060 - DNA, 1935 bp, Homo sapiens
tatgggaaggatggaggggccaggaagataagtgacagaaatgttggtaaatgttctgagtatttgctctgatgatgaactaatgactgaaggtgaagaccagtttgatggttcagctgcagcccggaaagaaatcataagaaacaaaattcgagcaattggcaagatggcaagagtcttctctgttctcagggaggagagtgaaagtgtgctgacactcaagggcctgactcccacagggatgttgcctagtggagtgttagctggaggacggcagaccctgcaaagtgccacagttgaggctattgaggctgaaaaagcaatacgaggattctctccaccacatagaatctgcagttttgaagaggcaaagggtttggataggatcaatgagagaatgccacctcggaaagatgctgtacagcaagatggtttcaattctctgaacaccgcacatgccactgagaaccacgggacgggcaaccatactgcccagtgacccactacttcccagggactctcacatctcgggccccaaatggacagatcacccgaggagctggaggggtcggccaagctgactgtaaatttcacagtctctctgaagaaaccattgtgcttctgagaccctagcccccttcctggatggaggcttgagggccctgggacatgtgctatctgataagattgggtcatcgctgccaaggtggagagcagtgagcaaggggcttggggcaatttccagtggagggcatccacacctccattttatgcttgtggttcacacatttaagtttacaaatcagatttcttttccccttcagtagaattagattttgtttttcaatcatgatttcaaatgcaatcctaagagctaatgtggacttttctttttccatgaaatgtctttaaaggatgaattagcatggtcttaaaatacatttctgaggttactagctgtattttgaattgtgagcaaaatgccgagaaacccagttggcatttatacaaaatgttgacctcaggtctatagttcttaaatgtggctaattctgtaacatagtcttggtattttttaattatgaatgcatatcctatttccaggcaggctctcttacttgaacacaaatccaaaaactaatttagagtcttttttgcccagatcttttaagacttacaccccagagatttaagaagaaaacctctaaatttcaaaattatgaagaattacagaattactcatttaaggtactttaaaagaagtttgtacattgtcaaagtaaattttaattcaaatcatgtctgtaaaacttgacgtattttgtgtatgcatgttttcattttgcaaatatttaatatatagacctatgatgtacaggtacgacatgtataggttacctagatgttatgagaaattttagtttattgtgagtactcaagttgcttagagagccaccagggtgatttgctgctggctttctatcatttttatgttttaatgcaaaggaaattttaaaatgttctggaagtgtttttgattaagcaatgcagcctagaagcaatggttctgttcaatcattcagatgttagtggaagcataaaagtcaagactgcatgttgaaacctttcttttgatagttactgaactgcttggttaaactaaatggaaccatgtgctaatttttcacaattattgacctgtattgattgccactgtagtttggtatttccctttactttggtggcctgcttccctcatgccctggaatacaactcagagctccaggcagcggaaccatctattgttttgtttgccagaaagtgcaccctgtatggtctcctgtctaagttggaaatattatgcatgtgcaggactattcgagtattttataaacagtagcacacaataaattccatgcatgggccgctgctcct

SEQ ID NO: 7061 - protein, 152 aa, Homo sapiens; identical to SEQ ID NO: 7055

SEQ ID NO: 7062 - DNA, 3116 bp, Homo sapiens
atgccggtcttagcccctctgtagggaaagagggtccgccatgttccccggcggcgccgccgcttggctctggtagccgccgcccccgcccccaaccccgcccggcccagagcctagccgagccccgggcccagcatggccgccccggagccggcccgggctgcaccgcccccacccccgcccccgccgccccctcccggggctgaccgcgtcgtcaaagctgtccctttccccccaacacatcgcttgacatctgaagaagtatttgatttggatgggatacccagggttgatgttctgaagaaccacttggtgaaagaaggtcgagtagatgaagaaattgcgcttagaattatcaatgagggtgctgccatccttcggagagagaaaaccatgatagaagtagaagctccaatcacagtgtgtggtgacatccatggccaattttttgatctgatgaaactttttgaagtaggaggatcacctgctaatacacgatacctttttcttggcgattatgtggacagaggttattttagtatagagtgtgtcttatatttatgggttctgaagattctatacccaagcacattatttcttctgagaggcaaccatgaatgcagacaccttactgaatattttacctttaagcaggaatgtaaaattaagtattcggaaagagtctatgaagcttgtatggaagcttttgatagtttgcctcttgctgcacttttaaaccaacagtttctttgtgttcatggtggactttcaccagaaatacacacactggatgatattaggagattagatagattcaaagagccacctgcatttggaccaatgtgtgacttgttatggtccgatccttctgaagattttggaaatgaaaaatcacaggaacattttagtcacaatacagttcgaggatgttcttatttttataactatccagcagtgtgtgaatttttgcaaaacaataatttgttatcgattattagagctcatgaagctcaagatgcaggctatagaatgtacagaaaaagtcaaactacagggttcccttcattaataacaattttttcggcacctaattacttagatgtctacaataataaagctgctgtattaaagtatgaaaataatgtgatgaatattcgacagtttaactgttctccacatccttactggttgcctaattttatggatgtcttcacgtggtctttaccgtttgttggagaaaaagtgacagaaatgttggtaaatgttctgagtatttgctctgatgatgaactaatgactgaaggtgaagaccagtttgatggttcagctgcagcccggaaagaaatcataagaaacaaaattcgagcaattggcaagatggcaagagtcttctctgttctcagggaggagagtgaaagtgtgctgacactcaagggcctgactcccacagggatgttgcctagtggagtgttagctggaggacggcagaccctgcaaagtgcaatacgaggattctctccaccacatagaatctgcagttttgaagaggcaaagggtttggataggatcaatgagagaatgccacctcggaaagatgctgtacagcaagatggtttcaattctctgaacaccgcacatgccactgagaaccacgggacgggcaaccatactgcccagtgacccactacttcccagggactctcacatctcgggccccaaatggacagatcacccgaggagctggaggggtcggccaagctgactgtaaatttcacagtctctctgaagaaaccattgtgcttctgagaccctagcccccttcctggatggaggcttgagggccctgggacatgtgctatctgataagattgggtcatcgctgccaaggtggagagcagtgagcaaggggcttggggcaatttccagtggagggcatccacacctccattttatgcttgtggttcacacatttaagtttacaaatcagatttcttttccccttcagtagaattagattttgtttttcaatcatgatttcaaatgcaatcctaagagctaatgtggacttttctttttccatgaaatgtctttaaaggatgaattagcatggtcttaaaatacatttctgaggttactagctgtattttgaattgtgagcaaaatgccgagaaacccagttggcatttatacaaaatgttgacctcaggtctatagttcttaaatgtggctaattctgtaacatagtcttggtattttttaattatgaatgcatatcctatttccaggcaggctctcttacttgaacacaaatccaaaaactaatttagagtcttttttgcccagatcttttaagacttacaccccagagatttaagaagaaaacctctaaatttcaaaattatgaagaattacagaattactcatttaaggtactttaaaagaagtttgtacattgtcaaagtaaattttaattcaaatcatgtctgtaaaacttgacgtattttgtgtatgcatgttttcattttgcaaatatttaatatatagacctatgatgtacaggtacgacatgtataggttacctagatgttatgagaaattttagtttattgtgagtactcaagttgcttagagagccaccagggtgatttgctgctggctttctatcatttttatgttttaatgcaaaggaaattttaaaatgttctggaagtgtttttgattaagcaatgcagcctagaagcaatggttctgttcaatcattcagatgttagtggaagcataaaagtcaagactgcatgttgaaacctttcttttgatagttactgaactgcttggttaaactaaatggaaccatgtgctaatttttcacaattattgacctgtattgattgccactgtagtttggtatttccctttactttggtggcctgcttccctcatgccctggaatacaactcagagctccaggcagcggaaccatctattgttttgtttgccagaaagtgcaccctgtatggtctcctgtctaagttggaaatattatgcatgtgcaggactattcgagtattttataaacagtagcacacaataaattccatgcatgggccgctgctcct

SEQ ID NO: 7063 - protein, 514 aa, Homo sapiens; identical to SEQ ID NO: 7059

SEQ ID NO: 7064 - DNA, 3146 bp, Homo sapiens
atgccggtcttagcccctctgtagggaaagagggtccgccatgttccccggcggcgccgccgcttggctctggtagccgccgcccccgcccccaaccccgcccggcccagagcctagccgagccccgggcccagcatggccgccccggagccggcccgggctgcaccgcccccacccccgcccccgccgccccctcccggggctgaccgcgtcgtcaaagctgtccctttccccccaacacatcgcttgacatctgaagaagtatttgatttggatgggatacccagggttgatgttctgaagaaccacttggtgaaagaaggtcgagtagatgaagaaattgcgcttagaattatcaatgagggtgctgccatccttcggagagagaaaaccatgatagaagtagaagctccaatcacagtgtgtggtgacatccatggccaattttttgatctgatgaaactttttgaagtaggaggatcacctgctaatacacgatacctttttcttggcgattatgtggacagaggttattttagtatagagtgtgtcttatatttatgggttctgaagattctatacccaagcacattatttcttctgagaggcaaccatgaatgcagacaccttactgaatattttacctttaagcaggaatgtaaaattaagtattcggaaagagtctatgaagcttgtatggaagcttttgatagtttgcctcttgctgcacttttaaaccaacagtttctttgtgttcatggtggactttcaccagaaatacacacactggatgatattaggagattagatagattcaaagagccacctgcatttggaccaatgtgtgacttgttatggtccgatccttctgaagattttggaaatgaaaaatcacaggaacattttagtcacaatacagttcgaggatgttcttatttttataactatccagcagtgtgtgaatttttgcaaaacaataatttgttatcgattattagagctcatgaagctcaagatgcaggctatagaatgtacagaaaaagtcaaactacagggttcccttcattaataacaattttttcggcacctaattacttagatgtctacaataataaagctgctgtattaaagtatgaaaataatgtgatgaatattcgacagtttaactgttctccacatccttactggttgcctaattttatggatgtcttcacgtggtctttaccgtttgttggagaaaaagtgacagaaatgttggtaaatgttctgagtatttgctctgatgatgaactaatgactgaaggtgaagaccagtttgatggttcagctgcagcccggaaagaaatcataagaaacaaaattcgagcaattggcaagatggcaagagtcttctctgttctcagggaggagagtgaaagtgtgctgacactcaagggcctgactcccacagggatgttgcctagtggagtgttagctggaggacggcagaccctgcaaagtgccacagttgaggctattgaggctgaaaaagcaatacgaggattctctccaccacatagaatctgcagttttgaagaggcaaagggtttggataggatcaatgagagaatgccacctcggaaagatgctgtacagcaagatggtttcaattctctgaacaccgcacatgccactgagaaccacgggacgggcaaccatactgcccagtgacccactacttcccagggactctcacatctcgggccccaaatggacagatcacccgaggagctggaggggtcggccaagctgactgtaaatttcacagtctctctgaagaaaccattgtgcttctgagaccctagcccccttcctggatggaggcttgagggccctgggacatgtgctatctgataagattgggtcatcgctgccaaggtggagagcagtgagcaaggggcttggggcaatttccagtggagggcatccacacctccattttatgcttgtggttcacacatttaagtttacaaatcagatttcttttccccttcagtagaattagattttgtttttcaatcatgatttcaaatgcaatcctaagagctaatgtggacttttctttttccatgaaatgtctttaaaggatgaattagcatggtcttaaaatacatttctgaggttactagctgtattttgaattgtgagcaaaatgccgagaaacccagttggcatttatacaaaatgttgacctcaggtctatagttcttaaatgtggctaattctgtaacatagtcttggtattttttaattatgaatgcatatcctatttccaggcaggctctcttacttgaacacaaatccaaaaactaatttagagtcttttttgcccagatcttttaagacttacaccccagagatttaagaagaaaacctctaaatttcaaaattatgaagaattacagaattactcatttaaggtactttaaaagaagtttgtacattgtcaaagtaaattttaattcaaatcatgtctgtaaaacttgacgtattttgtgtatgcatgttttcattttgcaaatatttaatatatagacctatgatgtacaggtacgacatgtataggttacctagatgttatgagaaattttagtttattgtgagtactcaagttgcttagagagccaccagggtgatttgctgctggctttctatcatttttatgttttaatgcaaaggaaattttaaaatgttctggaagtgtttttgattaagcaatgcagcctagaagcaatggttctgttcaatcattcagatgttagtggaagcataaaagtcaagactgcatgttgaaacctttcttttgatagttactgaactgcttggttaaactaaatggaaccatgtgctaatttttcacaattattgacctgtattgattgccactgtagtttggtatttccctttactttggtggcctgcttccctcatgccctggaatacaactcagagctccaggcagcggaaccatctattgttttgtttgccagaaagtgcaccctgtatggtctcctgtctaagttggaaatattatgcatgtgcaggactattcgagtattttataaacagtagcacacaataaattccatgcatgggccgctgctcct

SEQ ID NO: 7065 - protein, 524 aa, Homo sapiens; identical to SEQ ID NO: 787

SEQ ID NO: 7066 - DNA, 3691 bp, Homo sapiens
gtttatatatttgtatactgaagatgggaacacaagtccctttgaagctaagatttttgactctggtgattgttattgctcatctttggtatctcttttccgtttgtgataacactaaattcacaccttgaaaattagagcaggataagaaggaggggatactttttagagtattcttgatgaacttgttcatccatataggaagtcccttgtgctggagccataaattgccttccctggggttaattcaggaagaccaggttaaagggtacaaatgaataggtcagtctttaaaaatttgtttgcacaactgactacatcagacatttgaacttcagagcatatgaaataccatattttctcaatagtatgatgccccttgatgaatcttaccacatatttaataaagcttttcaggaaaaacaatatatgcctcaatggtaaggcacaccctcatacctgaaacacttaaaatatagaaaaattaatgtcttgaaattgaggaaaatatggtaatagcaatgaatgtcatgaattttatatatggcctatatctagaccctatgtcttcttttaaattaagtacttgttggaagtatctgatatttgttatatctctctgctatagggaggagagtgaaagtgtgctgacactcaagggcctgactcccacagggatgttgcctagtggagtgttagctggaggacggcagaccctgcaaagtggtaatgatgttatgcaacttgctgtgcctcagatggactggggcacacctcactcttttgctaacaattcacataatgcatgcagggaattccttctgttttttagttcctgtctcagcagctgacctagacagggtactgtattagctagtgtctcattaatacctgatcagggcagaaaactgatagaatgggtattcctttcaattgaaaataatggtcagttcctcagcttttcatgaaatgatatgggagcagctcatatcataatgtctgaaatatttatttattcatctgtctaattcacccttttcttttaaaagccccagtttcagaatgtgaatcagggatattcctgttactaaaatggaaatgtaattccaagtttcttttttaattttttaaatttatgtcattgtattggactatgcttatatttaaaactacttaatttagagttaactacctgcttaggccccagaacattacttatgcccttcagttaccaaaagatttgtgcaaggttttgtaccctggtaaatgatgccaaagtttgttttctgtggtgtttgtcaaatgttctatgtataattaactgtctgtaacatgctgtttccttcctctgcagatgtagctgctttcctaaatctgtctgtctttctttaggttagctgtatgtctgtaaaagtatgttcaattaaattactccatcagacacttgtctgtcttgcaatgtagaagcagctttgtagcaccttgttttgaggtttgctgcatttgttgctgcactttgtgcattctgaacatgaatgtaacattagatattaagtcattgttataaggggttgaatttaaatcctgtaagtcaaaattgaaagggtgttattaagtgtgcctttattttgcatgaaaataaaaagaattatacgtaaagcattcctgtaatctggctcattgaatattttatacttaaaaaactttttttggcgtaaatatttgtgtaaatactgggttaactttttaaaagcccattacagattaaatagaagagagtgatgtgagtattagtgaccatacacagtaattcagtctagatttcttttcctgtggttggaaagcaaaaatacatgatgtggaaaagcctgaatttcttgtagtcacttttgacagccctctaagggtcattgtctattaaaatagcaacagatctgatgttttccttagtcataattaggtttctttttggtgttgtaattagtgacttttttagagggaaaaaaataggcaattttaacgttttgaatgaatttacatttgacttcacaatttcatttcacttggttccataataagtgcgtgtgcatgtgtacatgtgtgtgtgtgagagagacaatgattgcttttcaataaaaaaaatttttttcctgtaaacaatttttacttgtagcctatacatgttctattttaaatgtcattgtattgttcactaccaccactggtatatctgaaaagtacactgtgttttgaaattataaattttcattctgaatgaggtttctttttttgattttctttaaaaaaaaaaaacaacctgctttgatttgctttacattccttgccctccatttttcttattatattgtaaacattagaaaaatgaactaaaaagaatttcatgaatgtacattaaaacaagatcttaaacatttgataaaactagtaaaaatgttaatagaaaaggatgaactttaatagcttcaaaaatattatactcttctttgttcagaaaagaaaaataaaaccaaaagggtatcatacttaaataaatctacagtatagtcatctctcagttatccttggatataacattacttttatattgtatccgcagcaaaccttgctttcagatttcacgattagcccctgctaattacatgctttgttgacttctgtttattcttaatttgtacacggcttgaagctcattccttcaactttgaaaccaccctcaactgcaggggaggtttgaaagacagcagctttgctggagggactctctattctcagcatggactaagttactggaaggaattgagtttaaggggtctaatttgggaccccttaaactagatagcttctagttttgctagctcttgatagtgtggtttgggcatttggtcaaaattattttcctagcataagataaatccactttgaaacaaataacaaaggtcatacaaaagctgcatgtttgtgattattttttaaaaagttatcctacattttaaattttagtagataatgttccctgatgttagtgtgtataactgagagttaggtattgcaaaaggaaaaaattttaattctaagacctcgtgcctatttgtcagaaaataaaaattgtcgtttcaagaactttaaaagttaatttacatgatgtttcttgagtgtttttacaaactgcacaactctattggaggtggattttctgttcatctttattttatgtatgttttctttctgggaaatttgattgggagctagcactgtaatgctaccctcaccaggatctatatgggaaatatatgtggccaattctatgttagtaataccaaattcctcttggtcatttatcttgcatagtactgaggaacacagtttgagatagcactatgctcaaacttattaaggccatgacaagatgccctatataactgaaaacaaatagaggagaaatagtgcctttcagatagagtgttgcaattagcaatctgggctcaagtgatcttcctgcttcagcttcccgagtagctgggattacatatgcacaccaccatgcccggctaattttttaaactttttttggggggagatgaggtctctctatgtgttgcccaggctgggctcaaacgctcaagggatccttccacctcagccatccgagagtgctggggttataggcatg

SEQ ID NO: 7067 - protein, 35 aa, Homo sapiens [sequence omitted]

SEQ ID NO: 7068 - DNA, 2595 bp, Homo sapiens
atgccggtcttagcccctctgtagggaaagagggtccgccatgttccccggcggcgccgccgcttggctctggtagccgccgcccccgcccccaaccccgcccggcccagagcctagccgagccccgggcccagcatggccgccccggagccggcccgggctgcaccgcccccacccccgcccccgccgccccctcccggggctgaccgcgtcgtcaaagctgtccctttccccccaacacatcgcttgacatctgaagaagtatttgatttggatgggatacccagggttgatgttctgaagaaccacttggtgaaagaaggtcgagtagatgaagaaattgcgcttagaattatcaatgagggtgctgccatccttcggagagagaaaaccatgatagaagtagaagctccaatcacagtgtgtggtgacatccatggccaattttttgatctgatgaaactttttgaagtaggaggatcacctgctaatacacgatacctttttcttggcgattatgtggacagaggttattttagtatagagcatgttctaggcactgaagacatatcgattaatcctcacaataatattaatgagtgtgtcttatatttatgggttctgaagattctatacccaagcacattatttcttctgagaggcaaccatgaatgcagacaccttactgaatattttacctttaagcaggaatgtaaaattaagtattcggaaagagtctatgaagcttgtatggaagcttttgatagtttgcctcttgctgcacttttaaaccaacagtttctttgtgttcatggtggactttcaccagaaatacacacactggatgatattaggagattagatagattcaaagagccacctgcatttggaccaatgtgtgacttgttatggtccgatccttctgaagattttggaaatgaaaaatcacaggaacattttagtcacaatacagttcgaggatgttcttatttttataactatccagcagtgtgtgaatttttgcaaaacaataatttgttatcgattattagagctcatgaagctcaagatgcaggctatagaatgtacagaaaaagtcaaactacagggttcccttcattaataacaattttttcggcacctaattacttagatgtctacaataataaagctgctgtattaaagtatgaaaataatgtgatgaatattcgacagtttaactgttctccacatccttactggttgcctaattttatggatgtcttcacgtggtctttaccgtttgttggagaaaaagtgacagaaatgttggtaaatgttctgagtatttgctctgatgatgaactaatgactgaaggtgaagaccagtttgatggttcagctgcagcccggaaagaaatcataagaaacaaaattcgagcaattggcaagatggcaagagtcttctctgttctcagggaggagagtgaaagtgtgctgacactcaagggcctgactcccacagggatgttgcctagtggagtgttagctggaggacggcagaccctgcaaagtggtaatgatgttatgcaacttgctgtgcctcagatggactggggcacacctcactcttttgctaacaattcacataatgcatgcagggaattccttctgttttttagttcctgtctcagcagctgacctagacagggtactgtattagctagtgtctcattaatacctgatcagggcagaaaactgatagaatgggtattcctttcaattgaaaataatggtcagttcctcagcttttcatgaaatgatatgggagcagctcatatcataatgtctgaaatatttatttattcatctgtctaattcacccttttcttttaaaagccccagtttcagaatgtgaatcagggatattcctgttactaaaatggaaatgtaattccaagtttcttttttaattttttaaatttatgtcattgtattggactatgcttatatttaaaactacttaatttagagttaactacctgcttaggccccagaacattacttatgcccttcagttaccaaaagatttgtgcaaggttttgtaccctggtaaatgatgccaaagtttgttttctgtggtgtttgtcaaatgttctatgtataattaactgtctgtaacatgctgtttccttcctctgcagatgtagctgctttcctaaatctgtctgtctttctttaggttagctgtatgtctgtaaaagtatgttcaattaaattactccatcagacacttgtctgtcttgcaatgtagaagcagctttgtagcaccttgttttgaggtttgctgcatttgttgctgcactttgtgcattctgaacatgaatgtaacattagatattaagtcattgttataaggggttgaatttaaatcctgtaagtcaaaattgaaagggtgttattaagtgtgcctttattttgcatgaaaataaaaagaattatacgtaaagcattcctgtaatctggctcattgaatattttatacttaaaaaactttttttggcgtaaatatttgtgtaaatactgggttaactttttaaaagcccattacagatt

SEQ ID NO: 7069 - protein, 514 aa, Homo sapiens
MAAPEPARAAPPPPPPPPPPPGADRVVKAVPFPPTHRLTSEEVFDLDGIPRVDVLKNHLVKEGRVDEEIALRIINEGAAILRREKTMIEVEAPITVCGDIHGQFFDLMKLFEVGGSPANTRYLFLGDYVDRGYFSIEHVLGTEDISINPHNNINECVLYLWVLKILYPSTLFLLRGNHECRHLTEYFTFKQECKIKYSERVYEACMEAFDSLPLAALLNQQFLCVHGGLSPEIHTLDDIRRLDRFKEPPAFGPMCDLLWSDPSEDFGNEKSQEHFSHNTVRGCSYFYNYPAVCEFLQNNNLLSIIRAHEAQDAGYRMYRKSQTTGFPSLITIFSAPNYLDVYNNKAAVLKYENNVMNIRQFNCSPHPYWLPNFMDVFTWSLPFVGEKVTEMLVNVLSICSDDELMTEGEDQFDGSAAARKEIIRNKIRAIGKMARVFSVLREESESVLTLKGLTPTGMLPSGVLAGGRQTLQSGNDVMQLAVPQMDWGTPHSFANNSHNACREFLLFFSSCLSS

SEQ ID NO: 7070 - DNA, 2498 bp, Homo sapiens
atgccggtcttagcccctctgtagggaaagagggtccgccatgttccccggcggcgccgccgcttggctctggtagccgccgcccccgcccccaaccccgcccggcccagagcctagccgagccccgggcccagcatggccgccccggagccggcccgggctgcaccgcccccacccccgcccccgccgccccctcccggggctgaccgcgtcgtcaaagctgtccctttccccccaacacatcgcttgacatctgaagaagtatttgatttggatgggatacccagggttgatgttctgaagaaccacttggtgaaagaaggtcgagtagatgaagaaattgcgcttagaattatcaatgagggtgctgccatccttcggagagagaaaaccatgatagaagtagaagctccaatcacagtgtgtggtgacatccatggccaattttttgatctgatgaaactttttgaagtaggaggatcacctgctaatacacgatacctttttcttggcgattatgtggacagaggttattttagtatagagcatgttctaggcactgaagacatatcgattaatcctcacaataatattaatgagtgtgtcttatatttatgggttctgaagattctatacccaagcacattatttcttctgagaggcaaccatgaatgcagacaccttactgaatattttacctttaagcaggaatgtaaaattaagtattcggaaagagtctatgaagcttgtatggaagcttttgatagtttgcctcttgctgcacttttaaaccaacagtttctttgtgttcatggtggactttcaccagaaatacacacactggatgatattaggagattagatagattcaaagagccacctgcatttggaccaatgtgtgacttgttatggtccgatccttctgaagattttggaaatgaaaaatcacaggaacattttagtcacaatacagttcgaggatgttcttatttttataactatccagcagtgtgtgaatttttgcaaaacaataatttgttatcgattattagagctcatgaagctcaagatgcaggctatagaatgtacagaaaaagtcaaactacagggttcccttcattaataacaattttttcggcacctaattacttagatgtctacaataataaagctgctgtattaaagtatgaaaataatgtgatgaatattcgacagtttaactgttctccacatccttactggttgcctaattttatggatgtcttcacgtggtctttaccgtttgttggagaaaaagtgacagaaatgttggtaaatgttctgagtatttgctctgatgatgaactaatgactgaaggtgaagaccagtttgatggttcagctgcagcccggaaagaaatcataagaaacaaaattcgagcaattggcaagatggcaagagtcttctctgttctcagggaggagagtgaaagtgtgctgacactcaagggcctgactcccacagggatgttgcctagtggagtgttagctggaggacggcagaccctgcaaagtggtaatgatgttatgcaacttgctgtgcctcagatggactggggcacacctcactcttttgctaacaattcacataatgcatgcagggaattccttctgttttttagttcctgtctcagcagctgacctagacagggtactgtattagctagtgtctcattaatacctgatcagggcagaaaactgatagaatgggtattcctttcaattgaaaataatggtcagttcctcagcttttcatgaaatgatatgggagcagctcatatcataatgtctgaaatatttatttattcatctgtctaattcacccttttcttttaaaagccccagtttcagaatgtgaatcagggatattcctgttactaaaatggaaatgtaattccaagtttcttttttaattttttaaatttatgtcattgtattggactatgcttatatttaaaactacttaatttagagttaactacctgcttaggccccagaacattacttatgcccttcagttaccaaaagatttgtgcaaggttttgtaccctggtaaatgatgccaaagtttgttttctgtggtgtttgtcaaatgttctatgtataattaactgtctgtaacatgctgtttccttcctctgcagatgtagctgctttcctaaatctgtctgtctttctttaggttagctgtatgtctgtaaaagtatgttcaattaaattactccatcagacacttgtctgtcttgcaatgtagaagcagctttgtagcaccttgttttgaggtttgctgcatttgttgctgcactttgtgcattctgaacatgaatgtaacattagatattaagtcattgttataaggggttgaatttaaatcctgtaagtcaaaattgaaagggtgttattaagtgtgcctttattttgcatgaaaataaaaagaattatacgtaaagcattcctgt

SEQ ID NO: 7071 - protein, 514 aa, Homo sapiens; identical to SEQ ID NO: 7069

SEQ ID NO: 7072 - DNA, 959 bp, Homo sapiens
aatctgctgacctgttgtgggtaaacatccataaattctgccctggctgagaaacatttaactttttcgtctaggatgaatgtgtgggtgtgtgtttgtaagggaggggtaactccttttgaccaaagtgttgatggttttctaagtaaatacttgctatccacaagaattttttttttcgtttatgctgctttttctccctttctgcactataaaggctggccttccaattcctgccccgacccttcaccgtgatccaatcccacaaggttcccctaatttctgctccgggtggcacctgacggccaaaagtgaacccctgcggttgtcgccagctagacgcggatagggcggacgactgtcaccggggagcaggcgtgggccaaagccgaggtgatttctgactgctcactggcgggcctcgcgtggctgaaggtctccgagcccctcggttcgccccggcaagccagaagtgcagctgtcgcggggcaggaagctaatcgcggcccctgcgccgctttgacaggccgagtgaagagaaaacgggctcactgcagctaacagcctcaccccttgggctaggaagccacggaagcaaaacctccgccccggcctgaaagcaaccgggagaccgcggaaccactgccaccgactcagccctgcccagcaggggcccgcccaggggccactccccaagggaggcagccagtcactcgcccgcccttccgggcccactcccgaggggacggtctcccgcccgccctcacacacagctagctcttcaggccaggcccccagggtttcgtccacctctcacctttgacgacgcgaatgaagaatgaggaggtgctgcgatcgaacgactgcgaggaaacacacccgctctcatggcattcccagtaaactgagaagacgtgattaaacctcaggatctcctactaatagagaaatgtataacg

SEQ ID NO: 7073 - protein, 59 aa, Homo sapiens
MNVWVCVCKGGVTPFDQSVDGFLSKYLLSTRIFFFVYAAFSPFLHYKGWPSNSCPDPSP
